(19) United States
(12) Patent Application Publication
(10) Pub. No.: US 2006/0123505 A1
(43) Pub. Date: Jun. 8, 2006

(54) Full-length plant cDNA and uses thereof

(75) Inventors: Shoshi Kikuchi, Ibaraki (JP); Naoki Kishimoto, Ibaraki (JP); Kouji Satoh, Ibaraki (JP); Toshifumi Nagata, Ibaraki (JP); Nobuyuki Kawagashira, Tsukuba-shi (JP); Junshi Yazaki, Ibaraki (JP); Masahiro Ishikawa, Ibaraki (JP); Koji Doi, Ibaraki (JP); Jun Kawai, Kanagawa (JP); Yoshihide Hayashizaki, Ibaraki (JP); Yasuhiro Otomo, Ibaraki (JP); Kenichi Matsubara, Osaka (JP); Kazuo Murakami, Ibaraki (JP)

Correspondence Address: KLARQUIST SPARKMAN, LLP, 121 SW SALMON STREET, SUITE 1600, PORTLAND, OR, 97204, US

(73) Assignees: National Institute of Agrobiological Sciences; RIKEN; Foundation for Advancement of International Scienc

(21) Appl. No.: 10/449,902

(22) Filed: May 29, 2003

(30) Foreign Application Priority Data
May 30, 2002 (JP) 2002-203269
Dec. 11, 2002 (JP) 2002-383870

(51) Int. Cl. A01H 5/00; G06F 19/00; C07H 21/04; A01H 1/00; C07K 14/415; C07K 16/18

(52) U.S. Cl. 800/278; 800/320.2; 435/468; 530/370; 435/419; 530/388.1; 536/23.6; 702/20

(57) ABSTRACT

Full-length cDNAs of plants and their uses are provided. Source plants are preferably monocot plants, more preferably poaceous plants, and most preferably rice. Vectors carrying said cDNAs and transformants containing said cDNAs or said vectors, transgenic plants containing said transformants, polypeptides encoded by said cDNAs are also provided. The full-length cDNA clones play important roles in the annotation of correct gene coding region, determination of exons and introns, comprehensive expression analysis on the transcription level and proteome analysis. Furthermore, full-length cDNA clones are industrially useful in producing plants having different properties from those of the wild type due to the inhibition of expression and functional suppression in plant bodies.

### FIELD OF THE INVENTION

[0001] The present invention relates to a full-length plant CDNA

### and uses thereof.

### REFERENCE TO TABLES AND A SEQUENCE LISTING

[0002] Tables 13 through 17 inclusive and a Sequence Listing are providedinelectronicformatonlyoncompactdiscs, aspermitted under 37 CFR 1.52(e) and 1.821(c). The disc entitled “Tables” (Copy 1 and Copy 2) contains the following files:

| File name | Size (KB) | Date recorded onto disc |
|---|---|---|
| Table 13.doc | 3,770 | May 23, 2003 |
| Table 14.doc | 5,148 | May 23, 2003 |
| Table 15.doc | 234 | May 23, 2003 |
| Table 16.doc | 4,388 | May 23, 2003 |
| Table 17.doc | 858 | May 23, 2003 |

[0003] The disc entitled “Sequence List” (Copy 1 and Copy 2) contains the following files:

| File name | Size (KB) | Date recorded onto disc |
|---|---|---|
| 001.txt | 4,688 | Apr. 18, 2003 |
| 002.txt | 4,662 | Nov. 25, 2002 |
| 003.txt | 4,853 | Nov. 25, 2002 |
| 004.txt | 4,832 | Nov. 25, 2002 |
| 005.txt | 4,985 | Nov. 25, 2002 |
| 006.txt | 4,962 | Nov. 25, 2002 |
| 007.txt | 5,030 | Nov. 25, 2002 |
| 008.txt | 5,000 | Nov. 25, 2002 |
| 009.txt | 4,944 | Nov. 25, 2002 |
| 010.txt | 4,981 | Nov. 25, 2002 |
| 011.txt | 5,024 | Nov. 25, 2002 |
| 012.txt | 5,036 | Nov. 25, 2002 |
| 013.txt | 5,662 | Nov. 26, 2002 |
| 014.txt | 7,950 | Nov. 28, 2002 |
| 015.txt | 7,906 | Nov. 28, 2002 |
| 016.txt | 8,018 | Nov. 28, 2002 |
| 017.txt | 8,514 | Nov. 28, 2002 |
| 018.txt | 8,429 | Nov. 28, 2002 |
| 019.txt | 8,350 | Nov. 28, 2002 |
| 020.txt | 8,294 | Nov. 28, 2002 |
| 021.txt | 8,463 | Nov. 28, 2002 |
| 022.txt | 8,449 | Nov. 28, 2002 |
| 023.txt | 499 | Nov. 28, 2002 |

The material on these discs is hereby incorporated by reference in its entirety.

### BACKGROUND OF THE INVENTION

[0004] Recently, draft sequences of the rice (indica subspecies) genome (Yu, J. et al., “A Draft sequence of the rice genome (Oryza sativa L. ssp. indica)” Science, 2002, 296, 79-92) and japonica subspecies (Goff, S. A. et al., “A Draft sequence of the ricegenome (Oryza sativa L. ssp. Japonica)” Science, 2002, 296, 92-100), have been published. Both of these draft genome sequences were obtained based on the whole-genome shotgun sequencing method, and therefore they have gaps, and no chromosomal information. In comparison, the International Rice Genome Sequencing Project announced its intention to use the sequencing by the method using BAC/PAC clones to complete most of the rice genome sequence by the end of 2002. The results of partial analysis of rice chromosomes 1 and 4 were published (Sasaki, T. et al., “The genome sequence and structure of rice chromosome 1.” Nature, 2002, 420, 312-316; Q. Feng et al., “Sequence and analysis of rice chromosome 4.” Nature, 2002, 420, 316-320) . The genome sequence data from both rice and Arabidopsis thaliana can be used to compare how monocot and dicot plants differ from each other and how plant genomes differ from animal genomes.

[0005] When all of these sequence data are completely obtained, decoding of the rice genome sequence will be accomplished. These sequence data are, however, not sufficient as data for gene function analysis, because the current technology cannot completely predictgene coding regions and other regions based on only the genome sequence data. The full-length cDNA project has been initiated aiming at making up for such data gaps as well as accumulating comprehensive information on the expression of the rice gene and its protein. Information on the full-length cDNA clones greatly contributes to determine annotation, exon and intron of the correct gene-coding region. In addition, such information on these cDNA clones is important for the exhaustive expression analysis at the transcriptional level and proteome analysis. The results of the full-length cDNA project on Arabidopsis have already been published (Seki, M. et al., “Functional Annotation of a Full-Length Arabidopsis cDNA Collection.” Science, 2002, 296, 141-145).

### SUMMARY OF THE INVENTION

[0006] Even today when decoding of the rice genomic DNA is coming to an end, we are still in great need of isolation and characterization of the full-length cDNA of rice.

[0007] These full-length cDNA clones can be used for various purposes. They play important roles in the annotation of correct gene coding regions, exon-intron determination, comprehensive expression analysis at the transcription level and analysis of proteome. Furthermore, full-length cDNAs are industrially useful in creating plant bodies showing a phenotype that is different from the wild type as a result of inhibiting their expression and function in the plant bodies.

[0008] Diverse uses of these full-length cDNA clones can be mentioned. First, alignment of these clones togenome sequences enables to check the fidelity of computer prediction of gene coding regions from the genome sequence, such as, a transcription initiation point, exons, introns, and a transcription termination point. In contrast, this fidelity checking leads to the improvement of gene coding region prediction program. Furthermore, information of full-length cDNA clones is combined with results of comprehensive analysis of expression profiles at the transcriptional level using microarrays such, to predict promoter and transcription regulatory regions of genes of interest in the genome sequence.

[0009] Furthermore, comparison between full-length cDNA clone sequence information and sequences adjacent the insertion site of insertion-mutants such as transposon insertion mutants, enables to find a plant whose gene corresponding to said clone is disrupted. The function of said gene can be predicted from the phenotype of the plant. It is also possible to express the protein encoded by the full-length cDNA clone using various systems such as Escherichia coli, yeast, in vitro system so as to investigate the biochemical function and conformation of the protein, thereby elucidating overall its functions. Furthermore, proteins that interact with said protein can be found by using the yeast two-hybrid system and such to clarify a part of a biological network in vivo.

[0010] Given this, an objective of the present invention is to provide the full-length cDNA clones of plants. Another objective of this invention is to modify plants using the cDNAs thus isolated and characterized.

[0011] The present inventors collected 3′-EST sequences of 175,642 full-length cDNA clones using two different methods, namely, the oligo-capping and biotinylated CAP trapper methods. These clones were clustered into 28,469 nonredundant groups, and all representative clones from each group were completely sequenced with 99.98% fidelity. As a result of homology searches, 21,596 (75.86%) of these representative full-length cDNA clones (28,469) were annotated. ORFs were present in 28,332 clones; among them 24,507 clones had ORFs containing 100 or more amino-acid residues. As a result of attempting to map the28,469 full-length cDNA clones, 18,933 transcription units (TU) were mapped to the indica draft genome. Of the said full-length cDNA clones, 18,900 clones (12,996TU) had a homology to genes (27,288) of Arabidopsis predicted from its genome sequence. Thus, the present inventors succeeded in comprehensive collection, grouping, sequencing and functional annotation of full-length cDNA clones from rice.

[0012] That is, the present invention relates to full-length cDNAs of plants and uses thereof, more specifically to:

[1] An isolatedplant-derivednucleic acid, wherein saidnucleic acid is selected from the group consisting of:

(a) a nucleic acid encoding a protein comprising an amino acid sequence set forth in any one of SEQ ID NOs: 28470 through 56791;

(b) a nucleic acid containing the coding region of a nucleotide sequence set forth in any one of SEQ ID NOs: 1 through 28469;

(c) a nucleic acid encoding a protein comprising an amino acid sequence set forth in any one of SEQ ID NOs: 28470 through 56791 wherein one or more amino acids are substituted, deleted, inserted and/or added; and

(d) a nucleic acid hybridizing to a nucleic acid comprising a nucleotide sequence set forth in any one of SEQ ID NOs: 1 through 28469 under stringent conditions.

[2] The nucleic acid according to [1], wherein said nucleic acid is derived from rice.

[3] An isolated DNA molecule selected from the group consisting of:

(a) a DNA molecule encoding an antisense RNA complementary to a transcript of the DNA molecule of [1] or [2];

(b) a DNA molecule encoding RNA having ribozyme activity to specifically cleave a transcript of the DNA of [1] or (2];

(c) a DNA molecule encoding RNA inhibiting the expression of the DNA of [1] or [2] via an RNAi effect at the time of expression of said DNA in plant cells; and

(d) a DNA molecule encoding RNA inhibiting the expression of the DNA of [1] or [2] by the co-suppression effect at the time of expression of said DNA in plant cells.

[4] A vector containing the nucleic acid of anyone of [1] through [3] .

[5] A transformed plant cell maintaining the nucleic acid of any one of [1] through [3] or the vector of [4].

[6] A transformed plant body containing the transformed plant cell of [5].

[7] A progeny or clone of the transformed plant body of [6].

[8] A propagation material of the transformed plant body of [6] or [7].

[9] A method of producing the transformed plant body of [6], wherein said method comprises the step of transducing the DNA of any one of [1] through [3] or the vector of [4] into plant cells to regenerate a plant body from said plant cells.

[10] A protein encoded by any one of the nucleic acids of [1].

[11] A method of producing the protein of [10] comprising the following steps:

(1) transducing any one of the nucleic acids of [1] or a vector containing said nucleic acid into cells capable of expressing said nucleic acid so as to obtain a transformant;

(2) culturing said transformant; and

(3) recovering the protein of [10] from the culture of the step (2).

[12] An antibody binding to the protein of [10].

[13] A rice gene database comprising sequence information selected from the group consisting of:

(a) one or more amino acid sequences selected from SEQ ID NOs: 28470 through 56791;

(b) one or more nucleotide sequences selected from SEQ ID NOs: 1 through 28469; and

(c) both (a) and (b).

[14] A method of determining the transcriptional regulatory region comprising the steps of:

(1) mapping the nucleotide sequence of any one of SEQ ID NOs: 1 through 28,469 to the rice genome nucleotide sequence, and

(2) determining the transcriptional regulatory region of the gene mapped in the step (1) which contains the transcriptional regulatory region found on the 5′-side of the 5′ most end of the mapped region.

### BRIEF DESCRIPTION OF THE DRAWING

[0013] FIG. 1 represents the results of detailed comparison of CDS1 region at the exon and intron levels. One complete coding sequence (CDS) has been predicted in the BACO-10 kb region; this figure shows introns and exons in the region and relationship between two cDNA clones of the present invention that have been mapped to the BACO-10 kb region.

### DETAILED DESCRIPTION OF THE INVENTION

[0014] The present invention provides full-length cDNA clones derivedfromplants. Nucleotide sequences of full-length cDNA clones isolated from a rice plant by the present inventors are set forth in SEQ ID NOs: 1 through 28,469 and amino acid sequences of proteins encoded by these cDNAs are shown in SEQ ID NOs: 28,470through56,791. Correspondences of the nomenclature of each clone, SEQ ID NOs of nucleotide sequences, initiation and terminationpoints of ORFs, and SEQ ID NOs of amino acid sequences encoded in ORFs are set forth in the “List of Clones” at the end of this specification.

[0015] As used herein, an “isolated nucleic acid” is a nucleic acid the structure of which is not identical to that of any naturally occurring nucleic acid or to that of any fragment of a naturally occurring genomic nucleic acid spanning more than three genes. The term therefore covers, for example, (a) a DNA which has the sequence of part of a naturally occurring genomic DNA molecule but is not flanked by both of the coding sequences that flank that part of the molecule in the genome of the organism in which it naturally occurs; (b) a nucleic acid incorporated into a vector or into the genomic DNA of a prokaryote or eukaryote in a manner such that the resulting molecule is not identical to any naturally occurring vector or genomic DNA; (c) a separate molecule such as a cDNA, a genomic fragment, a fragment produced by polymerase chain reaction (PCR), or a restriction fragment;_and (d) a recombinant nucleotide sequence that is part of a hybrid gene, i.e., a gene encoding a fusion protein. Specifically excluded_from this definition are nucleic acids present in random, uncharacterized mixtures of different DNA molecules, transfected cells, or cell clones, e.g., as these occur in a DNA library such as a CDNA or genomic DNA library.

[0016] Of 28,469 clones, those with the longest ORF encoding 100 or more amino acid residues were examined for what functional domains they had against the InterPro DB, yielding a total of 3491 InterPro domains. Comparison of the search results of rice cDNA clones obtained in the present invention with those of cDNAs from Arabidopsis thaliana, Caenorhabditis elegans, Drosophila melanogaster, Homo sapiens, Saccharomyces cerevisiae and S. pombe yielded the following characteristic InterPro domains.

[0017] Found commonly in eukaryotes (Table 4a)

[0018] Found specifically or frequently in rice (Table 4b and 4c)
[0019] Pollen allergic protein domain
[0020] Expressed organ-specifically (e.g., serine protease inhibitor in seeds)
[0021] Environmental stress-inducible proteins (anti-freeze
[0022] protein, ABS/WDS-inducible anti-drought protein, etc.)

[0023] Found specifically and frequently in Arabidopsis thaliana

[0024] (Table 4d)
[0025] TIR domain

[0026] Transcription factors play important roles in the gene expression control of living organisms. Controlling the transcription factor activity is none other than controlling the gene expression. Therefore, genes encoding transcription factors are useful in the control of the gene expression in plants.

[0027] The InterPro search for full-length cDNAs of the present invention yielded 1336 transcription factor clones classified into 18 DNA binding domains, and the details are shown in Table 5. Clones predicted as the transcription factor are shown in the “List of clones predicted as the transcription factor” categorized into the respective classes at the end of this specification. As a result of this classification, Zn finger-type transcription factors are dominant, followed by Myb-type factors; these constitutions are shared with Arabidopsis. Of the clones predicted as a transcription factor, those classified into Zn finger-type were collected and subclassified in the “List of clones predicted as Zn finger type” at the end of this specification.

[0028] Control of a transcription factor expression enables to control the expression of a gene transcriptionally regulated by said transcription factor. For example, a plant body produced by transducing an antisense sequence of a transcription factor involved in the transcription of a gene causing an undesirable phenotype enables to suppress the action of said transcription factor. It is also possible to competitively inhibit the action of a transcription factor by transducing into cells a nucleic acid imitating the recognition sequence for the transcription factor as a decoy nucleic acid. The recognition sequence for transcription factors encoded by full-length cDNA of the present invention can be determined by the footprinting method or gel shift assay. On the other hand, the activity of a transcription factor involved in expression of a desirable phenotype can be enhanced by transducing a gene encoding the transcription factor.

[0029] Plant membrane proteins play important roles in the interaction between cells, absorption of nutrients from the extracellular environment, recognition and infection by viruses, etc. For example, the transporter present in the plasma membrane is closely associated with the salt tolerance of plants. Therefore, full-length cDNA clones encoding the plant membrane protein is useful in controlling various properties of plants.

[0030] The MEMSAT program was used to predict transmembrane domains of proteins encoded by full-length cDNA clones of the present invention. As shown in Table 6, 6,280 clones, which account for 22.1% of the whole full-length cDNA clones, had two or more transmembrane-spanning domains. When the direction of the transmembrane domain whose N-terminus is intracellular is referred to as IN, and whose N-terminus is extracellular OUT, the number of transmembrane spanning domains in IN direction and that in OUT direction was about the same, although, in some instances, the number of either one direction is predominant over the other, depending on the number of transmembrane spanning.

[0031] Furthermore, intracellular localization of proteins, encoded by full-length cDNA clones of the present invention, was analyzed using the pSORT program. Among those proteins with ORF encodding 100 or more amino acid residues, those encoded by 18,166 clones were predicted tobe localized intracellularly. Table 7 shows the putative target organelles, the number of clones encoding proteins that are predicted to belocalized, and the ratio (%) of said number of clones to 18,166 clones. The major organelle where the proteins are localized is nucleus, accounting for 20.0% of clones. Second major organelles include plasma membrane, cytoplasm, endoplasmic reticulum (ER), and microbody, and each accounted for about 10% of the clones analyzed.

[0032] Homology search was performed between known genes and nucleotide sequences of the full-length cDNA clones or their amino acid sequences of the present invention as query sequences. BLASTN search revealed that 2603 cDNA clones were identical to already-known rice genes. These clones were classified into the identical rice genes. BLAST X search revealed that 5607 clones were homologous to rice homolog genes, 12 527 clones to genes of other plants than rice, and 859 clones to genes of organisms other than plants. These results were used to functionally classify 21,596 (75.86%) of 28,469 full-length cDNA clones of the present invention. The identical rice genes or the already known genes found to be homologous to genes of rice and plants other than rice include the following genes.

<Rice Ribosomal RNA Gene>

[0033] Fumio Takaiwa, Shoshi Kikuchi and Kiyoharu Oono, “Cloning of rice ribosome RNA (rRNA) gene (III). Full-length nucleotide sequence of rice rRNA gene (abstract, oral presentation),” Ikushugaku Zasshi (Breeding Science), 1985 April, Vol. 35 (suppl. 1), pp. 214-215.
   <Rice Storage Protein Gene, Glutelin>
[0034] Fumio Takaiwa, Shoshi Kikuchi and Kiyoharu Oono, “Cloning and structural analysis of rice storage protein glutelin cDNA (Abstract, oral presentation) ,” Abstracts of the annual meeting, The Molecular Biology Society of Japan, 1985 December, Vol. 8, p. 54.
[0035] Fumio Takaiwa, Shoshi Kikuchi and Kiyoharu Oono, “Heterogeneity of rice storage protein glutelin mRNA (Abstract, oral presentation),” Abstr. Annu. Meet. Mol. Biol. Soc. Jap., 1986 December, Vol. 9, p. 222.
[0036] Fumio Takaiwa, Hiroyasu Ebinuma, Shoshi Kikuch and Kiyoharu Oono, “Structure of rice seed storage protein glutelin nuclear gene (Abstract, oral presentation),” Abstr. Annu. Meet. Mol. Biol. Soc. Jap., 1987 December, Vol. 10, p. 139.
[0037] Fumio Takaiwa, Akira Kato, Shoshi Kikuchi and Kiyoharu Oono, “Expression of rice storage protein glutelin gene group—identificationof tissue specific expression region (Abstract, oral presentation),” Ikushugaku Zasshi (Breeding Science), 1988 October, Vol. 38 (Suppl. 2), pp. 154-155.
[0038] Fumio Takaiwa, Akira Kato, Shoshi Kikuchi and Kiyoharu Oono, “Structure and expression control of rice storage protein glutelingene group (Oral presentation, abstract),” Abstracts of 11th Annual meeting, The Molecular Biology Society of Japan, 1988 December, p. 284.
[0039] Fumio Takaiwa, Shoshi Kikuchi and Kiyoharu Oono, “Structure and expression of rice storage protein glutelin genes (Oral presentation, abstract),” Abstr. 2nd Int. Congr. Plant Mol. Biol., 1988 November, p. 325.
[0040] Shoshi Kikuchi, Fumio Takaiwa and Kiyoharu Oono, “Gene expression analysis in rice cultured cells—analysis of protein synthesis in rice callus using two-dimensional electrophoresis (Oral presentation, abstract),” Ikushugaku Zasshi (Breeding Science), 1985 April, Vol. 35 (Suppl. 1), pp. 14-15.
   <Rice pRB301 and pRB401 DNAs>
[0041] Shoshi Kikuchi, Yoshio Kaneko, Takao Komatsuda, Fumio Takaiwa and Kiyoharu Oono, “DNA analysis in rice cultured cells—isolation and characterization of DNA fragments whose copy numbers are significantly different between rice embryo and callus (oral presentation, abstract),” Ikushugaku Zasshi (Breeding Science), 1985 September, Vol. 35 (suppl. 2), pp. 102-103.
[0042] Shoshi Kikuchi, Fumio Takaiwa and Kiyoharu Oono, “Analysis of rice genes—analysis of DNA fragments whose copy numbers are varied in cultured cells and differentiated cells (oral presentation, abstracts), ” Abstr. Annu. Meet. Mol. Biol. Soc. Jap., 1985 December, Vol. 8, p. 56.
[0043] Shoshi Kikuchi, Fumio Takaiwa and Kiyoharu Oono, “Analysis of rice genes—analysis of DNA whose copy numbers are reversibly fluctuated in differentiation and dedifferentiation states (Oral presentation Abstr.),” Abstr. Annu. Meet. Mol. Biol. Soc. Jap., 1985 December, Vol. 9, p. 224.
[0044] Kiyoharu Oono, Shoshi Kikuchi and Fumio Takaiwa, “DNA amplification and diminution in rice callus culture,” Abstr. 6th Intnl. Cong. Plant Tissue Culture Society, 1986 August, p. 287.
[0045] Shoshi Kikuchi, Fumio Takaiwa and Kiyoharu Oono, “Analysis of nucleotide sequence of variable copy number DNAin rice (oral presentation, abstr.),” Ikushugaku Zasshi (Breeding Science), 1987 Octover, Vol. 37 (Suppl. 2), pp. 122-123.
[0046] Shoshi Kikuchi, Fumio Takaiwa and Kiyoharu Oono, “Analysis of nucleotide sequence of variable copy number DNA in rice (oral presentation, abstr.)” Abstr. Annu. Meet. Mol. Biol. Soc. Jap., 1987 November, Vol. 10, p. 140.
[0047] Shoshi Kikuchi, Taiichi Ogawa, Fumio Takaiwa and Kiyoharu Oono, “Analysis of redundant DNA sequence transcribed in rice (Oral presentation Abstr.), ” Ikushugaku Zasshi (Breeding Science), 1988 Octover, Vol. 38 (suppl. 2), pp. 118-119.
   <Rice Drought-Responsive Genes>
[0048] Shoshi Kikuchi, M. Soliman, Shin Dong-Hyun, Kazunari Maruta, Fumio Takaiwa and Kiyoharu Oono, “Gene expression analysis in rice dry callus—Cloning and characterization of the genes which specifically express in rice callus culture under dried condition (oral presentation, abstr.),” Abstr. Annu. Meet. Mol. Biol. Soc. Jap. 13th, 1990 December, p. 262.
[0049] Shoshi Kikuchi, M. Soliman, Shin Dong-Hyun, Kazunari Maruta, Fumio Takaiwa and Kiyoharu Oono, “Analysis of genes which specifically express in rice dry callus culture (oral presentation abstr.),” Ikushugaku Zasshi (Breeding Science), 1990 November, Vol. 40 (suppl. 2), p. 20-21.
[0050] Shoshi Kikuchi, M. Soliman, Shin Dong-Hyun and Kiyoharu Oono, “Cloning and characterization of the genes which express under dried condition of rice callus (Accumulation of MRNA discovered in rice callus under dried conditions) (oral presentation abstr.), ” 20th Annu. Meet. Mol. Cell Biol. at Intnl. Congr. Mol. Biol. (Keystone Symposium), 1991 January, p. 58.
[0051] Shoshi Kikuchi, Kazunari Maruta and Kiyoharu Oono, “Analysis of gene specifically expressed in rice dry callus II—Giant transcript discovered in mature seeds and dried rice callus culture (oral presentation abstr.),” Ikushugaku Zasshi (Breeding Science), 1991 April, Vol. 41 (Suppl. 1), pp. 136-137.
[0052] Shoshi Kikuchi and Kiyoharu Oono, “Giant transcript of drought-specific gene discovered in mature seeds and dried callus culture of rice (oral presentation abstr.),” 4th Plant Mol. Biol. Symp., 1991 January, p. 37.
[0053] Shoshi Kikuchi and Kiyoharu Oono, “Cloning and characterization of genes specifically expressed in rice callus (Analysis of genes expressed in rice callus) (Oral presentation, abstr.),” Intnl. Workshop Rice Mol. Biol., 1991 August, p. 35.
[0054] Shoshi Kikuchi and Kiyoharu Oono, “Cloning and characterization of the genes which specifically express in callus of rice (Oral presentation abstr.) ,” Abst. 3rd Congr. Int. Soc. Plant. Mol. Biol., 1991 Octover, p. 872.
[0055] Shoshi Kikuchi, Kazumaru Miyoshi, Kazunari Maruta and Kiyoharu Oono, “Rice callus cDNA clones for the characterization and understanding of calli in molecular level (oral presentation abstr.), German-Japanese Work-shop Plant Culture, Breeding and Formation of Phytochemicals, Abstr, 1992 February, p. 35.
[0056] Shoshi Kikuchi, Kazumaru Miyoshi, Kazunari Maruta and Kiyoharu Oono, “cDNA cloning from rice callus I. Classification of clones based on the expression specificity and analysis of nucleotide sequences (Oral presentation, abstract),” Ikushugaku Zasshi (Breeding Science), 1992 April, Vol. 42 (suppl. 1), pp. 206-207.
[0057] Kazumaru Miyoshi, Shoshi Kikuchi, Kazunari Maruta, Tadao Naito and Kiyoharu Oono, “Expression analysis of rice callus cDNA in long-term subcultured cells (oral presentation abstr.),” Ikushugaku Zasshi (Breeding Science), 1992 April, Vol. 42 (suppl. 1), pp. 208-209.
   <Rice Heat-Shock Inducible Genes>
[0058] Kazumaru Miyoshi, Shoshi Kikuchi, Kazunari Maruta, Kiyoharu Oono and Tadao Naito, “Analysis of heat shock protein-like protein gene expressed in rice callus (oral presentation abstr.),” Ikushugaku Zasshi (Breeding Science), 1992Octover, Vol. 42 (suppl. 2), pp. 196-197.
   <Rice SNF-1-Like Protein Gene, Osk1>
[0059] Kanegae, H., H. Funatsuki, S. Kikuchi and M. Takano, “Differential expression of the rice snf-1 related protein kinase gene family.” Abs. Int. Congr. Plant Mol. Biol. 5th, p. 147.
[0060] Takano, M., H. Kanegae, and S. Kikuchi, “Genome structure of SNF-related protein kinase genes in rice.” Abs. Annu. Meet. Mol. Biol. Soc. Jpn. 20th, 1997, 4-EH-P-065.
[0061] Takano, M., H. Kanegae, K. Miyoshi, M. Mori, S. Kikuchi and Y. Nagato, “Rice has two distinct classes of protein kinase genes related to SNF1 of Saccharomyces cerevisiae, which are differently regulated in the early seed development.”Interact, Intersect. Plant Signal Pathw, 1999, 60.
[0062] Kanegae, H, S. Kikuchi and M. Takano, “Analysis of promoter activity of OSK genes in rice.” Plant Cell Physiol., 1998, 39 (suppl), p. 125.
[0063] Takano, M., H. Kanegae, K. Miyoshi, M. Mori, S. Kikuchi and Y. Nagato, “Rice has two distinct classes of protein kinase genes related to SNF1 of Saccharomyces cerevisiae, which are differently regulated in the early seed development.” Plant Cell Physiol., 1999, 40 (suppl), p. 79.
   <Rice Blue Light Receptor NPH1-Like Protein Gene>
[0064] Kanegae, H., M. Tahira, S. Kikuchi, K. Yamamoto, M. Yano, T. Sasaki, K. Kanegae, M. Wada and M. Takano, “Identification of NPH1 homologs in rice.” Abs. Annu. Meet. Mol. Biol. Soc. Jap. 21st, 1999, p. 274.
   <Rice Flower Organ Formation Gene, OSSUPL>
[0065] Masaki Mori, Hiroshi Takatsuji, Hiromi Kanegae, Toshifumi Nagata, Yuriko Shibata and Shoshi Kikuchi, “Cloning and structural analysis of rice SUPERMAN gene.” Abs. Annu. Meet. Mol. Biol. Soc. Jpn., 1997, p. 475.
[0066] Masaki Mori, Hiroshi Takatsuji, Hiromi Kanegae, Toshifumi Nagata, Yurikio Shibata and Shoshi Kikuchi, “Isolation and expression analysis of genomic DNA of rice SUPERMAN gene (RSUP).” Ikushugaku Zasshi (Breeding Science), 1998, 48 (suppl. 1), p. 28.
[0067] Masaki Mori, Hiroshi Takatsuji, Hiromi Kanegae, Toshifumi Nagata, Yuriko Shibata and Shoshi Kikuchi, “Isolation and characterization of a rice gene encoding a zinc-fingerprotein related to Arabidopsis SUPERMAN.” Abstracts of 15th International Congress on Sexual Plant Reproduction, 1998, p. 96.
   <Rice Brassinosteroid Synthase Gene, OsBR6ox>
[0068] Masaki Mori, Hisako Ooka, Kazuhiko Sugimoto, Kouji Sato, Hirohiko Hirochika, Koji Yamamoto and Shoshi Kikuchi, “Analysis of dwarf mutant strain whose phenotype is recovered by brassinolide.” Proceeding of the Annual Meeting, The Japanese Society of Plant Physiologists, 2002, p. 225.
[0069] Masaki Mori, Takahito Nomura, Hisako Ooka, Masumi Ishizaka, Takao Yokota, Kazuhiko Sugimoto, Ken Okabe, Kouji Sato, Koji Yamamoto, Hirohiko Hirochika and Shoshi Kikuchi, “Rice extremely dwarf mutant brd 1 is a brassinosteroidbiosynthesis mutant.” Ikushugaku Kenkyuu (Breeding Research), 2002, 4 (suppl. 2), p. 352.
[0070] Masaki Mori, Hisako Ooka, Takahito Nomura, Masumi Ishizaka, Takao Yokota, Kazuhiko Sugimoto, Kouji Satoh, Hirohiko Hirochika and Shoshi Kikuchi, “Isolation and characterization of a rice dwarf mutant with the defect in the brassinolide biosynthesis” Abstracts of 13th Congress of the Federation of European Societies of Plant Physiology, 2002, p. 233.
   Publications
   <Rice Storage Protein Glutelin Genes>
[0071] Fumio Takaiwa, Shoshi Kikuchi and Kiyoharu Oono, “The structure of rice storage protein glutelin precursor deduced from cDNA”. (FEBS. Lett., 1986 September 206(1), pp. 33-35.
[0072] Sequencing of cDNA proved that the glutelin precursor consisted of 49 amino acid residues, arranged in order of signal peptide-acidic subunit-basic subunit.
[0073] Fumio Takaiwa, Shoshi Kikuchi and Kiyoharu Oono, “Ariceglutelin gene family—A major type of glutelin mRNAs can be divided into two classes”. Mol. Gen. Genetics, 1987 July 208, pp. 15-22.
[0074] Analysis of cDNA clones of rice glutelin gene revealed that they could be classified into 2 classes based on the differences in the restriction enzyme map and expression time, etc.
[0075] Fumio Takaiwa, Hiroyasu Ebinuma, Shoshi Kikuchi and Kiyoharu Oono, “Nucleotide sequence of a rice glutelin gene” FEBS. Lett., 1987 August 221(1), pp. 43-47.
[0076] Genomic DNA of rice glutelin gene was cloned to elucidate its entire structure.
   <Rice pRB301 and pRB401 DNAs>
[0077] Shoshi Kikuchi, Fumio Takaiwa and Kiyoharu Oono, “Variable copy number DNA sequences in rice” Mol. Genetics, 1987 December 210, pp. 7373-380.
[0078] Rice nuclear DNA whose copy number reversibly changes during cellular differentiation and dedifferentiation, was cloned to elucidate its structure.
   <Rice Gravity Stress Responsive Gene>
[0079] Kwon, S. T., Shoshi Kikuchi and Kiyoharu Oono, “Molecular cloning and characterization of gravity specific cDNA in rice (Oryza sativa L.) suspension callus” Jpn. J. Genet., 1992 August 67, pp. 335-348.
[0080] Rice gene specifically expressed under 450,000× g high gravity condition was isolated and characterized.
[0081] Shoshi Kikuchi, Kazumaru Miyoshi, kazunari Maruta and Kiyoharu Oono, “cDNA clones of rice callus for the analysis of plant tissue culture problems,” Proc. Plant Tissue Culture and Gene Manipulation for Breeding and Formation of Phytochemicals, German-Japanese Work-shop Plant Culture, Breeding and Formation of Phytochemicals, Abstr., National Institute of Agrobiological Sciences), 1992 July, pp. 173-178.
   <Rice SNF-1-Like Protein Gene>
[0082] Takano, M., H. Kanegae, H. Funatsuki and S. Kikuchi, “Rice has two distinct classes of protein kinase genes related to SNF1 of Saccharomryces cerevisiae, which are differently regulated in seed development.” Mol. Gen. Genetics, 1998, 260, pp. 388-394.
   <Rice Fe-Deficiency-Responsive Protein Gene>
[0083] Takashi Negishi, Hiromi Nakanishi, Junshi Yazaki, Naoki Kishimoto, Fumiko, Fujii, Kanako Shimbo, Kimiko Yamamoto, Katsumi Sakata, Takuji Sasaki, Shoshi Kikuchi, Satoshi Mori and Naoko K. Nishizawa, “cDNA microarray analysis of gene expression during Fe-deficiency stress in barley suggests that polar transport of vesicles is implicated in phytosiderophore secretion in Fe-deficient barley roots,” The Plant Journal, 2002, 30, pp. 83-94.
   <Rice Brassinosteroid Synthase Gene, OsBR6ox>
[0084] Masaki Mori, Takahito Nomura, Hisako Ooka, Masumi Ishizaka, Takao Yokota, Kazuhiko Sugimoto, Ken Okabe, Hideyuki Kaj iwara, Kouji Satoh, Koji Yamamoto, Hirohiko Hirochika and Shoshi Kikuchi, “Isolation and characterization of a rice dwarf mutant with a defect in brassinosteroid biosynthesis” Plant Physiology, 2002, Vol.130, pp. 1152-1161.

[0085] Additional homology search was performed between amino-acid sequences encoded by ORFs of full-length cDNA clones of the present invention and those encoded by the predicted CDS of the Arabidopsis genome nucleotide sequence. As shown in Table 8, 18,900 full-length cDNA clones (12,996 TU) yielded hits, confirming the homology of the aforementioned ORF amino acid sequences with those Arabidopsis with high probability. These results substantiated a high reliability of amino acid sequences obtained in this invention. Furthermore, it is highly reliable that cDNAs of the present invention have full-length, which makes their ORFs also reliable.

[0086] “BLAST search results” at the end of this specification lists combinations of clones which showed the highest homology among the 28,469 clones searched by BLAST N and BLAST X. Rice genes highly homologous to known genes whose functions are known, would function similar to the homologous known genes.

[0087] For example, the following clones were found to have the serpin or serine protease domain:

002-145-A10 4867 1: serine protease inhibitor, and

001-125-A10 4868 1: serpin

[0088] Proteins having these domains are involved in vermin tolerance (see the website of National Center for Biotechnology information, http://www.ncbi.nlm.nih.gov/entrez/query.fcgi?cmd=Retrieve &db=PubMed&list uids=12354191&dopt=Abstract). Therefore, the above clones are useful in breeding plants having disease and vermin tolerances.

[0089] The clone, J023033I19 5505 1, was confirmed to have the heavy metal binding domain. Therefore, this clone can be used as a gene for conferring the heavy metal tolerance on plants, or the heavy metal absorption capability on plant cells.

[0090] The following clones were found to have the domain associated with ethylene receptors, which are phytohormone receptors and involved in controlling the maturation and deterioration of plants.

J023034P21 156 1: two-component response regulator and

J023056E19 155 1: two-component sensor molecule.

[0091] Proteins having the following domains are assumed to be so-called G-proteins, which are involved in the signal transduction and are useful in the regulation of signal transduction system in plants.

RAB small monomeric GTPase,

RAS small monomeric GTPase, and

GTPase small monomeric GTPase.

[0092] Proteins having the following domains are expected to be involved in the signal transduction system.

Inositol-3-phosphate synthase, and calcium ion binding.

Clones (e.g., 002-143-H11) having the above domains are useful in controlling the signal transduction in plants.

[0093] Gene ontology (GO) is useful to clarify the function of a gene based on the results of motif and homology searches using protein informatics analysis against the InterPro database. Construction of GO enables to systematically comprehend functions of known genes detected by a homology search.

[0094] Motif search results predict functional domains of proteins encoded by cDNAs of the present invention. Homology search results predict functions of known genes having homology to full-length cDNAs of this invention. However, functions of known genes described as DEFINITION in the homology search results below arevariously expressed. To comprehend functions of each gene from expressions of functions, the expressions should be unified as much as possible. GO is a tool for comprehending gene functions by replacing expressions actually assigned to each gene with a unified expression. In other words, the use of GO makes it possible to comprehend homology search results by the unified expression terms. GO terms have been attached to the GenBank report, InterPro domain names, and Arabidopsis genes. Therefore, if GO terms are assigned to the records of the database to which full-length cDNAs of the present invention showed homology, GO terms can also be assigned to full-length cDNA clones of this invention based onhomology search results. Full-length cDNA clones of this invention were classified based on the GO terms.

[0095] The unified expression assigned to genes using GO is referred to as GO term. It is classified into a number of categories. In other words, each category may include plural GO terms. Furthermore, categories are divided into subcategories based on different aspects, and one GO term may be included in two or more categories.

[0096] GO terms assigned to full-length cDNA clones of the present invention are shown at the end of this specification. Furthermore, the names of categoriess and the number of constitutive GO terms in each category are listed in Tables 10-12.

[0097] The total number of GO terms associated with “biological processes” in the full-length cDNA clones of the present invention was 18,485. Tables 9-12 show categorization of these clones. The largest class was “Unclassified,” accounting for about ½ of the total terms, followed by “Metabolism,” “Transport,” and “Translation”. GO terms associated with “function” were assigned to 10,942 full-length cDNA clones, and the total number of these GO terms was 16,853. These GO terms could not be classified exclusively, and the most frequently observed GO “function” term was “enzyme”. GO terms associated with “cellular component” were assigned to 3629 full-length cDNA clones, and the total number of the terms was 3637.

[0098] Relationship between GO terms contained in each category and clones to which the GO terms are assigned is shown in the “List of clones included in each Gene Ontology category” at the end of this specification. The function of each clone can be found from GO terms shown in the list. Representative GO terms will be specifically described below. The largest number of clones was classified into the category “Enzyme”. GO function term “Enzyme” includes many industrially useful enzymes as listed below. When protein functions are predicted by Motif search results, prediction as being enzymatic activity is usually highly accurate. In other words, proteins whose functions associated with enzyme are predicted by Motif search results would have that function actually. Therefore, proteins to which GO term included in category “Enzyme” attached to the InterPro domain names (results of functional domain search) would have the activity corresponding to that GO term. Since the GO terms included in the category “Enzyme Inhibitor” also designate functions to control enzyme actions, proteins to which these GO terms are assigned include many of those having useful functions like proteins to which “Enzyme” Go terms are assigned.

1,3-beta-Glucan synthase:

Chitinase:

[0099] This enzyme is involved in disease tolerance and vermin tolerance of plants. Therefore, genes encoding proteins having this enzyme activity are useful in breeding disease tolerant or vermin tolerant plants.

1l-Aminocyclopropane-1-carboxylate synthase:

[0100] This enzyme is involved in the synthesis of ethylene, a phytohormone. Therefore, a gene encoding a protein having this enzyme activity is useful in breeding environmental stress-tolerant plants.

Alpha, alpha-trehalase:

Alpha, alpha-trehalose-phosphate synthase (UDP-forming):

[0101] These enzymes are involved in the synthesis of trehalose, which is an element regulating cryotolelance of plants. Therefore, a gene encoding a protein having either one of these enzyme activities is useful in breeding cryotolerant plants.

Alpha-amylase:

Beta-amylase:

[0102] These enzymes are involved in degrading plant storage starch. Therefore, genes encoding these proteins are useful in the artificial regulation of germination.

Aspartate kinase:

Glutamate synthase:

[0103] These enzymes are involved in the nitrogen metabolic system of rice. Therefore, genes encoding proteins having these enzyme activities can be used in breed improvement.

Caspase:

[0104] This is the enzyme involved in cell death of plant. Therefore, genes encoding proteins having this enzyme activity are useful in the artificial induction of apoptosis in plants.

Catalase:

Copper, zinc superoxide dismutase:

Ferredoxin reductase:

Glutathione peroxidase:

Glutathione synthase:

Peroxidase:

Superoxide dismutase:

[0105] These enzymes play important roles in the plant response to oxidation stresses. Therefore, genes encoding proteins having these enzyme activities are important in breeding oxidation stress tolerant plants.

Hexokinase:

[0106] This enzyme is involved in the accumulation of storage substances in rice. Therefore, genes encoding proteins having this enzyme activity are useful in the improvement of phenotypes associated with plant storage substances.

O-Methyltransferase:

[0107] This enzyme is involved in the syntheses of secondary metabolites in plants. Therefore, genes encoding proteins having this enzymatic activity are useful in producing pharmacological substances.

Phosphoenolpyruvate carboxylase:

[0108] This enzyme has an important role in the C4 photosynthesis. Therefore, genes encoding proteins having this enzyme activity may be used in improvement of photosynthesis efficiency.

Phospholipase C:

[0109] This enzyme is involved in the synthesis of in vivo second messengers (phospholipids). Therefore, genes encoding proteins having this enzymatic activity may be used in controlling the signal transduction system.

Protein kinase:

Protein phosphatase:

Protein serine/threonine kinase:

Protein serine/threonine phosphatase:

Protein tyrosine kinase:

Protein tyrosine phosphatase:

Protein tyrosine/serine/threonine phosphatase:

Transmembrane receptor protein tyrosine kinase:

[0110] These enzymes are involved in the intracellular signal transduction occurring in plant biological process such as development and differentiation, and response to environmental factors. Therefore, genes encoding proteins having these enzyme activities are extremely important research subjects.

Sulfotransferase:

[0111] This enzyme is important for sulfur nutrition in plants. Therefore, genes encoding proteins having this enzymatic activity are useful in breeding plants responsive to nutrients and/or environment.

3′,5′-Cyclic-nucleotide phoshodiesterase (TOC1 homolog):

Dyneinalpha chain, flagellarouterarm (Adagio3 =FKFlhomolog):

[0112] These enzymes are involved in regulation of circadian rhythm in plants. Circadian rhythm refers to a biological rhythm having a period of approximately 24 hours. Therefore, genes encoding proteins having these enzyme activities are useful in breeding environment-responsive plants. Examples of full-length cDNA clones of the present invention to which these GO terms are assigned, include J013116P12 and J013023A04.

DNA helicase (DDM1=SYD homolog):

[0113] This enzyme controls DNA methylation. Therefore, genes encoding proteins having this enzyme activity are useful in breeding plants by controlling gene expression. An example of clones to which this GO term is assigned includes J013133N02.

Calpain:

[0114] This enzyme is involved in the control of starch storage in rice. Therefore, genes encoding proteins having this enzyme activity are useful in the improvement of phenotypes associated with storage substances in plants. Examples of clones to which this GO term is assigned include 002-108-E01 and J013167021.

Heat shock protein (HSP100 homolog):

[0115] This enzyme is an environmental stress-responsive enzyme. Therefore, genes encoding proteins having this enzyme activity areuseful inbreedingheat-tolerantplants. Examplesof clones to which this GO term is assigned include J023007C17 and 001-027-D01.

Ubiquitin activating enzyme:

Ubiquitin ligase:

[0116] These enzymes can be useful in elucidating the basic physiological regulatory mechanism of plants. This GO term is assigned to, for example, J033076H04 and 001-046-C03.

Histidine kinase (Wooden leg homolog):

HD-zipped (Revoluta homolog):

[0117] These enzymes are involved in intracellular signal transduction occurring in plant biological process such as development and differentiation, and response to environmental factors. Therefore, genes encoding proteins having these enzyme activities are extremely important researchsubjects. These GO terms are assigned to, for example, J013112K17 and 001-023-H08.

Receptor-like protein kinase (bril homolog):

Serine/threonine kinase (shaggy-like homolog):

[0118] These enzymes play important roles in signal transduction mediated by brassinosteroid, which is a phytohormone having important actions such as growth promotion, an increase in the plant yield, or enhancement of stress tolerance. Therefore, genes encoding proteins having these enzyme activities can be extremely important research subjects. These GO terms are assigned to, for example, J033069J12 and J033061L20.

Serine/threonine kinase (ERECTA homolog):

Transporter (shoot gravitropism 2 homolog):

Replication licensing factor (Prolifera homolog):

[0119] These enzymes control morphogenesis of plants. Therefore, genes encoding proteins having these enzyme activities can be extremely important research subjects. These GO terms are assigned to, for example, J033070P05, J013087B12 and J033041P20.

[0120] GO terms associated with the category “transporter” include proteins which are all involved in substance transport within plant bodies or between the inside and outside of plants. Substance transport in plants is important biologically and industrially. The GO terms associated with “transporter” and their industrial usefulness is specifically described below.

Ammonium transporter:

[0121] This protein functions as an ammonium ion transporter within plant bodies. Therefore, genes encoding proteins having this activity are useful in breeding plants focusing on nitrogen metabolism. Nitrogen absorption capability of plants can be enhanced by increasing expression of this protein.

Cobalt ion transporter:

Heavy metal ion transporter:

[0122] These proteins function as a heavy metal transporter within plant bodies. Therefore, genes encoding proteins having these activities are useful in breeding plants capable of growing on heavy metal-polluted soil. For example, plants become tolerant to heavy metal-polluted soil bysuppressing activities of these proteins. Plants and microorganisms in which these proteins are expressed can be utilized to recover the heavy metal-polluted soil.

[0123] Full-length cDNAs of the present invention were isolated fromavarietyof library sources. Comparisonof library sources from which cDNAs of the present invention are derived enables to detect genes specifically found in a specific library source. Flower organ-specific genes thus found based on such idea are shown in the “List of flower organ-derived clones” at the end of this specification.

[0124] Flower organs have functions that directly influence the rice yield such as flowering and fruition. Needless to say, genes specifically expressed in flower organs are industrially extremely useful in genetically breeding new rice plants. Furthermore, regions that control the expression of these genes may possibly control the expression of flower organ-specific genes. Therefore, the transcriptional regulatory region of thesegenes is useful, for example, in controlling the expression of proteins in seeds. Plant seeds contain many industrially important proteins such as enzymes influencing nutrition of seeds and potentially allergic proteins.

[0125] Regulation of these gene functions within plant bodies may change characteristics and morphology of plants. Examples of such changes are changes in salt and vermin tolerances, growth, and flowering time of plants, but not limited thereto.

[0126] Plant-derived DNAs of the present invention are not limited to those derived from rice, including DNAs derived from other plants as long as they have the function equivalent to that of the rice-derived DNA set forth in any of SEQ ID NOs: 1 through 28,469. Source plants are preferably monocot plants, more preferably poaceous plants, and most preferably rice. Whether a DNA has the function equivalent to that of rice-derived DNAs isolated by the present inventors or not can be judged by whether, compared to rice-derived DNAs, similar changes occur in plant bodies when said DNA is expressed in plants or when the function of said DNA is inhibited in plant bodies. DNAs which induce similar changes in plant bodies have the “function equivalent” to that of rice-derived DNAs isolated by the present inventors.

[0127] The present invention includes DNAs encoding proteins which are structurally analogous to a protein having the amino acid sequence set forth in any one of SEQ ID NOs: 28470 through 56791 and have functions equivalent to that of said protein. Such DNAs include, mutants, derivatives, alleles, variants and homologs of DNAs encoding proteins comprising amino acid sequences set forth in any of SEQ ID NOs: 28470 through 56791, in which one or more amino acid residues are substituted, deleted, added and/or inserted.

[0128] Examples of the method known to those skilled in the art for preparing DNAs encoding proteins whose amino acid sequences have been modified include the site-directed mutagenesis method (Kramer, W. & Fritz, H.-J., Methods Enzymol, 1987, 154: 350). Furthermore, mutation in the amino acid sequence of a protein due to the mutation in the coding nucleotide sequence may occur spontaneously. Thus, even DNAs encoding proteins having amino acid sequences in which one or more amino acids have been substituted, deleted, added and/or inserted are included in the DNAs of the present invention as long as they encode proteins having functions equivalent to those of the natural proteins (SEQ ID NOs: 28470 through 56791).

[0129] To maintain the original function of a protein, an amino acid of the protein is preferably substituted with an amino acid thathas the similar property as that of the amino acid of the protein. For example, amino acids belonging to the same group shown below have similar property. Even when an amino acid is substituted with another amino acid in the same group, the essential function of the protein does not change in most cases. Such amino acid substitution is referred to as conservative substitution, which is well-known modification of amino acid sequences without altering the original function of a protein.

Non-polar amino acids: Ala, Val, Leu, Ile, Pro, Met, Phe and Trp;

Non-charged amino acids: Gly, Ser, Thr, Cys, Tyr, Asn and Gln;

Acidic amino acids: Asp and Glu; and

Basic amino acids: Lys, Arg and His.

[0130] The number of amino acids that are mutated is not particularly restricted, as long as the a mutant protein is functionally equivalent to the original protein. Normally, it is within 50 amino acids, preferably within 30 amino acids, more preferably within 10 amino acids, and even more preferably within 3 amino acids. The site of mutation may be any site, as long as a mutant protein is functionally equivalent to the original protein.

[0131] DNAs having changes in their nucleotide sequences due to degeneracy are also included in the present invention. Degeneracy refers to a mutation in nucleotide sequences, which does not cause any mutation in amino acid residues in proteins.

[0132] Examples of other methods for preparing DNAs encoding proteins functionally equivalent to those comprising the amino acid sequences set forth in SEQ ID NOs: 28470 through 56791 are those using the hybridization technique (Southern, E. M., J. Mol. Biol., 1975, 98: 503) and polymerase chain reaction (PCR) technique (Saiki, R. K., et al., Science, 1985, 230:1350; Saiki. R. K., et al., Science, 1988, 239: 487). Using the nucleotide sequences of cDNAs of the present invention (SEQ ID NOs: 1 through 28469) or their portions as a probe, and oligonucleotides specifically hybridizing to these cDNAs as a primer, those skilled in the art would readily isolate DNAs highly homologous to these cDNAs from rice and other plants. Thus, DNAs of the present invention include DNAs encoding proteins having functions equivalent to those of the proteins comprising amino acid sequences set forth in SEQ ID NOs: 28470 through 56791 which can be isolated by the hybridization and PCR techniques.

[0133] For the isolation of such DNAs, hybridization is carried out preferably under the stringent condition. The stringent hybridization condition in the present invention refers to the condition of 6 M urea and 0.4% SDS in 0.5× SSC, or the stringent hybridization condition equivalent thereto. Under the more stringent condition, for example, that of 6 M urea and 0.4% SDS in 0.1× SSC, more highly homologous DNAs can be isolated. High homology refers to the sequence homology of at least 50% or more, preferably 70% or more, more preferably 90% or more, and most preferably 95% or more (e.g. 96, 97, 98 and 99%) in the entire amino acid sequence.

[0134] Preferably, isolated nucleic acid of the present invention includes a nucleotide sequence that is at least 50% identical to any one of the nucleotide sequence shown in SEQ ID NO: 1 to 28469. More preferably, the isolated nucleic acid molecule is at least 60%, 70%, 80%, 85%, 90%, 91%, 92%, 93%, 94%, 95%, 96%, 97%, 98%, 99%, or more, identical to anyone of the nucleotide sequence shown in SEQ ID NO: 1 to 28469.

[0135] Homologies of amino acid and nucleotide sequences (sequence identity) can be determined using algorithm BLAST reported by Carlin and Altschul (Proc. Natl. Acad. Sci. USA, 1990, 87: 2264-2268; Proc. Natl. Acad. Sci. USA, 1993, 90: 5873). Programs called BLASTN and BLASTX based on the BLAST algorithm have been developed (Altschul, S. F., et al., J. Mol. Biol., 1990, 215: 403). In the case of analyzing nucleotide sequences using BLASTN, parameters are set at, for example, score=100, and word length=12. Furthermore, in the case of analyzing amino acid sequences using BLASTX, parameters are set at, for example, score=100 and word length=12. In the case of using BLAST and Gapped BLAST programs, default parameters are used. Specific techniques of these analytical methods are well-known (see the NCBI website, http://www.ncbi.nlm.nih.gov/).

[0136] cDNAs of the present invention can be prepared by synthesizing cDNAs based on mRNAs extracted from plant such as rice, inserting them into a vector such as λ%ZAP to construct cDNA libraries, and developing them to perform the colony hybridization or plaque hybridization using probes comprising the entire nucleotide sequences set forth in SEQ IDNOs: 1 through 28469 or portions thereof as probes or to carry out PCR using primers designed based on the nucleotide sequences set forth in SEQ ID NOs: 1 through 28469.

[0137] Comparison of nucleotide sequences of cDNAs of the present invention with the genomic nucleotide sequence, can clarify the locations of the transcription initiation point or boundaries between exons and introns in the genome. The genome nucleotide sequence is available, for example, as the sequence of the BAC/PAC clone presented by the International Rice Genome Sequencing Project (IRGSP) . The nucleotide sequences of full-length cDNA clones of the present invention are aligned to map them to each exon of the genomic sequence. This mapping gives information as to at what positions of the genome transcription starts and ends, and from what sites introns are excised.

[0138] Full-length cDNA clones of the present invention can be used to perform comprehensive expression analysis as well as proteome analysis at the transcription level. For example, full-length cDNA clones of the present invention as they are or their regions that would be clone-specific, such as 5′-UTR or 3′-UTR region of the sequences of cDNA clones, may be immobilized on glass plates to prepare microarrays for expression analysis of rice. DNA fragments to be immobilized can be synthesized by known techniques such as PCR. Methods of immobilizing cDNA clones and their fragments on glass plates are also well-known in the art. cRNAs prepared from various cells of rice are allowed to hybridize to the microarrays thus obtained, thereby obtaining expression patterns of genes characteristic for each cell.

[0139] A DNA array is composed of a substrate onto which a large quantity of probes are attached in high density so as to analyze changes in the expression levels of a large amount of genes at high speed. The use of DNA arrays enables to comprehensively find out genes whose expression levels are altered in plant cells exposed to the specific condition. This analytical technique is referred to as gene expression profile analysis. One of factors that greatly influence usefulness of DNA arrays as an analytical tool, is the number of probes attached to DNA arrays. It may be easily understood that, for example, a DNA array comprehensively containing all of the genes of a plant is an ideal tool for the gene expression profile analysis. In fact, there is no higher plant in which all of the existing genes of which have been analyzed. Therefore, in reality, usefulness of DNA arrays depends on how as many genes as possible they contain. The present inventors determined the structures of a great number of rice-derived genes using a rice DNA array. It can thus be said that the present invention remarkably improved the usefulness of rice DNA arrays.

[0140] DNA arrays used in the present invention can contain probes comprising nucleotide sequences specifically found in each of 28,469 clones. The probes constituting DNA arrays of the present invention may include probes of any clones selected from28,469 clones. The number of selected clones is, for example, 10% or more, usually 30%, preferably 50% or more, more preferably 70% or more, and most preferably 80% or more of 28,649 clones. The more the number of selected clones is, the more genes are comprehensively analyzed.

[0141] The proteome analysis can be carried out, for example, as follows. First, the coding regions of cDNAs excised from the full-length cDNA clones are each linked to an appropriate vector to express their proteins using Escherichia coli and yeast systems. Proteins thus obtained are purified, and can be used in structural analysis, interaction analysis, complementation test for mutation, etc.

[0142] DNAs of the present invention can be used to produce mutant plants. Mutant plants expressing DNAs of the present invention can be produced by inserting the above-described DNA into an appropriate vector, introducing the vector with the insertion into plant cells by methods described below, and regenerating transformed plant cells thus obtained. On the other hand, plants in which the expression of DNAs of the present invention is suppressed can be produced, for example, as described below, by inserting a DNA that suppresses the expression of a DNA of the present invention into an appropriate vector, transducing the vector with the insertion into plant cells, and regenerating the transformed plant cells thus obtained. Herein, the “suppression of DNA expression” includes the suppression of transcription of DNAs as well as their translation into proteins. Furthermore, it also includes not only complete block but also reduction of DNA expression, and furthermore, inhibition of the translated protein to express its inherent function within plant cells.

[0143] The antisense technique is the most common method for suppressing the expression of a specific endogenous gene in plants employed by those skilled in the art. Antisense effects in plant cells were proved for the first time by Ecker et al. who demonstrated antisense effects of the antisense RNA transduced into plant cells by electroporation (Ecker, J. R. & Davis, R. W, Proc. Natl. Acad. Sci. USA, 1986, 83: 5372). Thereafter, a report presenteda decrease in the target gene expression in tobacco and petunia plants due to the antisense RNA expression (van der Krol, A. R., et al., Nature, 1988, 333: 866), and, to-date, the antisense technique has been established as a means of inhibiting gene expression in plants.

[0144] For example, antisense nucleic acids inhibit the expression of a target gene, in the following manners.

Inhibition of transcription initiation due to triple helix formation;

Transcriptional inhibition due to hybridization to the site of opened loop structure locally formed by RNA polymerase;

Transcriptional inhibition due to hybridization to RNA whose synthesis is in progress;

Inhibition of splicing due to hybridization to the boundaries of introns and exons;

Inhibition of splicing due to hybridizaation to the site of spliceosome formation;

Inhibition of transition of mRNA from the nucleus to cytosol due to hybridization to the mRNA;

Inhibition of splicing due to hybridization to the capping site and poly(A) addition site;

Inhibition of translational initiation due to hybridization to the translation initiation factor binding site;

Inhibition of translation due to hybridization to the ribosome binding site near the initiation codon;

Inhibition of peptide chain elongation due to hybridization to the mRNA coding region and polysome binding site; and

Inhibition of gene expression due to hybridization to the interaction site between nucleic acid and protein.

[0145] Thus, antisense nucleic acids inhibit various processes such as transcription, splicing, and translation to suppress the expression of a target gene (Hirashima and Inoue, “New Experimental Biochemistry Manual 2, Nucleic Acid IV, Gene Duplication and Expression,” The Japanese Biochemical Society, ed., Tokyo Kagaku Dojin, 1993, pp. 319-347).

[0146] Antisense sequences used in the present invention may inhibit the expression of a target gene by any of the above-described actions. As an embodiment, an antisense sequence designed so as to be complementary to the non-coding region near the 5′-end of mRNA of a target gene would inhibit its translation. Sequences complementary to the coding region or non-coding region of the 3′-side can also be used. Antisense DNAs used in the present invention include DNAs comprising antisense sequences of not only the coding region but also non-coding region of a target gene.

[0147] Antisense DNA to be used is linked downstream of an appropriate promoter and the transcription termination signal is preferably linked to the 3′-end of antisense DNA. Antisense DNA thus prepared can be transformed to a desired plant by known methods. Although sequences of antisense DNAs are preferably complementary to the endogenous gene of a plant to be transformed or a portion thereof, they may not be completely complementary thereto as long as they are capable of efficiently inhibit target gene expression. The transcribed RNAs are preferably 90% or more and most preferably 95% or more complementary to the transcript of a target gene. For the effective inhibition of target gene expression, an antisense sequence has at least 15 nucleotides or more, preferably 100 nucleotides or more, and more preferably 500 nucleotides or more. Antisense DNAs commonly used are less than 5 kb, preferably less than 2.5 kb.

[0148] It is also possible to inhibit the expression of endogenous genes using a DNA encoding ribozyme. Ribozyme refers to an RNA molecule with catalytic activity. Various activities of ribozymes are known, and, among them, researches focusing on the ribozyme activity to cleave RNA have enabled to design ribozymes that site-specifically cleave RNA. Large-sized ribozymes such as group I intron type RNA and M1 RNA included in RNase P, consist of 400 or more nucleotides, while some ribozymes have about 40 nucleotides of the active domain, including hammerhead and hairpin ribozymes (Makoto Koizumi and Eiko Ohotsuka, Protein Nucleic Acid Enzyme, 1990, 35: 2191).

[0149] For example, the self-splicing domain of hammerhead ribozymes cleaves the 3′-side of C15 in the G13U14C15 sequence. Base pairing of U14 with A9 is thought to be important for that cleaving activity, and it has been demonstrated that said domain can be cleaved even when C15 is replaced by A15 or U15 (Koizumi, M., et al., FEBS Lett., 1988, 228: 228). Ribozymes whose substrate-binding site is complementary to an RNA sequence near the target site, recognize a sequence such as UC, UU or UA in the target RNA and cleave it like restriction enzymes (Koizumi, M., etal., FEBS Lett., 1988, 239: 285; Koizumi, M. and Ohotsuka, E., Protein Nucleic Acid Enzyme, 1990, 35: 2191; Koizumi, M., et al., Nucl. Acids Res., 1989, 17: 7059). For example, DNAs of the present invention (SEQ ID NOs: 1 through 28469) contains several potential ribozyme target sites.

[0150] Hairpin ribozymes, which are found, for example, in the negative strand of satellite RNA of tobacco ring spot virus (Buzayan, J. M., Nature, 1986, 323: 349), are also useful for the purpose of the present invention. It was shown that hairpin ribozymes can also be designed to cleave RNA target site-specifically (Kikuchi, Y. and Sasaki, N., Nucl. Acids Res., 1991, 19: 6751; Kikuchi, Y., Chemistry and Biology, 1992, 30: 112).

[0151] A ribozyme designed to cleave a target site is linked to a promoter such as 35S promoter of cauliflower mosaic virus and the transcription termination sequence so as to be transcribed in plant cells. However, when an excessive sequence is attached to the 5′- and 3′-ends of the transcribed RNA, the ribozyme activity might be sometimes lost. In such a case, it is possible to arrange a different cis-acting trimming ribozyme on the 5′- and 3′-ends of the ribozyme portion so as to accurately excise only the ribozyme portion from the transcribed RNA containing said ribozyme (Taira, K. et al. , Protein Eng. , 1990, 3: 733; Dzianott, A. M. and Bujarski, J. J., Proc. Natl. Acad. Sci. USA, 1989, 86: 4823; Grosshans, C. A. and Cech, T. R., Nucl. Acids Res., 1991, 19: 3875; Taira, K. et al., Nucl. Acids Res., 1991, 19: 5125). Furthermore, it is also possible to arrange these constitutive units in tandem so as to cleave at plural sites within the target gene, thereby enhancing its effect (Yuyama, N. et al., Biochem. Biophys. Res. Commun., 1992, 186: 1271). Expression of a target gene of the present invention can be suppressed by specifically cleaving the transcript of the target gene.

[0152] Endogenous gene expression can be suppressed by RNA interference (RNAi) using a double-stranded RNA having a sequence identical or analogous to a target gene sequence. RNAi refers to the phenomenon wherein introduction of a double-stranded RNA, which comprises a sequence identical or analogous to a target gene sequence, into cells suppresses expression of both the transgene and the target endogenous gene. Although the mechanism of RNAi has not been elucidated in detail, it is thought that the double-stranded RNA introduced is decomposed into small fragments, which, in turn, become an indicator of the target gene by some meansand induce degradation of the target gene. It is also known that RNAi is effective in plants (Chuang, C. F. & Meyerowitz, E. M., Proc. Natl. Acad. Sci. USA, 2000, 97: 4985). For example, for the suppression of expression of DNA encoding the target protein in plants, DNA encoding said protein or a double-stranded RNA having the sequence analogous thereto may be introduced into a plant to select, out of the plant bodies thus obtained, plants in which the expression level of said protein is reduced compared to the wild type plant. Genes used in RNAi are not necessarily completely identical to a target gene, but have at least 70% or more, preferably 80% or more, more preferably 90% or more, and most preferably 95% or more of sequence identity to the target gene. Sequence identity can be determined by the above-described technique.

[0153] Expression of an endogenous gene can also be inhibited by co-suppression due to transformation with DNA having a sequence identical or analogous to a target gene. “Co-suppression” refers to the phenomenon in which introduction of a gene having a sequence identical or analogous to a target endogenous gene into plants by transformation, inhibits the expression of both of the transgene and the target endogenous gene. Although the mechanism of co-suppression has not been clarified in detail, it is thought to at least partially overlap that of RNAi. This phenomenon has been observed also in plants (Smyth, D. R., Curr. Biol., 1997, 7: R793; Martienssen. R., Curr. Biol., 1996, 6: 810). For example, a plant body having co-suppressed DNA encoding a protein can be obtained by preparing a vector DNA that expresses DNA encoding said protein or DNA having the sequence analogous thereto, transforming a target plant with the vector, and selecting plants in which the expression level of said protein is reduced compared to the wild type plant body. Although a gene used in co-suppression needs not be completely identical to a target gene, it has at least 70% or more, preferably 80% or more, more preferably 90% or more, and most preferably 95% or more sequence identity to the target gene. Sequence identity can be determined using the aforementioned technique.

[0154] The present invention provides a method of producing a transformed plant body comprising the steps of introducing a DNA of this invention into plant cells and regenerating plant bodies from said plant cells.

[0155] In the present invention, there is no particular limitation in the types of plants from which plant cells are derived. There is also no particular limitation in the types of vectors used in the transformation of plant cells, as long as they are capable of expressing the transgene in said cells. For example, a vector to be used has a promoter (such as 35S promoter of cauliflower mosaic virus) that constantly express a gene in plant cells and is inducible by an extraneous stress. Herein, “plant cells” include plant cells in various forms such as suspended cultured cells, protoplasts, leaf sections, and calli.

[0156] The vectors canbe introduced into plant cells using various methods known to those skilled in the art such as the polyethylene glycol method, electroporation method, method mediated by Agrobacterium, and particle gun method. In the method mediated by Agrobacteriun (e.g., EHA101), it is possible to use, for example, the ultrahigh speed monocot transformation method (Japanese Patent No. 3141084). Furthermore, the particle gun method can be carried out by using, for example, the product from BioRad. Regeneration of plant bodies from the transformed plant cells may be conducted using methods known to those skilled in the art depending on the type of plant cells (Toki, S., et al., Plant Physiol., 1995, 100: 1503).

[0157] Several methods of producing transformed rice plant bodies have already been established and extensively used in the technical field to which the present invention pertains. These methods include the method of introducing a gene into protoplasts using polyethylene glycol to regenerate plant bodies (suitable for Oryza sativa L ssp. Indica) (Datta, S. K., “In Gene Transfer To Plants,” Potrykus, I. and Spangenberg, Eds. , 1995, pp. 66-74); Toki, S., et al., “the method of introducing a gene into protoplasts with the electric pulse to regenerate plant bodies (suitable for Oryza sativa L ssp. japonica), ” Plant Physiol., 1992, 100: 1503); the method of directly introducing a gene into cells by the particle gun technique to regenerate plant bodies (Christou, P., et al., Biotechnology, 1991, 9: 957), and the method of introducing a gene into cells mediated by Agrobacterium to regenerate plant bodies (Hiei, Y., et al., Plant J., 1994, 6: 271). These methods can be preferably used in the present invention.

[0158] Once the transformed plant body in which a DNA of the present invention has been introduced is obtained, it is possible to obtain progenies from said plant by sexual or asexual reproduction. It is also possible to obtain propagation materials from said plant body and its progeny or clone, which allows mass-production of said plant body. Propagation materials which can be thus obtained are included in the present invention. Propagation materials of the present invention include all of the materials capable of regenerating the plant bodies having the genetic characteristics introduced into the transformed plant body of this invention, for example, seeds, fruits, spikes, tubers, tuberous roots, stubs, calli, and protoplasts.

[0159] The present invention also relates to proteins having the amino acid sequences encoded by the above-described nucleic acids. Proteins of this invention can be prepared by the gene recombination technique using the aforementioned nucleic acids. Recombinant proteins of this invention can be prepared by inserting a DNA encoding a protein of this invention into an appropriate vector, introducing said vector into suitable cells, culturing transformed cells thus obtained, and purifying the expressed protein.

[0160] A recombinant protein can be expressed as a fusion protein with another protein to facilitate its purification and detection. For example, a method for expressing in a host Escherichia coli a protein as a fusion protein with a fusion partner protein as described below. Preferable vectors for each fusion protein are parenthetically shown.

Maltose bindingprotein (vector PMAL series, New England BioLabs, USA),

Glutathion-S-transferase (GST) (vector pGEX series, Amersham Pharmacia Biotech), and

Histidine tag (pET series, Novagen)

[0161] There is no particular limitation in the type of host cells to be used for producing recombinant proteins as long as they are suitable for expressing the recombinant proteins. Besides the aforementioned Escherichia coli, for example, host cells such as yeasts, various animal and plant cells, and insect cells may be used. The vector can be introduced into cells by various methods known to those skilled in the art. For example, introduction into Escherichia coli can be performed by the method using calcium ion (Mandel, M. & Higa, A., Journal of Molecular Biology, 1970, 53, 158-162; Hanahan, D., Journal of Molecular Biology, 1983, 166, 557-580). Recombinant proteins expressed in host cells can be recovered and purified from the host cells or their culture supernatant by the method known to those skilled in the art. When recombinant proteins are expressed as a fusion protein with the above-described fusion partner such as maltose-binding protein, the proteins of interest can be easily purified by affinity chromatography.

[0162] For more easily performing the affinity purification, an amino acid sequence recognized by protease may be inserted into the fusion protein. For example, amino acid sequences of the maltose-binding protein and a protein to be produced are connected mediated by a protease recognition sequence. After capturing the fusion protein using the action of maltose-binding protein, the target protein can be recovered by the action of the protease. In this case, any protease not acting on the target protein may be used.

[0163] The recombinant protein thus obtained can be used to prepare antibodies binding thereto. For example, polyclonal antibodies can be obtained by immunizing animals such as rabbits with a purified protein of the present invention or its partial peptide. After confirming the titer elevation of immunized animals, the blood is withdrawn, and the serum is recovered to obtain anti serum against the target protein. Alternatively, polyclonal antibodies can be obtained by purifying IgG from the antiserum. Furthermore, purified antibodies can be obtained by carrying out immuno-affinity purification using the target protein as an antigen.

[0164] Furthermore, monoclonal antibodies can be prepared by fusing myeloma cells and antibody-producing cells of the animal immunized with the above-described protein or peptide, isolating monoclonal cells (hybridoma) producing the target antibodies, and obtaining the antibodies from said cells. The antibodies thus obtained can be used in the purification and detection of proteins of this invention. The present invention includes antibodies capable of binding to proteins of this invention.

[0165] The present invention also provides a database including information on the nucleotide sequences of rice full-length cDNA clones ofthis invention and/or information on their amino acid sequences. A data base refers to a collection of information on the nucleotide sequences and/or amino acid sequences contained as retrievable and machine-readable data. Databases of the present invention contain at least one of the nucleotide sequences of rice full-length cDNAs of this invention. Databases of the present invention may consist of rice full-length cDNAs of this invention, or include information on nucleotide sequences of known full-length cDNAs, ESTs, etc. In databases of the present invention, not only information on the nucleotide sequences but also information related thereto such as the gene function revealed by this invention and names of clones retaining those full-length cDNAs may be recorded together or linked thereto.

[0166] Databases of the present invention are useful for acquiring a full-length gene based on information on gene fragments. Databases based on this invention all comprise information on full-length cDNA nucleotide sequences. Therefore, by comparing nucleotide sequences of gene fragments obtained by the gene expression analyses using a DNA array and subtraction method with the information of this database, the full-length nucleotide sequences of genes can be revealed.

[0167] Furthermore, since databases of the present invention contains information associated with rice genes, it is useful for isolating rice homologs based on information on nucleotide sequences of genes isolated from other species.

[0168] At present, gene expression analysis such as DNA array analysis enables to obtain information on diverse gene fragments. These gene fragments, ingeneral, are used as a tool for obtaining their full-length sequence. When a gene fragment is derived from a known gene, its full-length can be easily elucidated by comparing it with a known database. However, when no identical nucleotide sequence is found in a known database, cloning of gene fragments must be carried out to obtain the full-length cDNA. It is often difficult to obtain full-length nucleotide sequences based on information on DNA fragments. Without obtaining a full-length gene, it is impossible to deduce the amino acid sequence of a protein encoded by that gene. Databases of the present invention would contribute to identification of full-length cDNAs corresponding to gene fragments that cannot be elucidated by the already known gene databases.

[0169] Databases of the present invention can also be used to isolate genes associated with diverse characteristics. For example, the relationship between polymorphism markers and phenotypes of organisms has been clarified. cDNA nucleotide sequences of this invention are mapped to genomic DNA and compareded with the information on polymorphism markers whose association with phenotypes is known. A gene having a polymorphism marker within the transcriptional regulatory region and its exonswould associate with the phenotype correlated to the polymorphism marker. Thus, the use of information on nucleotide sequences of cDNAs of this invention enables positional cloning in silico. The polymorphism markers usable in such analysis include, for example, SNPs. SNPs may be examined for the relationship with a single polymorphism site, or focused on a plurality of SNPs.

[0170] Furthermore, the present invention relates to a method of obtaining the transcriptional regulatory region of rice, wherein said method comprising the following steps:

(1) mapping the nucleotide sequence set forth in any of SEQ ID NOs: 1 through 28469 to the genomic nucleotide sequence of rice, and

(2) judging the region containing the transcriptional regulatory region found upstream of the 5′ most end of the mapped region as the transcriptional regulatory region of the gene mapped in the step (1).

[0171] Gene expression is controlled by transcription factors. In genomes, the region containing the nucleotide sequence recognized by a transcription factor is referred to as the transcription regulatory region, which usually exists in the region on the 5′-side of the transcription initiation point. For example, the region comprising several hundreds to several kbs of DNAs arranged in tandem often has the transcriptional regulatory action. In genomes, in contrast to a nucleotide sequence encoding mRNA which is divided by many introns, the transcriptional regulatory region exists with being linked in tandem. Therefore, once the transcription initiation point can be mapped to the genome, the transcriptional regulatory region can be relatively easily obtained. The method of obtaining the transcriptional regulatory region based on information on nucleotide sequences of the full-length cDNAs, will be described below in more detail.

[0172] First, of the nucleotide sequences of full-length cDNAs, sequences containing the 5′-end, in particular, are mapped to the genomic sequence. Genomic nucleotide sequences of any species may be used, and the genome of Oryza sativa L. ssp. japonica is preferably used. Mapping reveals the position coinciding with the 5′-end as the transcription initiation point. Nucleotide sequences near the transcription initiation point will be the analytical subject as the candidate sequence. The candidate sequence is usually selected from the region ranging from (−) several kb to (+) several hundreds b counting the transcription initiation point to be “1.” Herein, the minus (−) numerals refer to the values counted in the direction toward the 5′-end, while the plus (+) numerals the values counted in the direction toward the 3′-end. More specifically, the candidate sequence may be in the region of from -2 kb to +500 b, for example, from −1 kb to +200 b, and preferably from −1 kb to +1 b. The transcriptional regulatory region can be predicted by searching for the transcription factor-binding consensus sequence. Nucleotide sequences found in genomes capable of binding to the transcription factor are referred to as cis sequences. For example, TATA box is a representative cis sequence. Many nucleotide sequences have been identified in the transcription factor-binding consensus sequence, and information on a specific sequence can be obtained, for example, from the transcription factor-binding consensus sequence database TRANSFAC (http://transfac.gbf.de/homepage/databases/transfac/transf ac.html).

[0173] Analytical results determine the region containing the cis sequence in candidate sequences as the transcriptional regulatory region. Further analysis can be done based on their interaction with the transcription factor recognizing cis sequence constituting said transcriptional regulatory region. For example, the footprinting method and gel shift assay have been used as the analytical methods for clarifying the relationship between the transcriptional regulatory region and transcription factor. These analytical methods identify a region necessary for the transcription in the transcriptional regulatory region thus selected. Furthermore, a reporter assay can be performed to assess the transcriptional action of the transcriptional regulatory region obtained by the present invention.

[0174] Full-length cDNAs of the present invention would contain the nucleotide sequence of the 5′-end of mRNA, and are useful as a tool for obtaining the transcriptional regulatory region. Depending on purposes, A cDNA derived from a special library source can also be used to obtain the transcriptional regulatory region. For example, flower bud-specific cDNAs can be used to obtain the transcriptional regulatory region specific to flower bud. Furthermore, cDNAs obtained from tissues exposed to various stresses can be used to obtain the transcriptional regulatory region associated with stress. As described above, the genome drafts of indicassp. (Yu, J. et al., “A draft sequence of the rice genome (Oryza sativa L. ssp. indica)” Science, 2002, 296, 79-92) and japonica ssp. (Goff, S. A. et al., “A draft sequence of the rice genome (Oryza sativa L. ssp. japonica)” Science, 2002, 296, 92-100) , have been already published. Therefore, information on sequences of cDNAs of this invention can be used to obtain many transcriptional regulatory regions.

[0175] The present invention provides and characterizes full-length cDNAs comprehensively. These full-length cDNA scan be used for annotation of correct gene coding region, determination of exons and introns, comprehensive expression analysis on the transcriptional level, and proteome analysis. Additionally, they are useful in producing plants having the different characteristic from the wild type due to the inhibition of their expression and function within the plant bodies.

[0176] Since cDNAs of the present invention have a strong probability of being full-length, information on these nucleotide sequences would efficiently predict the transcriptional regulatory region. To obtain the transcriptional regulatory region based on the gene nucleotide sequences, the transcriptional initiation point should be correctly determined, which can be successfully achieved using information on nucleotide sequences of full-length cDNAs whose 5′-end nucleotide sequences are completely provided. Any patents, patent applications, and publications cited herein are incorporated by reference in their entirety.

[0177] The present invention is explained in more detail with reference to examples, but is not be construed as being limited thereto.

### EXAMPLE 1

Acquisition of cDNA Clones

(1) Starting Materials and Method For Constituting a Full-Length cDNA Library

[0178] The rice genome project of Japan has obtained EST clones from various tissues and organs at each developmental stage ofrice. However, most of them were derived from non-full-length cDNA libraries. ESTs are effective in cataloging the expressed genes, but not suitable for functional genome analysis. Starting materials for the library construction are extremely important to collect as many types of clones as possible. Table 1 is the list of starting materials for constructing a library suitable for functional genome analysis.

TABLE 1

| | |
|---|---|
| Library | Starting materials for Full-length |
| No | cDNA library construction |

Seedlings two weeks
after germination

| | | |
|---|---|---|
| 1 | Normally grown | Green Shoot |
| 2 | Normally grown | Root |
| 3 | Dark grown | Etiolated Shoot |
| | (Radiation and Oxidative) | |
| 4 | +UVB | 550 J/m² |

Calli ten days after transfer to new medium

| | | |
|---|---|---|
| 5 | Normally grown | |
| | (Temperature) | |
| 6 | +cold | cold treated (at 6° C.) |
| 7 | +heat | heat treated (at 45° C.) |
| | (Hormone) | |
| 8 | +auxin | 2 ppm of NAA |
| 9 | +Cytokinine | 2 ppm of BAP |
| 10 | +ABA | 2 ppm of ABA |
| | (Chemical) | |
| 11 | +Cd | 6 ppm of CdCl₂ |

Germinating seeds three days after imbibition

| | | |
|---|---|---|
| 12 | Normally grown | |
| | (Hormone) | |
| 13 | +auxin | 2 ppm of NAA |
| 14 | +Cytokinine | 2 ppm of BAP |
| | Panicles | |
| 15 | less than 1 cm stage | |
| 16 | less than 5 cm stage | |
| 17 | more than 5 cm stage | |
| 18 | one day after flowering | |
| 19 | two weeks after flowering | |
| 20 | three weeks after flowering | |

[0179] To date, the Foundation of Advancement of International Science (FAIS) has constructed 20 types of rice libraries enriched with full-length cDNAs by using the oligo-capping method combined with normalization and size fractionation. To avoid PCR bias, the number of amplification cycles during the construction of these libraries was minimized. Furthermore, about a half of the resulting cDNA were cloned into a vector, which is part of the Gateway system, to facilitate high-throughput analysis of rice proteomics.

[0180] RIKEN has constructed 4 types of rice full-length cDNA libraries (shoots of seedlings, roots, calli and germinating seeds) by the RIKEN's original technologies which combined used the biotinylated CAP trapper method, thermo activation of reverse transcriptase by trehalose, normalization, the oligolinker method, the poly-stretch-less method, and the vector designed for the preferential cloning of long inserts.

[0181] Briefly, mRNAs were extracted by using the modified CTAB method, underwent cDNA synthesis, CAP trapping and normalization, and were cloned into the lambda vector. Lambda cDNA libraries were bulk-excised to plasmid libraries.

(2) Grouping of Terminal Sequences and Determination of Full-Length Sequences

[0182] Clones were randomly picked up from each library, and both the 5′- and 3′-ends of each clone were sequenced once. 175,642 of these clones were sequenced fromthe 3′-end, and 91,425 clones from the 5′-end. These clones (175,642) were clustered into 28,469 (nonredundant) groups by means of a grouping program using the nucleotide sequences determined from the 3′-end. All clones from each group were completely sequenced using the two methods (primer walking and shotgun methods). Assessment of sequence fidelity with the Fred value indicated that all representative 28,469 clones were sequenced with 99.98% fidelity. The length of the insert cDNA varied from 55 to 6528 bp, and its average length was 1655.0 bp.

### EXAMPLE 2

Functional Classification of Full-Length cDNA Clones

(1) BLAST Search

[0183] Sequence homology search by BLAST was conducted asfollows. Sequence data from 10 divisions of NCBI's GenBank (as of June 15, 2002; release version 130) were downloaded, and searches were carried out using BLAST N and BLAST X programs using 28,469 sequences as query (2002/7/20). Search subjects are the following 10 divisions: PRI, ROD, MAM, VRT, INV, PLN, BCT, VRL, PHG, and PAT. Sizes of searched database were as follows:

[0184] BLASTN: 1,212,780 sequences : 1,998,000,464 Letters

[0185] BLASTX: 623,580 sequences : 327,145,996 Letters

[0186] Alignment pattern was checked for sequence homology, and a similarity threshold of E<10⁻¹⁰ was used. Because of BLAST N search, 2603 cDNA clones were identical to already-registered rice genes, and classified into the identical rice genes. As a result ofBLAST X search, 5,607 clones were homologs of already known rice genes, 12,527 clones were homologous to already-known genes of plants other than rice, and 859 clones were homologous to already-known genes in organisms other than plants. These search results were shown in Table 2. In total, these homology searches enabled to assign potential functions to 21,596 (75.86%) clones.

[0187] “Results of BLAST search” at the end of this specification shows data of the highest homology to each clone obtained by the homology search of 28,469 representative full-length cDNA clones using BLAST N and BLSST X programs.

[0188] 28,469 full-length cDNA clones were mapped to three types of already known rice genome sequence data, that is, the indica (aforementioned) and japonica (aforementioned) draft genomes. Sequence data of the gene coding regions are said to be very similar between japonica and indica subspecies. 94% of the 28,469 full-length cDNA clones were mapped to these rice draft genomic sequences. Mapping results are shown in Table 2.

TABLE 2

| | | | | | Number of |
|---|---|---|---|---|---|
| | | | Number of | | non-redundant |
| Genome | | Size | mapped | | Transcription |
| Sequence | Source | (Mbp) | clones | % | Unit |
| japonica draft | Ref 2 | 390 | 26930 | 94.6 | 18933 |
| genome | | | | | |
| indica draft | Ref 1 | 363 | 26784 | 94.1 | 19036 |
| genome | | | | | |
| BAC/PAC | IRGSP | 368 | 22162 | 77.8 | 15523 |
| clones from | | | | | |
| japonica | | | | | |

[0189] The 28,469 clones originated from 19,000 TU of the rice genome draft sequences using 94% of genome coverage data. Since, in this mapping method, paralog, pseudogene, and such are counted into a single orthologue gene, the actual TU number is expected to be larger. In fact, mapping results of the full-length cDNA clones to the BAC/PAC clone cluster derived from Chromosome 1 revealed that about 3,800 clones were mapped to 7,700 sites, indicating that approximately twice the cDNAs overlap in the rice gene.

[0190] Herein, “one transcription unit” means a group comprising a plurality of transcripts sharing exons. When two cDNAs are mapped to the same genomic region, an intron of one cDNA may have an exon of the other. In this case, the exon is not shared between cDNAs so that these cDNAs constitute different transcription units. In another case where two cDNAs are mapped to the same genomic region, these cDNAs are sometimes different in their orientations; an exon of one cDNA is mapped to the nucleotide sequence of an antisense strand of the other. In addition, in this case, since the exon is not shared, they constitute different transcription units.

[0191] Considering the genome coverage of less than 100% and the clustering results at the clone level, a unique population of 20,259 representative full-length CDNA clones is selected to hereafter discuss sequence data of total clones (28,469) and unique representative clones (20,259). A unique population refers to a cluster of cDNAs predicted to be transcribed from the same TU. A particular clone of the unique population representing said unique population is referred to as a representative clone.

[0192] The nucleotide sequence identity between CDSs predicted in the indica genome and ORFs in cDNAs of the present invention is 93%, while the amino acid identity is only 53%. These results may reflect the following reasons.

▪The longest ORF of cDNA of the present invention is not correct; and/or

▪the predicted CDS of indica genome is not correct.

[0193] From the results of InterPro search and such as described below, cDNA nucleotide sequences of the present invention would have higher fidelity than CDS predicted in indica, indicating that the actual acquisition of cDNAs improves the quality of information on gene sequence.

[0194] For example, comparison between predicted CDSs reported for the BAC clone derived from Chromosome 1 and mapping results of full-length cDNA clones of the present invention clearly revealed the presence of various differences between them. Results of comparison of them at the exon and intron levels are shown in FIG. 1. Results of comparison of cDNAs with all CDSs of Chromosome 1 are listed in Table 3.

TABLE 3

| | |
|---|---|
| Total number of BAC/PAC clones from | 418 (redundant) |
| Chromosome 1 | |
| Total number of annotated BAC/PAC | 387 (redundant) |
| clones from Chromosome 1 | |
| Total number of CDS | 9828 (redundant) |
| Total number of Transcription Units | 7,763 |
| mapped by FL-cDNA clones | by 3895 FL-cDNA clones |
| Total number of the hit CDS by | 4874 (49.6%) |
| FL-cDNA clones | by 3239 FL-cDNA clones |

[0195] In Table 3, 418 CDSs derived from Chromosome 1 are registered, 387 clones of which are annotated with CDS. Total number of CDS is 9828. On the other hand, when full-length cDNA clones of the present invention were mapped to the same BAC/PAC clones, the total number of TU mapped by 3895 full-length cDNA clones was 7763. Then, the coincidence of the mapped regions with the CDS regions was examined. When the coincidence of at least 10 bp in the same direction is judged as a coincidence, the total number of the CDSs that hit by mapped cDNA clones was only 4874, accounting for only 49.6% of the total CDS. That is, the results of assessing the predicted CDS based on the full-length cDNA sequences actually isolated from rice indicated that current programs cannot find CDS with sufficient accuracy, and that information on the cDNA nucleotide sequence isolated from the living body is important.

3) Changes in the Transcript Form

[0196] Of the 18,933 TUs mapped to the japonica genome draft, 5045 are multiexon TU that contains two or more transcripts with a plurality of forms. These transcripts were analyzed in detail focusing on the following conditions:

[0197] Difference in length of the 5′- and 3′-ends;

[0198] presence or absence of exons; and

[0199] initiation and termination sites of intron at the time of splicing.

[0200] As a result, of the 5045 TU, 2471 TU (13.1%) contains clones having variations in the above-described conditions. Contents of variations were as described below.

[0201] Difference in the 5′-end: 1673 TU (8,8%),

[0202] Difference in the 3′-end: 853 TU (0.5%),

[0203] Alternatively spliced exons: 94 TU (4.5%),

[0204] Difference in the intron initiation point: 180 TU (1.0%), and

[0205] Difference in the intron termination point: 241 TU (1.3%).

When the above TUs are simply summed up, the sum does not become 2471 because the identical TUs might have different combinations. Even considering the collection bias, the alternative splicing event is not frequent in rice.

[0206] Due to these differences in the transcript structure, alterations at the amino acid level accompanying with ORF changes among transcripts occurred at 1937 TU (78.4%) loci. In contrast, 902 antisense transcript pairs were found as the clones that were mapped in the opposite direction to the same genomic DNA region. The number of such clones was 1443.

4) Full-Length cDNAs Are Useful in the Promoter Analysis.

[0207] The expression analysis using a microarray system containing 8987 rice EST clones found that UV irradiation to rice led to the transcriptional upregulation of 58 EST clones. After confirming these upregulations by the real-time PCR method, candidate genes whose expression was enhanced were PR-10b and PBZl genes.

[0208] The full-length cDNA clones found to correspond to these ESTs were mapped to the region 10 kb away in the same BAC sequence derived from Chromosome 12. Furthermore, the use of sequences 1 kb upstream of the respective transcription initiation points of the full-length cDNA clones as queries for the cis element database (PLACE) fou nd cis elements such as GT1CONSENSUS and TBOXATGAPB. Although further experiments are needed to confirm whether these cis elements are actually involved in UV-related transcriptional upregulation or not, the use of information on full-length CDNA clones, as described above, will facilitate the promoter analysis of target genes from EST.

5) Protein Informatics Analysis

[0209] Amino acid sequences of proteins encoded by nucleotide sequences of cDNAs were deduced from the longest ORF (from ATG to term codon). Because of homology search, clones clearly encoding RNA (24,397 clones) , and clones with an ORF shorter than 100 amino-acid residues were excluded from analysis. 28,332 clones had ORF, and the average number of amino acid residues was 331 residues. Average numbers of nucleotides of the 5′- and 3′-untranslated region (UTR) were 259.83 and 398.41, respectively. 24,507 clones had ORFs exceeding 100 amino-acid residues.

6) Assessment of Completeness of the Full-Length cDNAs

[0210] cDNAs of the present invention were acquired using the CAP trapper method that is advantageous for acquiring full-length cDNAs. Whether cDNA clones of the present invention were full-length was confirmed by the following analyses.

[0211] Comparison of the full-length cDNA clones with the previously registered 859 cDNA sequences according to single-pass sequence data, revealed for 621 of 667 5′-end sequences and 570 of 648 3′-end sequences, the full-length cDNA clones of the present invention were longer than the registered cDNA sequence. Using full sequences of the clones, the full-length cDNA clones of this invention were longer than the registered cDNA sequence in 468 of 579 cases. Thus, it was obvious that most of the full-length cDNA clones of the present invention, which were found to coincide with the known nucleotide sequences, comprise longer terminal nucleotide sequences compared to the known sequences. Therefore, cDNAs of the present invention were confirmed to be a cluster of cDNAs that are likely to be full-length.

[0212] Furthermore, whether cDNAs have full-length or not can be confirmed if they contain the initiation and termination codons. More preferable full-length cDNA clones according to this invention may contain more 5′-UTRs of their transcript. Containg of all of the 5′-UTRs is not the essential prerequisite for the full-length cDNA. However, if transcript nucleotide sequences are maintained as completely as possible, the usefulness of full-length cDNAs increases. For example, when the transcriptional regulatory region is obtained, the transcription initiation point must be correctly determined for accurately obtaining it. For example, because of the alignment of cDNA clones and EST, etc., clones having a long nucleotide sequence on the 5′ side is likely to have full-length. When 98% homology or more was observed for 80% region or more of cDNA clones to the registered clones, they were regarded as the same clone.

7) InterPro Homology Search

[0213] A protein domain search was performed by using information on the amino acid sequence of the rice full-length cDNA clones having the 28,332 deduced ORFs against the InterPro database. At the same time, similar InterPro searches were conducted using the following amino-acid sequence data to compare the both results.

[0214] Arabidopsis thaliana (27,288 sequences),

[0215] Caenorhabditis elegans (20,732),

[0216] Drosophila melanogaster (18,118),

[0217] Homo sapiens (24,147),

[0218] Saccharomyces cerevisiae (6360) , and

[0219] S. pombe (4962).

[0220] The search yielded a total of 3491 InterPro domains from all the above organisms. Table 4 highlights the 13 most frequent domains, and domains ranked below the third were observed almost commonly among 7 organism species. Second most frequently observed domains may contain the false hit data due to the small number of constitutive amino acid residues.

[0221] Among 3491 domains, 313 are plant (only O. sativa and A. thaliana)-specific and 1356 do not occur in plant proteins. There are 1177 domains that are animal (any of C. elegans, D. melanogaster, and H. sapiens) -specific, and 528 are not observed in these species. Eighty domains were yeast (S. cerevisiae and S. pombe) -specific and 1776 were not found in yeasts. These results indicate that 85% of the total number of domains is found in animals, 61% occur in plants, and 50% occur in yeasts. Comparison of the numbers of proteins having domains (number of clones) between rice and Arabidopsis yielded interesting results as described below.

[0222] Rice-specific domains (Table 4b), or those more frequent in rice than Arabidopsis (Table 4c),

[0223] Pollen allergic protein domain,

[0224] Organ-specifically expressed domains (e.g., serine protease inhibitor of seed),

[0225] Environmental stress-inducible proteins (antifreeze proteins, drought: ABA/WDS-inducible protein, etc.),

[0226] Domains more frequent specifically inArabidopsis (Table 4d)

[0227] Toll and interleukin-1 receptor (TIR) domain.

[0228] It was found that the TIR domain overwhelmingly occurs in the N-terminal region of the NBS-LRR type disease-resistance genes (R gene) products in Arabidopsis, but does not at all in rice. TIR-NBS-LRR type R genes are known to be amplified at high level in a specific genome region of Arabidopsis, but no alternative amplified domain was found in the R gene in rice. Transposon-related gene products were also more specifically and frequently found in Arabidopsis than in rice.

TABLE 4

| | | O. | | A. | | C. | | D. | | H. | | S. | | S. | |
|---|---|---|---|---|---|---|---|---|---|---|---|---|---|---|---|
| | | sativa | | thaliana | | elegans | | melanogaster | | sapience | | cereviciae | | pombe | |
| InterPro_ID | InterPro_name | count | rank | count | rank | count | rank | count | rank | count | rank | count | rank | count | rank |
| a. Top 13 | | | | | | | | | | | | | | | |
| IPR001687 | ATP/GTP- | 1281 | 1 | 1781 | 1 | 894 | 1 | 1061 | 1 | 1435 | 2 | 441 | 1 | 330 | 1 |
| | binding site | | | | | | | | | | | | | | |
| | motif A | | | | | | | | | | | | | | |
| | (P-loop) (*) | | | | | | | | | | | | | | |
| IPR000694 | Proline-rich | 1165 | 2 | 618 | 6 | 723 | 2 | 794 | 2 | 1791 | 1 | 88 | 6 | 51 | 10 |
| | region | | | | | | | | | | | | | | |
| IPR000719 | Eukaryotic | 944 | 3 | 1053 | 2 | 520 | 4 | 397 | 4 | 639 | 5 | 122 | 2 | 111 | 3 |
| | protein kinase | | | | | | | | | | | | | | |
| IPR002290 | Serine/Threonine | 827 | 4 | 1010 | 3 | 488 | 5 | 359 | 5 | 589 | 6 | 114 | 3 | 107 | 4 |
| | protein kinase | | | | | | | | | | | | | | |
| IPR001245 | Tyrosine protein | 792 | 5 | 995 | 4 | 402 | 8 | 340 | 6 | 557 | 8 | 106 | 4 | 101 | 5 |
| | kinase | | | | | | | | | | | | | | |
| IPR001611 | Leucine-rich | 344 | 6 | 504 | 7 | 68 | 51 | 151 | 16 | 219 | 23 | 6 | 46 | 10 | 37 |
| | repeat | | | | | | | | | | | | | | |
| IPR001841 | Zn-finger, RING | 341 | 7 | 436 | 9 | 155 | 22 | 145 | 19 | 320 | 13 | 34 | 19 | 44 | 11 |
| IPR001810 | Cyclin-like F-box | 335 | 8 | 650 | 5 | 428 | 6 | 46 | 63 | 70 | 69 | 14 | 38 | 13 | 34 |
| IPR000504 | RNA-binding | 325 | 9 | 313 | 10 | 160 | 20 | 293 | 7 | 340 | 10 | 65 | 11 | 86 | 6 |
| | region RNP-1 | | | | | | | | | | | | | | |
| | (RNA recognition | | | | | | | | | | | | | | |
| | motif) | | | | | | | | | | | | | | |
| IPR002885 | PPR repeat | 288 | 10 | 459 | 8 | 1 | 110 | 5 | 104 | 5 | 130 | 2 | 50 | 4 | 43 |
| IPR001680 | G-protein beta | 268 | 11 | 267 | 14 | 166 | 19 | 240 | 9 | 329 | 11 | 102 | 5 | 121 | 2 |
| | WD-40 repeat | | | | | | | | | | | | | | |
| IPR000379 | Esterase/lipase/ | 232 | 12 | 221 | 17 | 137 | 25 | 167 | 14 | 108 | 49 | 37 | 18 | 25 | 22 |
| | thioesterase, | | | | | | | | | | | | | | |
| | active site | | | | | | | | | | | | | | |
| IPR003593 | AAA ATPase | 227 | 13 | 307 | 11 | 116 | 27 | 160 | 15 | 159 | 31 | 82 | 7 | 70 | 7 |
| b. Exist | | | | | | | | | | | | | | | |
| in rice | | | | | | | | | | | | | | | |
| but not in | | | | | | | | | | | | | | | |
| Arabidopsis | | | | | | | | | | | | | | | |
| IPR005795 | Major pollen | 16 | 99 | | | | | | | | | | | | |
| | allergen Lol pI | | | | | | | | | | | | | | |
| IPR003496 | ABA/WDS | 15 | 100 | | | | | | | | | | | | |
| | induced protein | | | | | | | | | | | | | | |
| IPR000877 | Bowman-Birk | 13 | 102 | | | | | | | | | | | | |
| | serine protease | | | | | | | | | | | | | | |
| | inhibitor | | | | | | | | | | | | | | |
| c. Rice/ | | | | | | | | | | | | | | | |
| Arabi >> 1 | | | | | | | | | | | | | | | |
| IPR004873 | BURP domain | 70 | 51 | 5 | 125 | | | | | | | | | | |
| IPR001568 | Ribonuclease T2 | 29 | 86 | 5 | 125 | 1 | 110 | 1 | 108 | 1 | 134 | 1 | 51 | | |
| IPR000104 | Antifreeze | 69 | 52 | 13 | 117 | 4 | 107 | 143 | 20 | 41 | 94 | 5 | 47 | | |
| | protein, type I | | | | | | | | | | | | | | |
| d. Arabi/ | | | | | | | | | | | | | | | |
| Rice >> 1 | | | | | | | | | | | | | | | |
| IPR000157 | TTR domain | 1 | 114 | 126 | 29 | 3 | 108 | 12 | 97 | 23 | 112 | | | | |
| IPR004252 | Putative plant | 2 | 113 | 76 | 57 | | | | | | | | | | |
| | transposon | | | | | | | | | | | | | | |
| | protein | | | | | | | | | | | | | | |
| IPR004146 | DC1 domain | 4 | 111 | 138 | 25 | | | | | | | | | | |
| IPR003614 | Knottin | 1 | 114 | 19 | 111 | | | 6 | 103 | | | | | | |
| IPR000477 | RNA-directed | 5 | 110 | 91 | 47 | 64 | 54 | 33 | 76 | 69 | 70 | 5 | 47 | 13 | 34 |
| | DNA polymerase | | | | | | | | | | | | | | |
| | (Reverse | | | | | | | | | | | | | | |
| | transcriptase) | | | | | | | | | | | | | | |
| IPR005174 | Protein of | 2 | 113 | 34 | 96 | | | | | | | | | | |
| | unknown function | | | | | | | | | | | | | | |
| | DUF295 | | | | | | | | | | | | | | |
| IPR005162 | Retrotransposon | 7 | 108 | 86 | 50 | 5 | 106 | 2 | 107 | 1 | 134 | | | | |
| | gag protein | | | | | | | | | | | | | | |
| IPR003653 | SUMO/Sentrin/ | 8 | 107 | 81 | 52 | 6 | 105 | 7 | 102 | 7 | 128 | 2 | 50 | 4 | 43 |
| | Ubl1 specific | | | | | | | | | | | | | | |
| | protease | | | | | | | | | | | | | | |
| IPR001584 | Integrase, | 13 | 102 | 117 | 32 | 21 | 90 | 33 | 76 | 7 | 128 | 47 | 15 | 11 | 36 |
| | catalytic domain | | | | | | | | | | | | | | |
| IPR004332 | Plant MuDR | 13 | 102 | 99 | 42 | | | | | | | | | | |
| | transposase | | | | | | | | | | | | | | |

8) Transcription Factor

[0229] The InterPro search yielded 1336 transcription factor clones classified into 18 DNA-binding domains, as categorized in Table 5. As a result of classification, Zn finger-type transcription factors are most numerous, followed by Myb-type factors; these constitutions are similar to those for Arabidopsis. Of the predicted transcription factor clones, those included in the Zn finger-type are classified into subtypes as shown at the end of this specification.

TABLE 5

| | Number of | |
|---|---|---|
| Category | FL-cDNA clones | Comment |
| Zn finger | 588 | Including Ring, C2H2, Cx8Cx5C3H, |
| | | Dof, GATA, Constans, NF-X1 |
| Myb | 158 | |
| ERF | 83 | Including one ERF |
| NAM | 74 | |
| Homeo box | 73 | Including ELK, KNOX1,2 |
| bZIP | 63 | Not includind Zn finger |
| AUX/IAA | 47 | Including four TFB3 |
| WRKY | 46 | |
| TFB3 | 27 | Not including ERF, AUX/IAA |
| GRAS | 27 | Not including Zn finger |
| MADS | 26 | |
| HSF | 25 | |
| Tubby | 24 | |
| BRCT | 19 | Not including Zn finger |
| Fungal TF | 18 | |
| SBP | 17 | |
| Jumonji | 11 | Including jmjC, JmjN, not including |
| | | Zn finger |
| TCP(* | 10 | |
| Total | 1336 | |

9) Searches for Transmembrane Spanning Proteins and Their Cellular Location

[0230] The MEMSAT programis effective in predicting the secondary structure of a transmembrane spanning proteins and their topology. The use of this program identifies the number of transmembrane spanning segments of full-length CDNA clones and their topology. Table 6 shows the number of transmembrane-spanning segments, total number of said clones, and direction of the segments (when the N-terminus is intracellular: IN, when extracellular: OUT).

TABLE 6

| | | |
|---|---|---|
| Number of | | Spanning |
| transmembrane-spanning | Total number | direction |

| segment | of clone | In | Out |
|---|---|---|---|
| 1 | 17839 | 8175 | 9664 |
| 2 | 2842 | 1585 | 1257 |
| 3 | 1259 | 646 | 613 |
| 4 | 789 | 470 | 319 |
| 5 | 383 | 160 | 223 |
| 6 | 290 | 177 | 113 |
| 7 | 256 | 90 | 166 |
| 8 | 109 | 62 | 47 |
| 10 | 138 | 97 | 41 |
| 11 | 120 | 59 | 61 |
| 13 | 51 | 14 | 37 |
| 14 | 19 | 18 | 1 |
| 15 | 4 | 3 | 1 |
| 16 | 12 | 7 | 5 |
| 17 | 5 | 3 | 2 |
| 20 | 3 | 3 | 0 |

[0231] It was found that 17,839 clones had only one transmembrane-spanning segment, while 6,280 clones had two or more, accounting for 22.1% of the total cDNA clones. As to the spanning direction, one direction overwhelmingly exceeds the other in number depending on the number of spannings in some cases, but the numbers of both directions were mostly about the same.

[0232] The pSORT program is effective in predicting signal peptide sequences and their cellular location. This program yields the data on the putative target organelles to be sorted and the certainity of the localization. The certainity ranged from 0.9968 to 0.2 in the trial analysis. When, a cut-off value for the certainity was set at 0.5, this sorting process predicted the localization of signal peptide sequences in 18,166 clones out of those with ORF having 100 or more amino acid residues. Table 7 shows the predicted target organelles, number of clones whose localization in that target has been predicted, and the ratio (%) of said clones to 18,166 clones. Proteins predicted to be in the nucleus formed the largest group, accounting for 20.0% of total, followed by those in the plasma membrane, cytoplasm, endoplasmic reticulum, microbody, etc., and these locations all accounted for about 10%.

TABLE 7

| Target organella | | Number of clones | (%) |
|---|---|---|---|
| Chloroplast | Stroma | 1383 | 7.6 |
| | thylakoid membrane | 542 | 3.0 |
| | thylakoid space | 90 | 0.5 |
| Cytoplasm | | 1875 | 10.3 |
| ER | | 2045 | 11.3 |
| Golgi body | | 26 | 0.1 |
| Microbody | | 1783 | 9.8 |
| Mitochondorion | inner membrane | 502 | 2.8 |
| | Intermembrane space | 80 | 0.4 |
| | matrix space | 1434 | 7.9 |
| | outer membrane | 32 | 0.2 |
| Nuleus | | 3635 | 20.0 |
| Outside | | 1508 | 8.3 |
| Plasma membrane | | 2982 | 16.4 |
| Vacuole | | 249 | 1.4 |
| Total | | 18166 | |

A cut-off value for certainity: >0.5

10) Homology With Arabidopsis

[0233] To examine the homology of the full-length cDNA clones to the genes encoded in the Arabidopsis genome, rice 28,444 ORF amino-acid sequences were compared with the 27,288 deduced amino-acid sequences from the predicted CDS of the Arabidopsis genome at the BLASTP threshold of E<10⁻⁷. Results are summarized in Table 8. 18,900 full-length CDNA clones (12,996 TU, 64%) had a homologin Arabidopsis, and 20,473 Arabidopsis genes (75%) had a homolog in the rice full-length cDNAs.

[0234] Similar comparison of the indica genome with Arabidopsis genes at the genome sequence level was already reported, saying that 50% of predicted rice genes had a homolog in Arabidopsis and 80% of Arabidopsis genes had a homolog in rice. If the prediction in indica is correct, then considering the full-length cDNA clones being 19,000 TU and the redundancy of genes in their respective genomes, it becomes a subject to further acquire a 5% equivalent gene family common to Arabidopsis and collect more rice-specific gene family to reduce the fraction of Arabidopsis-common TU from 64% to 50%.

TABLE 8

| | | japonica | | | indica | | | Arabidopsis | | |
|---|---|---|---|---|---|---|---|---|---|---|
| Fraction | | E<-10 | E<-50 | E<-100 | E<-10 | E<-50 | E<-100 | E<-10 | E<-50 | E<-100 |
| 1 | japonica | 2667 | 6698 | 12073 | *** | *** | *** | *** | *** | *** |
| | specific | | | | | | | | | |
| 2 | indica | *** | *** | *** | 18461 | 30655 | 38684 | *** | *** | *** |
| | specific | | | | | | | | | |
| 3 | Arabidopsis | *** | *** | *** | *** | *** | *** | 5171 | 12148 | 18129 |
| | specific | | | | | | | | | |
| 4 | japonica & | 5560 | 7627 | 8682 | 8215 | 7969 | 7252 | *** | *** | *** |
| | indica | | | | | | | | | |
| | common | | | | | | | | | |
| 5 | indica & | *** | *** | *** | 1553 | 1094 | 777 | 1644 | 1667 | 1445 |
| | Arabidopsis | | | | | | | | | |
| | common | | | | | | | | | |
| 6 | Arabidopsis | 372 | 610 | 622 | *** | *** | *** | 674 | 983 | 1036 |
| | & japonica | | | | | | | | | |
| | common | | | | | | | | | |
| 7 | common | 20351 | 14015 | 7573 | 25169 | 13680 | 6685 | 19799 | 12490 | 6678 |
| | amang | | | | | | | | | |
| | three | | | | | | | | | |
| | total | | 28950 | | | 53398 | | | 27288 | |

11) Functional Classification of Genes Using Gene Ontology (GO)

[0235] GO terms are assigned to GenBank reports, InterPro domains and Arabidopsis genes. If GO terms are assigned to the information in the concerned database to which full-length cDNAs of the present invention showed homology, GO terms can be added to the full-length cDNA clones of the present invention based on the results of homology search. Therefore, these GO terms were collected to perform the functional classification based on them.

[0236] The total number of cDNA clones of the present invention to which GO terms associated with “biological processes” were added was 18,485, which were classified as shown in Tables 9-12. About a half of full-length cDNAs with “unclassified function” formed the largest group, followed by those classified into “metabolism,” “transport,” “translation,” , accounting for one-fourth of the total terms. GO terms associated with “function” were added to 10,942 full-length cDNA clones, and the total number of said GO terms was 16,853. These GO terms are unable to be classified exclusively, and the most frequently observed GO “function” term was “enzyme.” GO terms associated with “cellular component” were added to 3629 full-length cDNA clones, and the total number of said GO terms was 3637

TABLE 9

| Category | Number | % |
|---|---|---|
| unclassified | 9869 | 53.4 |
| Metabolism | 4912 | 26.6 |
| Transport | 1108 | 6.0 |
| Translation | 694 | 3.8 |
| Transcription | 583 | 3.2 |
| cell communication | 436 | 2.4 |
| Energy | 276 | 1.5 |
| Communication, Defense | 241 | 1.3 |
| Cell growth Maintenance | 164 | 0.9 |
| Developmental Process, Aging, Death | 101 | 0.5 |
| DNA replication | 92 | 0.5 |
| others | 9 | 0.0 |
| total | 18485 | |

[0237] TABLE 10

| Category | Number |
|---|---|
| enzyme | 5988 |
| ligand binding or carrier | 5369 |
| nucleic acid binding | 2199 |
| transporter | 1615 |
| structural protein | 499 |
| molecular_function unknown | 276 |
| signal transducer | 193 |
| enzyme inhibitor | 143 |
| defense/immunity protein | 112 |
| motor | 60 |
| chaperone | 48 |
| storage protein | 41 |
| toxin | 12 |
| microtubule binding | 8 |
| enzyme activator | 8 |
| apoptosis regulator | 5 |
| obsolete | 4 |
| cell adhesion molecule | 3 |
| Total | 16583 |

[0238] TABLE 11

| Enzymes | Number |
|---|---|
| hydrolase | 2099 |
| transferase | 1909 |
| kinase | 1126 |
| oxidoreductase | 796 |
| ATPase | 378 |
| lyase | 250 |
| phosphatase | 213 |
| ligase | 185 |
| helicase | 130 |
| monooxygenase | 105 |
| isomerase | 87 |
| small protein conjugating enzyme | 50 |
| aldolase | 37 |
| serine esterase | 35 |
| disulfide oxidoreductase | 25 |
| small protein activating enzyme | 7 |
| glycine cleavage system | 6 |
| heme-copper terminal oxidase | 6 |
| Rieske iron-sulfur protein | 4 |
| 1-deoxyxylulose-5-phosphate synthase | 3 |
| 3,4 dihydroxy-2-butanone-4-phosphate synthase | 3 |
| lipoate-protein ligase | 3 |
| 2C-methyl-D-erythritol 2,4-cyclodiphosphate synthase | 1 |
| DNA repair enzyme | 1 |
| glycogen debranching enzyme | 1 |
| imidazoleglycerol-phosphate synthase | 1 |
| Total | 7461 |

[0239] TABLE 12

| Location | Number |
|---|---|
| cell | 3414 |
| unlocalized | 165 |
| extracellular | 56 |
| external protective structure | 2 |
| cellular_component unknown | 0 |
| obsolete | 0 |
| Total | 3637 |
| intracellular | 2222 |
| membrane | 1457 |
| Total (cell) | 3679 |

12) Tissue-Specifically Expressed Gene

[0240] Full-length CDNA clones of the present invention were obtained from various libraries as shown in Table 1. Comparing genes obtained among these libraries with each other enables to sort genes universally obtained from a plurality of tissues and those specifically expressed in particular tissues. The results obtained by this gene expression analysis are referred to as body map.

[0241] The body map of the full-length cDNAs of the present invention revealed that most of full-length cDNA clones obtained from libraries derived from the flower organs are specifically xpressed in the flower organs and are not expressed in other tissues. A list of clones derived from flower organs is shown as “Clone list derived from flower organs” at the end of this specification. Most of clones set forth in this list are genes whose expressions have been confirmed in the maturation processes from the stages of young spikes through seed maturation.

13) Conclusion

[0242] The rice full-length cDNA project has completely sequenced a set of 28,469 clones and mapped them to the genome, revealing that these clones are those derived from at least 19,000 TU. Information on these cDNA clones will provide precise gene annotation from the genome sequence data, and facilitate the assignment of EST sequences to the corresponding promoter sequences. Considering possible bias during collection of various clones, the frequency of alternative splicing events in plants may be lower than that in animals.

[0243] Many plant genes are known to be amplified compared to those in animals, suggesting differences between plants and animals in the strategies used to increase the variety of proteins. Protein informatics analyses using the InterPro database provide insight into differences in the profile of the plant proteins such as proteins more frequent in rice than Arabidopsis and vice versa.

[0244] The protein homology searches between rice and Arabidopsis confirmed that the present full-length cDNA collection contains homologs corresponding to 75% of genes predicted in Arabidopsis, while 64% of the TU clusters in rice are homologous to Arabidopsis gene.

“Clone List”

[0245] The Clone list (Table 13; submitted in electronic format) shows, from the left column, the clone name (CLONE_NAME), DDBJ accession number (DDBJ_ACC), nucleotide sequence identification number (N_ID), amino acid sequence identification number (AMINO_ID), transcription initiation codon position (START_POSITION) and transcription termination codon position (STOP_POSITION).

“BLAST X Search Results”

[0246] The following information on each clone was described in Table 14 (submitted in electronic format) from the left divided by //.

Clone name,

DDBJ accession number of each clone,

Cluster ID to which the clone belongs,

Accession number of clone which yielded hits in BLAST N,

Definition of clone that yielded hits in BLAST N,

Score when yielding hits in BLAST N,

E value when yielding hits in BLAST N,

Accession number of clone that yielded hits in BLAST X,

Definition of clone that yielded hits in BLAST X,

Score when yielding hits in BLAST X,

E value when yielding hits in BLAST X

“List of Clones Predicted as Transcription Factor”

[0247] In the List of Clones Predicted as Transcription Factors (Table 15; submitted in electronic format), Clone name, ID of InterPro domain name, and domain name are described from the left divided by =.

“List of Clones Predicted to be Zn Finger”

[0248] Results of categorizing clones predicted to be Zn finger into subtypes are shown. Corresponding clones are listed following the InterPro domain ID and domain name.

[IPR000822;Zn-Finger, C2H2 Type]

[0249] 001-012-G08, 001-014-E06, 001-015-H09, 001-017-D01, 001-017-F12, 001-017-G09, 001-019-B08, 001-021-A06, 001-021-F09, 001-023-A03, 001-030-G02, 001-038-B11, 001-102-C06, 001-103-H07, 001-107-E09, 001-111-B01, 001-111-H03, 001-113-E02, 001-113-E12, 001-119-H03, 001-125-A08, 001-128-E09, 001-200-D09, 001-200-H06, 001-203-E10, 002-102-A12, 002-107-D06, 002-107-G07, 002-116-B04, 002-116-F05, 002-119-B08, 002-119-G10, 002-129-B01, 002-130-B07, 002-131-D01, 002-137-A12, 002-139-A09, 002-139-C06, 002-140-F08, 002-141-H01, 002-144-D12, 002-148-B03, 002-148-B06, 002-150-D08, 002-151-G02, 002-153-F01, 002-153-G07, 002-155-A06, 002-159-D08, 002-160-H02, 002-160-H09, 002-161-H07, 002-162-A11, 002-162-A12, 002-167-B07, 002-173-CO5, 002-173-H08, 002-181-F05, 006-206-D03, 006-207-E08, 006-212-C04, 006-311-A06, J013000K02, J013001C12, J013001G09, J013002J08, J013026K11, J013031H23, J013047G22, J013050J04, J013056E07, J013056L24, J013073B17, J013089B09, J013095D10, J013097L08, J013104D22, J013105K20, J013110K19, J013124C13, J013126A02, J013127D16, J013130L03, J013131B08, J013149G12, J013161E15, J013161F12, J013165P15, J013170H07, J023001N18, J023004M17, J023006J01, J023007J12, J023014K13, J023022G20, J023023L10, J023023M18, J023026P04, J023050E05, J023055E06, J023055J24, J023078D20, J023079017, J023085P15, J023088A12, J023093M20, J023109C14, J023109M13, J023110G13, J023114G08, J023119J10, J023123F03, J023123L01, J023125M06, J023142J09, J033029F02, J033045B09, J033046D05, J033054017, J033074H23, J033075E02, J033081C08, J033084A01, J033085L23, J033086G06, J033098G15, J033101B01, J033101Hl9, J033115G09, J033121H10, J033121H12, J033129E14, J033143G04, J033147N02

[IPR002926;Zn-Finger, CONSTANS Type]

001-007-G06, 001-029-D01, 001-205-D08, 002-118-C11, 006-205-E01, 006-303-A11, J013001A08, J013117D12, J013152B04, J023001E21, J023090D24, J023105D03

[0250] [IPR000571;Zn-Finger, C-x8-C-x5-C-x3-H type] 001-014-C04, 001-020-C06, 001-027-BlO, 001-030-A08, 001-032-B06, 001-039-A01, 001-044-E06, 001-047-F12, 001-202-E04, 001-204-A04, 001-205-D09, 001-206-H10, 002-102-A03, 002-102-F01, 002-103-E06, 002-107-G01, 002-110-B05, 002-111-A03, 002-120-E10, 002-131-G11, 002-140-H10, 002-141-G08, 002-155-C09, 002-159-BO5, 002-163-E09, 002-164-G05, 002-169-F02, 002-179-E04, 002-182-H10, J013000H23, J013001J05, J013002B05, J013002E19, J013025G09, J013050D10, J013056L03, J013094C18, J013114A13, J013116A14, J013116H24, J013123G12, J013159G03, J023003014, J023009A16, J023038J07, J023039E23, J023041B11, J023066C11, J023078K23, J023082B02, J023090K17, J023091E18, J023092H03, J023093012, J023095J08, J023119N23, J033043A02, J033045L14, J033050C24, J033073E09, J033090J15, J033099F01, J033102J01, J033114B10, J 033145I17

[IPR003851;Zn-Finger, Dof Type]

001-028-A11, 001-032-E07, 001-035-D05, 001-113-G11, 001-114-F11, 002-126-C02, 002-129-F12, 002-153-A09, 002-155-A04, 006-203-F09, 006-303-F03, J013026L11, J013041J16, J013091E10, J013152P10, J013155H18, J023060H13, J023076F14, J033034E07

(IPR000679;Zn-Finger, GATA Type]

[0251] 001-011-G08, 001-023-D04, 001-200-C09, 002-162-F07, J013048G01, J013064I12, J013120L22, J013136H07, J023003E02, J023034D16, J023055K24, J023063M07, J033033F09, J033038C04, J033044C20, J033058P14, J033068D01

[IPR000967;Zn-Finger, NF-X1 type]

002-161-C10, 002-162-G03, 002-166-F06, J013060014, J013082G02

[IPR001841;Zn-Finger, RING]

[0252] 001-001-C07, 001-001-F04, 001-002-E12, 001-003-C12, 001-005-B04, 001-006-B04, 001-007-D07, 001-010-F10, 001-012-E09, 001-014-D03, 001-017-F04, 001-018-E04, 001-019-H07, 001-022-D10, 001-023-B01, 001-023-C12, 001-025-F02, 001-025-H03, 001-025-H09, 001-027-B09, 001-028-B04, 001-031-A11, 001-032-H11, 001-033-A01, 001-033-B02, 001-035-B09, 001-035-H12, 001-036-A02, 001-037-B09, 001-039-B04, 001-039-G03, 001-040-F07, 001-040-G01, 001-043-F05, 001-045-D12, 001-045-H12, 001-105-D02, 001-107-A12, 001-110-A08, 001-112-G10, 001-112-H07, 001-113-G05, 001-114-F01, 001-115-G04, 001-116-C07, 001-118-F06, 001-121-E06, 001-122-C02, 001-123-D08, 001-124-C08, 001-127-C08, 001-200-C08, 001-204-D04, 001-204-D05, 001-205-B01, 001-205-F11, 001-206-A03, 001-206-B05, 001-206-E07, 001-208-D10, 002-101-A07, 002-101-G06, 002-104-G10, 002-107-C03, 002-107-D06, 002-107-D08, 002-107-G12, 002-108-A09, 002-108-E10, 002-108-G02, 002-108-H08, 002-108-H11, 002-110-F12, 002-113-C04, 002-116-G03, 002-118-C12, 002-118-G07, 002-124-E05, 002-124-E07, 002-131-F11, 002-132-E06, 002-135-A09, 002-137-A02, 002-137-C02, 002-138-B01, 002-139-E12, 002-140-H11, 002-141-F12, 002-142-C10, 002-143-E10, 002-143-G02, 002-147-B06, 002-149-F01, 002-150-E02, 002-152-A08, 002-152-A11, 002-152-H11, 002-153-B07, 002-154-D02, 002-154-F07, 002-155-B05, 002-155-G01, 002-162-B04, 002-162-H03, 002-164-B11, 002-164-D12, 002-166-D03, 002-166-F06, 002-167-G10, 002-173-B09, 002-173-B10, 002-174-H07, 002-176-C01, 002-176-D08, 002-177-E02, 002-178-C01; 002-188-G12, 006-201-H12, 006-202-G09, 006-203-C10, 006-204-C11, 006-204-E05, 006-205-F10, 006-207-G05, 006-209-G12, 006-210-E12, 006-211-B01, 006-212-C03, 006-212-D11, 006-212-F09, 006-212-H10, 006-301-D04, 006-301-G04, 006-302-G11, 006-305-B01, 006-307-D05, 006-308-A03, 006-308-C09, 006-308-C10, 006-310-A03, 006-311-G08, J013000B10, J013000P06, J013001J11, J013001N16, J013002F03, J013002G21, J013002N04, J013002N07, J013002P08, J013014C10, J013020F11, J013024P14, J013027C16, J013028F14, J013030E05, J013030E23, J013033B12, J013033K23, J013039J02, J013041Kl9, J013050C14, J013052012, J013052P13, J013057F24, J013058G19, J013058N02, J0130591 17, J013059J01, J013061F22, J013063D05, J013064M13, J013065E10, J013069F21, J013073A02, J013074C24, J013082G02, J013082L02, J01308415, J013089D16, J013090G16, J013091H18, J013093E22, J013093J16, J013094L24, J013095B01, J013095L18, J013096G12, J013096J16, J013097A17, J013097C11, J013103K22, J013104C20, J013104I23, J013104014, J013107I10, J013111A10, J013111A16, J013112G09, J013113E15, J013115015, J013115P09, J013116F16, J013116G13, J013116I02, J013116L22, J013119B08, J013121E16, J013128Jl9, J013130B11, J013130C12, J013130E06, J013131L14, J013134A03, J013135G08, J013144A04, J013145E21, J013153F20, J013157D07, J013157F12, J013159H10, J013160D07, J013169C17, J013169J03, J023001G18, J023003A15, J023005I07, J023009D02, J023009007, J023010E11, J023010H14, J023011H14, J023018C07, J023019021, J023020D18, J023020P04, J023021A17, J023023M16, J023031B11, J023031G24, J023034D08, J023039004, J023041E24, J023044E12, J023044P07, J023047F13, J023047F14, J023049F08, J023049J20, J023052D05, J023052J15, J023054E15, J023054P08, J023061K06, J02306318, J023066I04, J023072K15, J023075N19, J023077E12, J023077P18, J023078L19, J023089D17, J023096P15, J023097G23, J023098C19, J023105K15, J023105K22, J023106F04, J023106J06, J023106M02, J023107E20, J023108I11, J023110J02, J023114C23, J023124E09, J023127C10, J023133D04, J023134P18, J023139M11, J023142C17, J023148H24, J023149D24, J023149P20, J023150J15, J033000G10, J033010L07, J033015K15, J033020F05, J033020J08, J033021A14, J033023F07, J033023K06, J033025K23, J033026G05, J033026H11, J033029A20, J033030D14, J033033J06, J033036L15, J033038J15, J033041L15, J033047I01, J033048I07, J033048J15, J033050H01, J033051D17, J033058G15, J033060L17, J033063D14, J033067G01, J033068I24, J033068K11, J033068N07, J033069D23, J033072K04, J033073H23, J033075P09, J033083D05, J033084A01, J033088P15, J033089H07, J033090H12, J033091I10, J033094D12, J033094G14, J033101B01, J033104F07, J033106E23, J033107017, J033108E06, J033117A10, J033119F23, J033119L05, J033120I17, J033122C24, J033125G22, J033129G15, J033132P09, J033133Fl9, J033142Nl6, J033149F0l

“Results of Gene Ontology”

[0253] Clone name (CLONE_NAME), database name, GO code, and gene ontology label (GO_LABEL) were described in Table 16 (submitted in electronic format) according to GO categories divided by =.

“List of Clones Included in Each Category of Gene Ontology”

[0254] Clone names and GO terms added to respective clones are categorized.

Binding Protein[Binding]

[0255] J023051M04==actin binding
[0256] J023149A14==acyl-CoA binding
[0257] J023030G12==amino acid binding
[0258] 002-144-D12==ATP binding
[0259] 002-145-D12==ATP-binding cassette (ABC) transporter
[0260] J013002C11==biotin binding
[0261] 002-143-H11==calcium ion binding
[0262] 002-154-C06==chitin binding
[0263] 002-160-B03==chromatin binding
[0264] 002-149-C02==copper binding
[0265] 002-143-H02==DNA binding
[0266] J023111A18==double-stranded RNA binding
[0267] J023029A13==GTP binding
[0268] J023033I19==heavy metal binding
[0269] J023079P11==iron binding
[0270] J023041I08==lipid binding
[0271] 002-150-D04==microtubule binding
[0272] 002-143-F09==nucleic acid binding
[0273] 002-147-D09==nucleotide binding
[0274] 002-145-H10==protein binding
[0275] 002-145-G05==RNA binding
[0276] 002-143-E10==sugar binding
[0277] 002-137-H02==tRNA binding
[0278] 002-143-E06==zinc binding
   (Enzyme_Inhibitor]
[0279] J023043J23==cysteine protease inhibitor
[0280] J013043C13==endopeptidase inhibitor
[0281] 002-151-F03==enzyme inhibitor
[0282] J023100009==RAB GDP-dissociation inhibitor
[0283] J023112G04==Rho GDP-dissociation inhibitor
[0284] 002-145-A10==serine protease inhibitor
   Transporter Protein [Transporter]
[0285] J023037N07==amino acid-polyamine transporter
[0286] 002-150-A12==ammonium transporter
[0287] 002-145-D12==ATP-binding cassette (ABC) transporter
[0288] J023036P06==cation transporter
[0289] J013108A03==cobalt ion transporter
[0290] 002-144-C02==electron transporter
[0291] J023054A11==heavy metal ion transporter
[0292] 002-111-D08==heme transporter
[0293] J023028L13==hydrogen-transporting two-sector ATPase
[0294] J023050L03==inorganic phosphate transporter
[0295] J023136I24==intracellular transporter
[0296] 002-169-D04==nucleobase transporter
[0297] J033024P16==nucleoside transporter
[0298] J023052011==nucleotide-sugar transporter
[0299] 002-151-F01==plasma membrane cation-transporting ATPase
[0300] J023055A03==potassium transporter
[0301] J023048B11==protein transporter
   [Carrier]
[0302] J023122I22==acyl carrier
[0303] J033133F17==carrier
[0304] 002-150-B07==Fe3S4/Fe4S4 electron transfer carrier
[0305] J023035H08==iron-sulfur electron transfer carrier
[0306] J023034G24==protein carrier
[0307] J023028D17==redox-active disulfide bond electron carrier
   [Enzyme]
[0308] 00l-100-C02==“1,3-beta-glucan synthase”
[0309] J023080J16==1-aminocyclopropane-1-carboxylate synthase
[0310] J023132G24==1-deoxyxylulose-5-phosphate synthase
[0311] 006-308-E05==“1-phosphatidylinositol-4,5-bisphosphate phosphodiesterase”
[0312] J023083N15==1-phosphatidylinositol-4-phosphate 5-kinase
[0313] 001-003-D03==“2C-methyl-D-erythritol 2,4-cyclodiphosphate synthase”
[0314] 002-145-A06==2-dehydro-3-deoxyphosphoheptonate aldolase
[0315] J023144M13==“3,4 dihydroxy-2-butanone-4-phosphate synthase”
[0316] J023083L07==3′-5′ exoribonuclease
[0317] J013032A17==3-beta-hydroxy-delta(5)-steroid dehydrogenase
[0318] J033028020==3-dehydroquinate dehydratase
[0319] J013067A20==3-dehydroquinate synthase
[0320] J013000009==3-deoxy-manno-octulosonate cytidylyltransferase
[0321] J033004006==3-hydroxyisobutyrate dehydrogenase
[0322] 002-151-H05==5-methyltetrahydropteroyltriglutamate-homocys teine S-methyltransferase
[0323] J023050A11==6-phosphofructokinase
[0324] 002-138-C02==acetolactate synthase
[0325] 002-154-A08==acetyl-CoA carboxylase
[0326] J023043F24==acetylglutamate kinase
[0327] J023087C13==acid phosphatase
[0328] 002-154-G06==acyl-CoA dehydrogenase
[0329] 006-301-D08==acyl-CoA oxidase
[0330] 006-307-C01==acyl-CoA thioesterase
[0331] 002-147-G01==acyltransferase
[0332] 006-203-H06==adenosine kinase
[0333] J013070D05==adenosinetriphosphatase
[0334] J013002P17==adenosylhomocysteinase
[0335] J023041P13==adenosylmethionine decarboxylase
[0336] J013088J03==adenylosuccinate synthase
[0337] 002-177-B04==alanine-tRNA ligase
[0338] 002-144-E03==“alcohol dehydrogenase, zinc-dependent”
[0339] J023139A20==aldolase
[0340] J023050C09==aldose 1-epimerase
[0341] 002-139-H02==“alpha,alpha-trehalase”
[0342] 002-145-G09==“alpha,alpha-trehalose-phosphate synthase (UDP-forming)”
[0343] J033046P17==“alpha-1,3-mannosylglycoprotein beta-1,2-N-acetylglucosaminyltransferase”
[0344] 002-162-A01==alpha-amylase
[0345] 002-167-G08==alpha-mannosidase
[0346] J023039El2==amidase
[0347] 006-204-B10==aminoacyl-tRNA hydrolase
[0348] J013106I02==aminomethyltransferase
[0349] 006-208-D05==aminopeptidase
[0350] J023082J11==ammonia ligase
[0351] J013052F22==arginine-tRNA ligase
[0352] J023081B09==argininosuccinate synthase
[0353] 006-309-E04==asparaginase
[0354] J033004I10==aspartate kinase
[0355] 002-160-A04==aspartate-tRNA ligase
[0356] 002-149-B12==aspartic-type endopeptidase
[0357] J033082C14==ATP phosphoribosyltransferase
[0358] 002-161-E09==ATP-dependent peptidase
[0359] J023048N01==beta-amylase
[0360] J033105C09==beta-galactosidase
[0361] J023055K01==beta-N-acetylhexosaminidase
[0362] 002-159-A07==biotin carboxylase
[0363] J033031K02==biotin synthase
[0364] J013167021==calpain
[0365] J033082C21==carbamoyl-phosphate synthase
[0366] 002-152-A12==carbonate dehydratase
[0367] 002-161-G04==carboxyl- and carbamoyltransferase
[0368] J023068K15==carboxy-lyase
[0369] 002-147-C06==carboxypeptidase A
[0370] J013051E04==“casein kinase II, regulator”
[0371] 002-174-H07==caspase
[0372] J023079C18==catalase
[0373] J023041M10==CDP-diacylglycerol-glycerol-3-phosphate
[0374] 3-phosphatidyltransferase
[0375] 002-164-A06==chitin synthase
[0376] J023042L15==chi tinase
[0377] J033031C20==chorismate mutase
[0378] J013110C10==chorismate synthase
[0379] J023146L07==citrate (SI)-synthase
[0380] J023088103==CoA hydrolase
[0381] 002-162-H04==“copper, zinc superoxide dismutase”
[0382] J023050L0 8==coproporphyrinogen oxidase
[0383] 001-102-A03==cyanate lyase
[0384] J013071P10==cysteine-tRNA ligase
[0385] 002-143-E04==cysteine-type endopeptidase
[0386] J023089B16==cytochrome c oxidase
[0387] J023148P17==D-alanine-D-alanine ligase
[0388] J033051A22−=deoxyhypusine synthase
[0389] 002-182-G05==deoxyribodipyrimidine photolyase
[0390] J023080K21==diacylglycerol kinase
[0391] 001-046-A07==dihydrodipicolinate reductase
[0392] J023089118==dihydroneopterin aldolase
[0393] J013002H08==dihydroorotate dehydrogenase
[0394] J013147H17==dihydropteroate synthase
[0395] J023030K24==disulfide oxidoreductase
[0396] 006-203-E05-=DNA 3-methyladenine glycosylase I
[0397] 002-160-D05==DNA ligase (ATP)
[0398] 033.020H02==DNA photolyase
[0399] 002-151-C09=-DNA-directed RNA polymerase
[0400] J033003F07==dolichyl-diphospho-oligosaccharide-protein glycosyltransferase
[0401] J033038E19==endonuclease
[0402] J023031C24==endopeptidase C1p
[0403] J023054N24==exonuclease
[0404] 001-102-D09==ferredoxin reductase
[0405] J033072J07==ferrochelatase
[0406] J023125G01==folylpolyglutamate synthase
[0407] 002-164-E10==formate-tetrahydrofolate ligase
[0408] 002-119-H07=-formylmethionine deformylase
[0409] J023038B06==fructose-bisphosphate aldolase
[0410] J013071F22==fucosyltransferase
[0411] J023071K13==galactosylgalactosylxylosylprotein 3-beta-glucuronosyltransferase
[0412] J023065E21==galactosyltransferase
[0413] J033088N13==glucose-1-phosphate adenylyltransferase
[0414] J023102M14==glucose-6-phosphate 1-dehydrogenase
[0415] J033116J21==glucose-6-phosphate isomerase
[0416] J033069K09-=glutamate N-acetyltransferase
[0417] 002-166-H10==glutamate synthase
[0418] J033031H21==glutamate-5-semialdehyde dehydrogenase
[0419] 006-208-G06==glutamate-ammonia ligase
[0420] J023141A17==glutamate-tRNA ligase
[0421] J023058E10==glutamine amidotransferase
[0422] 001-047-D06==-glutamyl tRNA reductase
[0423] J013000L07==glutamyl-tRNA(Gln) amidotransferase
[0424] J033076L03==glutathione peroxidase
[0425] J013033N23==glutathione synthase
[0426] J023036H06==glyceraldehyde 3-phosphate dehydrogenase (phosphorylating)
[0427] 002-159-C07==glycerol-3-phosphate dehydrogenase
[0428] J023050E11==glycerol-3-phosphate dehydrogenase (NAD+)
[0429] J013124A06==glycerone kinase
[0430] J023047B14==glycerophosphodiester phosphodiesterase
[0431] 002-161-H05==glycine dehydrogenase (decarboxylating)
[0432] 002-153-G10==glycine hydroxymethyltransferase
[0433] J023135F01==glycine-tRNA ligase
[0434] 002-155-F06==glycolipid 2-alpha-mannosyltransferase
[0435] J023044M15==glycosyltransferase
[0436] J033040C05==glycyl-peptide N-tetradecanoyltransferase
[0437] 001-201-F05==GTP cyclohydrolase I
[0438] J013116D09==GTP cyclohydrolase II
[0439] 002-167-C06==GTPase
[0440] 002-165-D05==guanylate cyclase
[0441] 002-179-F05==heterotrimeric G-protein GTPase
[0442] J023031J07==“heterotrimeric G-protein GTPase, alpha-subunit”
[0443] J023038N14==hexokinase
[0444] J023037L20==histidinol dehydrogenase
[0445] J033030E05==homocysteine S-methyltransferase
[0446] J023098E10==homoserine dehydrogenase
[0447] 001-020-B10==homoserine kinase
[0448] J023047F16==-hydrogen-translocating pyrophosphatase
[0449] J023086K07==hydrogen-translocating V-type ATPase
[0450] J023028L13==hydrogen-transporting two-sector ATPase
[0451] J023031L04==hydrolase
[0452] J023030L13==“hydrolase, acting on carbon-nitrogen (but not peptide) bonds”
[0453] J023114011==“hydrolase, acting on carbon-nitrogen (but not peptide) bonds, in cyclic amides”
[0454] J023133M21==“hydrolase, acting on carbon-nitrogen (but not peptide) bonds, in cyclic amidines”
[0455] J013059B20==“hydrolase, acting on carbon-nitrogen (but not peptide) bonds, in linear amides”
[0456] 002-145-B07==“hydrolase, hydrolyzing O-glycosyl compounds”
[0457] 002-159-G02==hydro-lyase
[0458] J023089B21==“hydroxymethyl-, formyl- and related transferase”
[0459] J033088M20==hydroxymethylbilane synthase
[0460] J013170018==hydroxymethylglutaryl-CoA lyase
[0461] J033025C16==hydroxymethylglutaryl-CoA reductase (NADPH)
[0462] J023079L19==hydroxymethylglutaryl-CoA synthase
[0463] J033025I19==imidazolegLycerol-phosphate dehydratase
[0464] J033107D20==IMP cyclohydrolase
[0465] J023092E01==indole-3-glycerol-phosphate synthase
[0466] J023047P17==inositol/phosphatidylinositol kinase
[0467] 002-148-A06==inositol/phosphatidylinositol phosphatase
[0468] J023l25K01==inositol-3-phosphate synthase
[0469] J023034C14==“intramolecular transferase, phosphotransferases”
[0470] 002-168-C03==isopentenyl-diphosphate delta-isomerase
[0471] J013002N13==ketol-acid reductoisomerase
[0472] J033057L23==kinase
[0473] J023043J03==lactoylglutathione lyase
[0474] 002-160-B02==leucine-tRNA ligase
[0475] J023132C04==lipid-A-disaccharide synthase
[0476] J033066K16==lipoate synthase
[0477] J023043P03==lyase
[0478] 002-165-A01==lysine-tRNA ligase
[0479] 002-164-F03==lysozyme
[0480] J023056M13==magnesium chelatase
[0481] 002-172-H02==malate dehydrogenase
[0482] J023065M02==malic enzyme
[0483] J023043B18==mannose-6-phosphate isomerase
[0484] 002-166-F07==“mannosyl-oligosaccharide 1,2-alpha-mannosidase”
[0485] 002-159-E10==mannosyltransferase
[0486] J023039G20=metalloendopeptidase
[0487] 001-040-H12==metalloexopeptidase
[0488] J023028L23==metallopeptidase
[0489] J023095C13==methionine adenosyltransferase
[0490] J023031N01==methyltransferase
[0491] 002-144-B01==monooxygenase
[0492] J023100D05==N-acetyl-gamma-glutamyl-phosphate reductase
[0493] 002-166-B07==N-acetyltranferase
[0494] 001-116-B03==NAD+ ADP-ribosyltransferase
[0495] 001-113-E04==NAD+ synthase (glutamine-hydrolyzing)
[0496] J023048E09==NADH dehydrogenase (ubiquinone)
[0497] J023055E24==nicotianamine synthase
[0498] J023049111==nuclease
[0499] J023039G14==nucleoside-diphosphate kinase
[0500] J023056M07==nucleotidyltransferase
[0501] J023054H04==oligosaccharyl transferase
[0502] 006-203-H05==O-methyltransferase
[0503] J033094F19==orotidine-5′-phosphate decarboxylase
[0504] J023064I01==O-sialoglycoprotein endopeptidase
[0505] 002-147-D07==oxidoreductase
[0506] 002-170-H05==“oxidoreductase, acting on the aldehyde or oxo group of donors, disulfide as acceptor”
[0507] 001-040-G05==pantoate-beta-alanine ligase
[0508] 002-146-G03==pepsin A
[0509] J023038A03==peptidase
[0510] J023033M17==peroxidase
[0511] 002-155-B07==phenylalanine-tRNA ligase
[0512] J023114K10==phosphatidate cytidylyltransferase
[0513] J023108I08==phosphatidylcholine-sterol O-acyltransferase
[0514] J013008I04==phosphatidylserine decarboxylase
[0515] 002-147-B03==phosphoenolpyruvate carboxykinase (ATP)
[0516] J023049F03==phosphoenolpyruvate carboxylase
[0517] J023080N03==phosphogluconatedehydrogenase (decarboxylating)
[0518] J023036N24==phosphoglycerate kinase
[0519] 002-131-H11==phospholipase
[0520] 001-039-E07==phospholipase A2
[0521] J023050004==phospholipase C
[0522] 006-304-H09==phosphomannomutase
[0523] J023133I04==phosphopyruvate hydratase
[0524] J023114015==phosphoribosylamine-glycine ligase
[0525] J013129D15==phosphoribosylaminoimidazole carboxylase
[0526] 001-115-F04==phosphoribosylaminoimidazole-succinocarboxamide synthase
[0527] 006-203-G09==phosphoribosyl-AMP cyclohydrolase
[0528] 001-121-B07==phosphorylase
[0529] 002-174-E12==phosphoserine phosphatase
[0530] 002-151-F01==plasma membrane cation-transporting ATPase
[0531] 002-143-E12==polygalacturonase
[0532] J033069C18==porphobilinogen synthase
[0533] 002-162-D12==prephenate dehydratase
[0534] J013159D01==prephenate dehydrogenase (NADP+)
[0535] J013002B07==procollagen-lysine 5-dioxygenase
[0536] J023012J21==prolyl oligopeptidase
[0537] J023041C17==proteasome endopeptidase
[0538] 002-145-E02==protein kinase
[0539] J023079D17==protein phosphatase
[0540] J023060H13==protein prenyltransferase
[0541] 001-044-A03==protein serine/threonine kinase
[0542] J023031I12==protein serine/threonine phosphatase
[0543] 002-143-E05==protein translocase
[0544] 002-155-E07==protein tyrosine kinase
[0545] 002-162-F06==protein tyrosine phosphatase
[0546] 002-160-D11==protein tyrosine/serine/threonine phosphatase
[0547] 002-145-H09==protein-methionine-S-oxide reductase
[0548] 006-310-C10==pseudouridylate synthase
[0549] J013069D01==pyridoxal kinase
[0550] J033070K02==pyridoxamine-phosphate oxidase
[0551] 006-305-H12==pyroglutamyl-peptidase I
[0552] J023036A18==pyrophosphatase
[0553] J023044E03==pyrroline 5-carboxylate reductase
[0554] 002-149-C12==pyruvate kinase
[0555] J033096C17==queuine tRNA-ribosyltransferase
[0556] J023100009==RAB GDP-dissociation inhibitor
[0557] J023076015==RAB small monomeric GTPase
[0558] 002-145-H05==“racemase and epimerase, acting on amino acids and derivatives”
[0559] 002-163-F07==RAS GTPase activator
[0560] 001-103-H08==RAS small monomeric GTPase
[0561] J023053H09==recombinase
[0562] J013169B12==ribonucleoside-diphosphate reductase
[0563] J013026J06==ribose-5-phosphate isomerase
[0564] J023042N11==ribulose-bisphosphate carboxylase
[0565] 006-205-A08==ribulose-phosphate 3-epimerase
[0566] 002-174-A05==“rRNA (adenine-N6,N6-)-dimethyltransferase”
[0567] 002-143-D09==S-adenosylmethionine-dependent methyltransferase
[0568] 002-183-A05==serine carboxypeptidase
[0569] 002-146-H03==serine esterase
[0570] J023104M20==serine-tRNA ligase
[0571] J023048E15==serine-type endopeptidase
[0572] 001-103-F08==serine-type peptidase
[0573] 002-146-B12==shikimate kinase
[0574] J023147K09==sialyltransferase
[0575] J023012K16==small monomeric GTPase
[0576] 002-153-C06==stearoyl-CoA desaturase
[0577] 002-145-D10==strictosidine synthase
[0578] 002-147-B12==subtilase
[0579] 002-144-D08==succinate dehydrogenase
[0580] J013043008==sulfate adenylyltransferase (ATP)
[0581] J023042G18==sulfotransferase
[0582] J023060D13==superoxide dismutase
[0583] J023133M06==thiamin-phosphate pyrophosphorylase
[0584] J013065E05==thiosulfate sulfurtransferase
[0585] J013057I21==thymidine kinase
[0586] 002-146-A10==transaminase
[0587] J023057D05==transferase
[0588] J023035J06==“transferase, transferring glycosyl groups”
[0589] J023034P03==“transferase, transferring hexosyl groups”
[0590] J033065A07==“transferase, transferring phosphorus-containing groups”
[0591] 002-164-E12==transketolase
[0592] J023048G03==transmembrane receptor protein tyrosine kinase
[0593] 001-118-H08==triacylglycerol lipase
[0594] J023115C24==triose-phosphate isomerase
[0595] J033124K13==tRNA
[0596] (5-methylaminomethyl-2-thiouridylate)-methyltransferase
[0597] 002-148-C06==tRNA ligase
[0598] 006-206-E08==tRNA-intron endonuclease
[0599] 002-154-F02==trypsin
[0600] J023125E11==tryptophan synthase
[0601] 001-046-E04==ubiquinol-cytochrome c reductase
[0602] J023049Il2==ubiquitin activating enzyme
[0603] J023055G02==ubiquitin conjugating enzyme
[0604] J013066H16==ubiquitin C-terminal hydrolase
[0605] J023039K21==ubiquitin-protein ligase
[0606] J013071N01==UDP-3-O-[3-hydroxymyristoyl]
[0607] N-acetylglucosamine deacetylase
[0608] J023089L18==urate oxidase
[0609] J033082E21==uridine kinase
[0610] 002-124-B12==uroporphyringonen-III synthase
[0611] J023047E18==uroporphyrinogen decarboxylase
[0612] J023078I01==UTP-hexose-1-phosphate uridylyltransferase
[0613] J023088P07==vacuolar aminopeptidase I
[0614] J023028013==voltage-gated chloride channel
[0615] 002-127-C10==xylose isomerase
   “List of Clones Derived From Flower Organs”

[0616] This list (Table 17; submitted in electronic format) shows the relationship between the names of respective clones derived from flower organs and the libraries from which the clones are derived.

The application's sequence listing, which the Patent Office published only in electronic form, follows.

SEQUENCE LISTING (56791 sequences)

SEQ ID NO: 1 - DNA, 2075 bp, Oryza sativa
  ref <308>: DATABASE ACCESSION NUMBER: AK058203
  ref <309>: DATABASE ENTRY DATE: 2001-12-06
aagcatttatcagggttattgtctcatgagcggatacatatttgaatgtatttagaaaaatagacatataggggttccgcgcacatttccccgaaaagtgccacctgcaagcttggctgtggaatgtgtgtcagttagggtgtggaaagtccccaggctccccagcaggcagaagtatgcaaagcatgcatctcaattagtcagcaaccaggtgtggaaagtccccaggctccccagcaggcagaagtatgcaaagcatgcatctcaattagtcagcaaccatagtcccgcccctaactccgcccatcccgcccctaactccgcccagttccgcccattctccgccccatggctgactaattttttttatttatgcagaggccgaggccgcctcggcctctgagctattccagaagtagtgaggaggcttttttggaggcctaggcttttgcaaaaagctcctcgatcgaggggctcgcatctctccttcacgcgcccgccgccctacctgaggccgccatccacgccggttgagtcgcgttctgccgcctcccgcctgtggtgcctcctgaactgcgtccgccgtctaggtaagtttaaagctcaggtcgagaccgggcctttgtccggcgctcccttggagcctacctagactcagccggctctccacgctttgcctgaccctgcttgctcaactctacgtctttgtttcgttttctgttctgcgccgttacagatccaagctctgaaaaaccagaaagttaactggtaagtttagtctttttgtcttttatttcaggtcccggatccggtggtggtgcaaatcaaagaactgctcctcagtggatgttgcctttacttctaggcctgtacggaagtgttacttctgctctaaaagctgcggaattcctcgagcactgttggcctactggaatgctgtattaagtaataacaagaaatatatctcctctactttttcctgacgcggagttgtactgcctatgatgcataatttgatcgcagtgtgatcaaaagacatcagctataatgtcttaataatattattatgaagagtttacctttttactaaaaaaaaaaaaaaaaaaaggccacatgtgctcgagctgcaggtcgcggccgctagactagtctagagaaaaaacctcccacacctccccctgaacctgaaacataaaatgaatgcaattgttgttgttaacttgtttattgcagcttataatggttacaaataaagcaatagcatcacaaatttcacaaataaagcatttttttcactgcattctagttgtggtttgtccaaactcatcaatgtatcttatcatgtctggatccccgggtaccgagctcgaattaattcctcttccgcttcctcgctcactgactcgctgcgctcggtcgttcggctgcggcgagcggtatcagctcactcaaaggcggtaatacggttatccacagaatcaggggataacgcaggaaagaacatgtgagcaaaaggccagcaaaaggccaggaaccgtaaaaaggccgcgttgctggcgtttttccataggctccgcccccctgacgagcatcacaaaaatcgacgctcaagtcagaggtggcgaaacccgacaggactataaagataccaggcgtttccccctggaagctccctcgtgcgctctcctgttccgaccctgccgcttaccggatacctgtccgcctttctcccttcgggaagcgtggcgctttctcatagctcacgctgtaggtatctcagttcggtgtaggtcgttcgctccaagctgggctgtgtgcacgaaccccccgttcagcccgaccgctgcgccttatccggtaactatcgtcttgagtccaacccggtaagacacgacttatcgccactggcagcagccactggtaacaggattagcagagcgaggtatgtaggcggtgctacagagttcttgaagtggtggcctaactacggctacactagaagaacagtatttggtatctgcgctctgctgaagccagttaccttcggaaaaagagtcggtagctcttgatccggc

SEQ ID NO: 2 - DNA, 1139 bp, Oryza sativa
  ref <308>: DATABASE ACCESSION NUMBER: AK058204
  ref <309>: DATABASE ENTRY DATE: 2001-12-06
tgacaaattaagatgggatcttttcttgaacatggtcttggtcggtgttggtgtcgtagtttcatcatatggcgagattcattttaatatcataggaacattataccaagtaacaggcatttttgcggaagccctcaggctggttctgacacaggtcctccttcaaaagagggggttaactctaaaccctatcacaagcctatattatatagccccttgcagtttcatcttcctgtttgttccttggtttttacttgaaaagccagaaatggatgtttctcaaattcagttcaactactggatatttttctttaatgcagttgctgcatttgcattgaacatatccatctttctagttattggaagaacaggagcagtcaccatccgagtcgcaggagttctgaaggactggatactcattgccctctcaaccattatctttcctgaatctattattacaagcctcaatataattggatatgctgttgctctctctggcgttgtcatgtacaattatttgaagatgaaagatgtcagagcgaaccaacttccagctgatatcgctcctgacagagctacgaaggataagaagatttcaaacatatacaagcctgacaatttcatggattctaatgatgaaaccactgttggaagtctggcgtcagaaggtgcaggggttgatgaagaagcccctttgattccttcttcacgcctctcctatgttacccggacacaaactggcagcttcaatagcagatgaccatcattttctgaagttttgagttagttgagggagcaaactttgccccagattaaccagctttcctcctggggagtctgaaagaggtattaggatgataaactatagccatattagaagctctggtgaatagtcctgcattcaccttggtatattttgctagttggaactgaatgtgtattggccagacacctggagatgaagtagagaaaagtgcagggatagggtcaaatgtttgaccagtacttgggatcaatttggtagttgcgttagatatatattgcttattaacccagcatattgaaaatgtttagcagaccatagacgatgtaaagcattttatagatgctaatttgtattgcagttttgtttccgtttc

SEQ ID NO: 3 - DNA, 650 bp, Oryza sativa
  ref <308>: DATABASE ACCESSION NUMBER: AK058205
  ref <309>: DATABASE ENTRY DATE: 2001-12-06
atgctcttcctcccgcgccaactcgccctctccgccgccgccgccgccgccgccatggccaaggaggagtcgaggaaggagaagaaggccaagaccaaggcggcgtcctccgccgccgccgtccccgacgcgaggagggccgccgtggtggccgcggtcgccgccttcctcgagtccagcggcttcccccgcgcgctcgccgcgctccagtccgaggccaacctcgaggcgggttcttggcggtcgtcgccggtgagcctggaagagttggtttccggattcttggaggactcgagcaattatgctccaggagccagcatcaatgggagtatcgagcacgagaaaacagccgccgttgtcgcggaagatgctggcaagaagaagaaaaagaaaggcagtgacacgaaagtgagtgaagctgagaacaaggtggctgagccttctgccgtggaaaagcccagtgaaaatgcggatgtcgagaccaaagaaaagaaacagaagaagaaaagcaagaaacaagaaaacgacgaggatgtcgaagctaggctggaaaaggcagaatcggctatcattaacaaatttgagaccgtggacacattgaaggaggatagcaagaatggtttggttgatgttgctcctgtggagaaagg

SEQ ID NO: 4 - DNA, 863 bp, Oryza sativa
  ref <308>: DATABASE ACCESSION NUMBER: AK058206
  ref <309>: DATABASE ENTRY DATE: 2001-12-06
aggctgtcgcggatccatcccatcccatctcttcctcgtctcccactcctccggattctttctgttcttggttgattgccggagatgtcggattcggaggagcatcacttcgagtccaaggccgacgccggcgcctccaagacctacccacagcaggccggcaccatccggaagaacggatatattgtcattaagaaccgcccctgcaaggtggttgaggtctctacttccaagactgggaagcatggtcacgccaaatgccactttgttggtattgacattttcaatggaaagaagcttgaagatattgtcccctcatcccacaactgtgacgttcctcatgttgatcgtactgattaccagctgattgacatttcggaagatggatttgtgagccttttgactgagagcggcaacactaaggatgacttgaggcttcccactgatgatactctgactaaccagatcaagaacgggtttggtgaagaaggcaaggatatgatcttgactgtgatgtccgccatgggtgaagaacagatctgtgccgtcaaggagattggggccaaaaactaagcggctttgctcgattgcctgcctgcctacgatactttgctatcttagtgttgagagctgagacacataaatagaagttttttttatgctacctgtggatgaaatgacgatcaaaaccttcatcgattttatgttacactggatggtcatgagatacttgttaatgcttttcattatcagtttcaagtatcctttgaatcgagtggcagctgtaattcgtatagtaaaagtgggaaatccattctgctatgagatgtgccatgggagcagccgtccaagctcaattcatc

SEQ ID NO: 5 - DNA, 923 bp, Oryza sativa
  ref <308>: DATABASE ACCESSION NUMBER: AK058207
  ref <309>: DATABASE ENTRY DATE: 2001-12-06
aaagatcacaaactttaatttctagggcagttgccaagaaggctgtttcacatccattttttttggccgggagagagagcatctagctagggagagaaaggaagagacgagaggagagagatggccactgcttatgctcccatggcgagccagctgatgaagagcagcttggtgtgctccaagccgagggggctgtctggtgcttcgctgacaaggaggccccgcttcacagccaaggccatccagtctgagaagccaacgtaccaggtggtgcagcccatcaatggcgaccccttcatcggcagcctggagacgccggtgacctccagcccgctggtcgcctggtacctctccaacctcccggcgtaccgcaccgccgtcagcccgctgctccgcggcatcgaggtcggcctcgcccacggctacctcctcgtcgggcccttcgcgctcaccggcccgctccgcaacacgccggtgcacggccaggccggcgccctcggcgccgcaggcctcgtcgccatcctcagcgtctgcctcaccatgtacggcgtcgcctccttcggcgagggcgagccgtccacggcgccgacgctgacgctcaccggccgcaagaaggaggccgacaagctgcagaccgccgacggctgggccaagttcaccggcggcttcttcttcggcggcatctccggcgtcctctgggcctacttcctcctctacgtgctcgacctcccgtacttcttcaagtagatcttttgtttgtaagtgcatgaccgggtgatgcatgtgtagatcgatcgatgatggaacatgtgtgtgttcatgtggtggctgatttgagtgccttctacttgtataaatgaaatgcatctgcacaagggcacaaacaggctgcctgcatggatatatggatggtgtgctgttgt

SEQ ID NO: 6 - DNA, 519 bp, Oryza sativa
  ref <308>: DATABASE ACCESSION NUMBER: AK058208
  ref <309>: DATABASE ENTRY DATE: 2001-12-06
gagccggtcactccacaaaaaaattcacaaatcgatactcctcttcctcgctgcgccaccacgccgccgtcgccggagaccggccatagccggcgacgtcctcaccaccaccagctgcaagccctcccccacagccttcggttgctgctgcttcagtttcctccaagtgcgagacgacccgatctgcatcctctactggttcttcgtcttcaacactgctgctgctcgttctgcttcgatctgtggctgctgcttctgcctctacaccagggacgccaagctactgctggtgcttcaagctctacttccaggacgccgatctgcaaccttcttcttcactgctgcctaaaaatcttcatcctacttccagtgcttcgacaacagtttcatcacttgggtttattctttcctatcctcagttagataaaaacttgtgctttatttcagagatttgatcactgtgattgtaaatttactttcctgcacttctaatactggaacatagtgttttttttgtcc

SEQ ID NO: 7 - DNA, 566 bp, Oryza sativa
  ref <308>: DATABASE ACCESSION NUMBER: AK058209
  ref <309>: DATABASE ENTRY DATE: 2001-12-06
accctcgcctccactccttcctcctcgcgccgtcgccgccgccgcatccgtgccctccttcgccgtccgccgtcgctagcagccggagaagagaagcatggatacccaggtcaaacttgccgtcttggtgaaggtgatgggccgcaccggctccaggggtcaggtgacccaggtcagagtgaagttcctcgacgaccagaaccgtctcatcatgaggaacgtcaagggcccggtccgtgagggcgacatcctcaccctgctcgagtctgagagggaggccaggaggctgcgctgaagctgtggcggttgtgttatttcgtggttcctgccttttgaaagtaaaatgccatattgtcgccttatttcgtgtactgcttttccggtccagttcttgaacaatggtttgtctttctgagtaggccttatatgttatgagttaagagcaatggaaatgtaatgggtacttgtctggttgcagttttggtctgttgcctataactaaagttccattgttgtgagacatggttatgctctactggctttgggcaacatgaactgattagatg

SEQ ID NO: 8 - DNA, 1214 bp, Oryza sativa
  ref <308>: DATABASE ACCESSION NUMBER: AK058210
  ref <309>: DATABASE ENTRY DATE: 2001-12-06
taacaacatcaatgtgctggaagcttattgctaaacatgttcagaccgccatatggatcaagcctgaagatcaatcctgccgacagaaaaatgctgatacgaaactactgaatatctgtgactcgtatgataattctccaccttcatggaaaattccattgatgaactgtgtgagattgaacaaagaccagtcaaatatgcagaaactgccttccagacctgaccgcctatcattttattccaggagtttggagatgataggagttactccagagaagttcgcaaagaataacaagttctggagggaccaggttagcatgtattggtcatttcttggtgttgagaagactagcatccgaaatgtcatggacatgaatgctaatattggtggatttgctgtggcactaagcaatgatcctgtctggattatgaatgtagtaccccatacaatgagcaacacattgcctgttatctatgatcgtgggttaatcggttcttaccatgactggtgcgagccattctcaacatatcctaggacatatgatttgctgcatgctttccacatcttttctcattaccaaagtcggaaggaagactgttcattggaagatatcatgctagaaatggaccgtatcattcgccccgagggttttatcattattagagatgagaacgccatcttgtcaggaatcaatgatcttgcaccaaagttcctttgggatgtcaccacacatatgttggaaaatgaggaaagcaagccggagaaagtcttggtttgcaggaagaaattctggtccatcgtttgagtgagcggatactattcaggccagttctttccagatgagtgtcctattattgaaaaagcagatgtcattcggcaaaaggaacacagaaaaatacatggaaaagaaaagaggacaacaccgggtttccttcagcaactatttagattcgtatttcagtgcttgagtatatgtcgatttttctgactttaaaaagggcagaccaaaggtgtaaagatgcaagatgactttttcacttgtttgatgacgatgctagtatgtgttatgtactttctaatttctaactagtctaagttaacctaggtgttttagcaaaattttgctggtgtttctgttcttgtatgggagcacatgtggtactactacgactgaacggcatgaaggctaaatttacagtggactttgagggat

SEQ ID NO: 9 - DNA, 930 bp, Oryza sativa
  ref <308>: DATABASE ACCESSION NUMBER: AK058211
  ref <309>: DATABASE ENTRY DATE: 2001-12-06
agagaggaaaagagagcgcgatatgggggaggaatcgccggcggccggcggtggcgcggcggcggcggcggccggaaaaccatcgggcacggcgcttccgaggagggggaaatcctgcaagggctgcctctactactcgtccatgctcagatcccgcggattcaaccccgtctgcgtggggatcccgcgctccatcccccaagtcccaagctacgtggtggacgagcccagagaagaggcggcggcgcaggggcatgatttgaggcagttcaagtacgcctgcgctggttactccatgtttgtggtggataacaaagacggccgaagcggcgagaaggagggcaagacgttgttgccatattgccaggggcttgagctattggtggacagcagattggttgagaagaaatcaccaaataatgagcctgctactgcctcttatagaaaggaagcggccaccagctctcggcaacaaggacaaagacccgggcaacttacaggacaggatttctatgcgaggtttaggaaaagcgcgggattggtcgcttcaggcgttgcaaagaatctaaacaagacagctatttacatcaaggaaaacgtcgcagacatactttacccggaccgtcgaccacctaaataggaactatgctgcttgcccgtcgttgttcagttggagatctgaagaaaattgctaccgacatgagatacagaagactacctgacgccatatccttacaaattacaataaccacatccctattgaggagtggcccgagccacattgagcaaaattggacggtttcttggatgctcttaattctttccattgtacttgcatcgtttttgtaatgttatggccagatacaaactaatgttgtacatgcgacagccttcctgcttcattgaagcaaaaatgggatctggtcggtg

SEQ ID NO: 10 - DNA, 1390 bp, Oryza sativa
  ref <308>: DATABASE ACCESSION NUMBER: AK103912
  ref <309>: DATABASE ENTRY DATE: 2002-08-28
aatttcttcctggtgctcacctcctcctcccccgggatcttccagaagcttccagaactgaccttggtgcgggcgagatccaaggaggagggtttcctgccatggtgaaggataccgcgtactacgacaccctgggggtcagcgtggacgcctcccccgccgagatcaagaaggcctattacctcaaggcgaagcaggtgcatccggacaagaatcctgggaaccccgatgcggcgcagaaatttcaggaactcggagaggcataccaagttttaagcgatccttcaaaaagggaggcttatgataagcatggaaaggaggggcttcctcaggataacatggtggatcctgctgctgtctttgggatgctttttggaagtgactattttgaagattatgttggacagcttgcactggcatccatagcatcagtggaagtcgaggaaaacttaaacagtcaagaagcaagagggaaggttcaagagaaaattaaagagttacaaaaagaaagagaacagaagcttattcagagcctaaaagatcgacttcaaccatttgtggatgagagaaaggatgaatttgttaactgggcaaatggggaagctcagcggttatcccatgcagcttttggcgaggctatgctcaccactattggctatatttatgtgcgacaagcagcgagagaacttggaaagagtaagttgtatatgggtgtaccattcatagctgagtgggtcagagacaagggccactgcattaaatcacaggttaatgccgcttcaggcgctatcgctctgatgcagctacaagaagggatgaaaaagatggaggaaagtgacaataaggaggaccagattatgaagagtttcgaggagaaaaaagatgccatgcttagttacctatggaaaattaatgtggttgatattgagtcaacacttacacatgtttgccaagcagttttgaaagacgccagtgtcccaaaagatgttctgaagttacgagcaagagcattgaaaaagcttgggacgatattccagggtgcgaagtctctgtaccatcgtgaaaacagcctacaggtggaaaccagcccacggcagggagcagcaacatcgaactgaagactgcaaaagtacaaaaaggaaaaaaaaaagtacacctgacagacgcaatttctggttttttggaggtgtcgtctctcgtgtccgtttattcatttttgtaagattttagacgacgcgtatcgttctggataaaatttgctgtttgatttggtctccgttttctttgtaaaaatggtgatgctgtcgtgagctctgaacacgaagattttgttggtgctctgcaacctgcatattactagcttgggctatctcgttgtaagatttgcacc

SEQ ID NO: 11 - DNA, 1351 bp, Oryza sativa
  ref <308>: DATABASE ACCESSION NUMBER: AK058212
  ref <309>: DATABASE ENTRY DATE: 2001-12-06
ggaaggaaattacggaagtaccaccaccaccctgcgcagcgttctcctgtaccctcaccgacgcgacaccaccccgcccccccttatccacggaggcggcctcctcctccgcccagcgccgccgctcttggtccgccggacgcgcgggtcacctcccacggaggggaaaggcctcaatttaggctgttcaactattccttgagatgttggcacatagtctagcaatcaatccttcaagggctgctcgatgtccggttacttcgagggcgtcgagtgcacccttgggacttgtctcttcgttggccttcagcaggggacgtaaggaaagtgttaaacttttcatcaatgtggatagatacacaaagtatagtactcctttctgttatgcaccgcgaaacgccagaatcacaccgcttgctactgcatcatttggtgacacagctgactcgtcaactcccatctttcctagaatccatgtgaaggatccctatcagcgacttggaatcagcagggaagcatctgaagaagaaattcgagctgccaggaattttctgataaacaagtatgcagggcataagccaagtgttgatgcaattgagtctgcccatgacagaatcatcatgcagagtttctctgatagaaaaaaaccaaaagtggatctcaagaaaaagtatagggaacttactcagtcacgtccagtcaaggctattcagggaagatttcaaacaccttctagtaaagtgatttggcagacagcaataacttttgtattgcttggagtgcttacccttgttttccctactgaagaagggccaactctccaggtggccatctcttgtgcagcaaatatctatttcatttatcagaggctgaaaagtggatggcgaacattcttttatgggttcggatccttctttgcttcctggttccttgccacattcttgatggtttctgtaattccgcctatactgcctggtccaagaaacttggaagtgagcactgcatgtgttacttatgcactcctttttgtatcatcggccttcctgaagtaggaaatctccatgttgtcattttcttgttagccactagtctttcaacaatcaaaatgattcccacttataatagcttgtacaatccatcggcatcttccttttttcagagtttttttcagaagtggaaatgtagtcctttgctgggttgctaatagttaatataaggttgtagtgtgaggtgtagaacatttttttgccctggcccttgagagagtttgatacctcctctagatattctcaatgctgtattaaatacagttggttttgagatagataatatgagatactacctccgtttc

SEQ ID NO: 12 - DNA, 1461 bp, Oryza sativa
  ref <308>: DATABASE ACCESSION NUMBER: AK058213
  ref <309>: DATABASE ENTRY DATE: 2001-12-06
ctctctgattatatcaatagcatatttcccatgtcaggccgtggtataccttcaaaagaccaaatatcaaggttaatttctcgcatccaagaggaagttgaagttgtgagaactcatgggcatttgcttgctcgtgttctacaagaaattggaaaagttttgcttctcctagcacaaagagctgaatatcagatctctactggcactgaagcccggcaagttactggcacagtgactccagctcaactgaaaaactttgctctatgtcttcacctccaggatgttcacacacgtatttcaagcattgtgtcaacacttccaaatgttacctctgaaaaactttccaaatcccttgaggccatttatacagtcgcgtgtgattcagtgagccctctattcaaagaaatgtttgatcgtctcggatcatgcattctgaaaatgcacgagcaggactttggaactcatggaatggacgcaacaatggataacaacgcttcagcttacatggaggaactgcagaagtgtgctgtccacttccgtagcgagttcttgtcaaagcttctaccttcatcatcatcccgctcagagaccatctgtaccataatggttagaagtatggcctcaagagtcctcatattgttcataaggcacgcctctctagttaggccactctctgaagccgggaagctgagaatgacaagggacatggccgagctggagctcgctgttggtcagaatctgtttccagtggagcagctaggcgcaccgtaccgggcgctgcgtgcattcaggcctgtcctattcctggagacgtctcagcttgagaaatctccactccttcaggacttgccccctagtgtgatcctccaccacctatattctcgaggacctgatgagttacagtctccattgcagcgtaacaggctcacgccgctgcagtattctctctggcttgattcccagggcgaggatcagatctggaaaggggtgaaagcaaccttggatgactacgagatgaaggtcaggtctcgcggagataaggagttcagccctgtgtaccctctcatgcttcagattggatctgcattgtctcaggccaagggctaaacctgtgttcagttcaacccagcatcacatatgtttgtatcatcatcatgtaggcattgggtacttgagagatcgattgagctttggaatagtttatacaaatgaaatagcatttgcatttgttttttttatggaaataaaggtgttcaaagtacagactctttctcctagctcctattatgttgtgaagtgtgtgatatgattgatcattgtacatctattagtcctgttgttccatctgcctgcttgactacaagcatgggaattttgcatgcgcggcacgctgatcacttgccagttgtatgtatgatctttggtgctaaatcacccgaaatgaaggaattttacctactc

SEQ ID NO: 13 - DNA, 710 bp, Oryza sativa
  ref <308>: DATABASE ACCESSION NUMBER: AK058214
  ref <309>: DATABASE ENTRY DATE: 2001-12-06
gtaagagaactcgaagatttcctcatcaatgagtgcatgtactcgggtattgtcaggggcaaattggatcagctgcggaggtgttttgaggtacaatttgcaactggaagggatcttacacctgatcagctgaacaatatgatagatacattatctgactggctgggaacatcggataatttattgcatcagattcaggagaaaattaagtgggctgatacaatgagtgaagtgaacaagaagcaccagaaagagttcgaagacaaggtagaagaagccaaaaaatcaatcaagttgaacaatttaagcaggcagacatcgacttacgggggcatgacgactttctctctgaacctggaggaataatggattttgaagaggaccgcatccgaccaaaaaggaggcgacaaccaatggcatagtttcaatggcatacttacctgcctccccacttgtggaagtgctgacgccctaccttgagacattttggcaccagagctgaggaaacttccccacatcaatttatttatggtgcttccttttgaagcgagtatccgttatcattgtctcttctggagaaaatattcgttttggtacgagatgtacaaggttgacacttaccgtagcatttgtttgctggtaaaaaaaaatacaggtggctggcttagcgttgtaaagatcatggttctgaaagtattttttggtgactt

SEQ ID NO: 14 - DNA, 1408 bp, Oryza sativa
  ref <308>: DATABASE ACCESSION NUMBER: AK058215
  ref <309>: DATABASE ENTRY DATE: 2001-12-06
aaaaccctcccctctctctctcgcctcaccaccgccgtcgtcgtcgccgccgccgcaaccctcgccgccggcgctaggctcgcgactccgacgatgtcggcgccatccgaccccgccgtggccacccacccgcaggcgggcgccgccgcggcggcgtcctccagcagcggcctcaccttcaagctccaccccctcgtcatcgtgaacgtctccgaccaccacacccgcgtgaaggcccaggcggcgtgctccggcgacggggcctcgtctgcggcggcgggggggcagccgccgagggtgttcgggtgcgtgatcggggtgcagcgcgggcggacggtggagatcttcaacagcttcgagctcgtcctcgaccctgtctccgggaccctcgaccgcgccttcctcgagaaaaagcaggagctctataagaaggttttccccgacttctatgtgctgggttggtactccactggaagcgatgtgcgggacactgatatgcaaatccacaaggctctgatggacattaacgaaagtcccgtttatcttcttttgaatcctgcaatcaacctctcccagaaggatctccctgtaacaatttatgagagtgagttgcatgttatcgatgggagtccgcagctcatctttgtcagagctaattatacaattgagactgtagaggcagagaggatatctgttgatcatgttgcccatctcaaaccatctgatggtggctctgcggcgactcaattggctgctcatctgacaggaatacacagtgccatcaagatgctcaatagcagggtccgtgttatccatcaatatcttgtttccatgcagaaaggtgatatgccactggacaattcgctgcttaggcaagtctcaagcctagtaagaaggctaccagcaatggagtcagaaaaattccaagatgacttcctaatggaatacaatgacaccctcctcatgacttaccttgctatgttcactaactgttcaagcacaatgaatgagctggtcgagaagtttaacgcgacatacgagaggtcgactgccaggagaggaggccgaggtgctttcatgtagattttcccccttctgcatctgcagctggttctctgctgagattttggaaatagttacccatatggccaggaagtttttgcgtataatctgttaggaactatatctggcagccatcaagtttcttccaaactcatgctccctcgttcaggattgacacggcaaacatgttgatattcttgattctgtgcctagatcgttgtttattcctcattcgccaagattgacatgtaaagtttatccccatcacccccatggtagttacactatttgactccctaaatggatatggatgcaggtttcctgagttatgcttgtaaatttcttt

SEQ ID NO: 15 - DNA, 1461 bp, Oryza sativa
  ref <308>: DATABASE ACCESSION NUMBER: AK058216
  ref <309>: DATABASE ENTRY DATE: 2001-12-06
gtgacctccacgttatcattttcgatgaaattgatgctatctgcaagtctagaggatctaccagagatggtacgggtgtacatgatagcattgtaaatcagctccttacaaagatagatggtgttgaggcattgaataatgtgctcctcattggaatgaccaatcgtaaggatttacttgatgaagctttactgaggcctggacgattggaagttcatattgagataaacctgcctgatgaaaatggccgtttgcagattcttcaaattcatacgaataagatgaaagaaagctctttcctttccccgaatgttaatcttcaggagctagctgcacggacaaagaactacagtggagcagagctggaaggtgtcgtcaaaagtgcagtctcatatgctttgaacaggcagataagcatggatgaccttaccaagcctttggatgaagaaagcattaaggttactatggatgattttgtgaatgcacttcatgaaattacccctgcatttggtgcttccactgatgaccttgaaagatgcaggctaaggggtatggttgattgtggcaaggcacataggcacttgtatgagagaggtatgcttcttgttgagcaagttaaagttagcaaaggtagtccacttgtgacatgcctcttggaaggtcctgctggaagtggtaaatcggctttggctgctactgttggcattgacagtgattttgcttacgtcaaaattatatcagcagagacaatgattggtttcagtgaaagcagcaaatgtgcacagatttgcaaggtttttgaggatgcatacaaatctcagtttggcatcataattctagatgacatcgaaaggttactggaatatgttgccattggaccacgcttttcaaacataatctcacaaactctactagtccttctcaagagggttcctcctaagggcaagaacttgcttgttattggaacaacaagtgaagtaggctttctagaatccattggtatgtgcgacgtgttctccgtgacataccatgtccccaaactgaaaaaggaggatgctacaaaggtgctgcggcatctcaatgtgttcgatgaagcggacattgatgcggctgcagaagcactggacgatatgccaatcaagaagctgtacacactcgttgagatggctgcacaagggccatcaggaggaagcgcggaagcagtctatggtggagaggagaagatagatatcaaccacttctttagcatcttgagtgatattatccgctattaactacacggcgtcggaatgaaccctaggtgacaccataggaatttaattgcacatttcttcttacttcaagttctcccttttgccaccgtcgccagggtatagggttgtttgatctttgaggttcgtgtctccttgttgtgccgctttgagcttttgttggaatgttgttatgattcggacagaggtt

SEQ ID NO: 16 - DNA, 1174 bp, Oryza sativa
  ref <308>: DATABASE ACCESSION NUMBER: AK058217
  ref <309>: DATABASE ENTRY DATE: 2001-12-06
ccacagcacaatttcaccgccaaggatttcacgcgcgaagacttcgctcctcctcctccacccgcggctgcgaaaacatcgcttctcctctctcgctcatcctcctccccgcgtgtattgaagttgcatcctcaccggagctcctccctgctgcagccgcttcgccgcatcctgcttcttccccaccgccgcggccattctcctcgctcgctcctccttctccccacgtgtactgaagccgcatcctcgccggagcagccgctgctgccgctgccggatactgcttcttcctcaccgccacggccggatccgacctcggccccttctgccgtcaccgacaccgccgtgcactccgccgctggccggcaccgaggtcggccctcttccccatttgccacttcatcatcatcagatcgccaatgttgaccctattgttgaaagcctatagtacgaccttggctatgttggctaaatattcaagaaacctagatagtgactgctgatagattcatgttatgtcctgtccgatgctgaatcatgagggattctccaagaggacaggaagctgtcctacagaaccaggcagtcaagttgtagagatggtgaaaagtatggagaagctacagtcaagttgcttgctgctacattatgactaacaggatcaatgggtgcttgctgataaaagaatgcatataaataacaaatggtccagcctcctacaactgtcactgtacagcatcaaaaaaggagattatgatatctgaaaacttcaatcgcaaagtttgaaaaatagagtgcatcaagtttgccatggagatggcaactaccaacccatggtcatgcggacatcaagaagcggacaacaagaaacatcataggagcacctcaccatcacatggctatgagcaagaggggtctgcaagagtaatccactgaactttgttgaacttgtaattttcatctgcatgctctggttctctaattgctttgaattacttatcatccttcaataaaccagctgttgtgaattcccaaaacaaagttggatgcgctagacaccatctgaagttggtcaatggcaactcgagaaattgtatatatttggaacattaccttcctcattagctttttatttcttcaatttcttctagcaaatacaggtattatgaacaac

SEQ ID NO: 17 - DNA, 757 bp, Oryza sativa
  ref <308>: DATABASE ACCESSION NUMBER: AK058218
  ref <309>: DATABASE ENTRY DATE: 2001-12-06
acctctctctagttgcagaccatcacttacgtagccctgtgtgcaacggcgcaagtgcttgtacgctttcagctagcgtagccatggcttccagggcattcctcctcgtggctctaaacctggtcctcttcttcaccgtggccagcgcctgcggcaagtactgcccgacgccttcgacgccgtcgacgacgccatcgacgccgtcctacaacaccaagtgccccaagaacgcgctcaagttcgcggcgtgcgccgacgtgctgggcctcgtcagcgccgaggtcggccagccgccgtacgagccgtgctgcggcgtcctcggcggcctcgccgaccttgaggccgccgtctgtctctgcaccgccatcaaggccaacgtgctcggcatcaccctcgacatccccgtcaagctcagcctcctcgtcaactactgcggcaagaacgtccctagtggcttcatctgtgcttaagctacgtaacgcgcgtacggtgtaacgacgtgctagctttgcatgcatgcagcacgcatgcacgaacacatcgttcgttcttgagtgcctgcatgcatatcggtcgagtctttacttactctgttattagttctgaatgtagaactgcttcagatatcaatccagcgagttaactgtacttgatttgtttatgtttcttcagttaaacagtttctgtcatcatttggtcaattaatggaggttttgttctccaaggaatcgcatgcaatggatactcttttagattg

SEQ ID NO: 18 - DNA, 731 bp, Oryza sativa
  ref <308>: DATABASE ACCESSION NUMBER: AK058219
  ref <309>: DATABASE ENTRY DATE: 2001-12-06
acaacgcagctcctggtcaagtcttatctgccttcctccctcctctcgccttccgcctcgcgtgcgctccaccaccgaaaaaaaggacaggttccacataaagaccaacgagtaaaagcttgatctgtccggtgccaaccaatcaacaaacaagtttcatgtctgatctcgacgttcagcttccatctgccttcgatccgtttgctgaggcaaatgctgaggactccggcgctggccctggagcaaaggattatgtgcatgtgtgcatccagcagcgcaacggcagaaagagtctaactactgttcagggcttaaagaaggagtacagttacaacaagatcctcaaggatctgaaaaaggagttctgctgcaatggtactgtagtccaagatccagagcttggccaggtcattcagcttcaaggtgatcagcgtaagaatgttgccacgttcctagttcaggctgggattgctaagaaggacaacatcaagattcacggtttctaagctgcctatagatgctcgtatgcaatatcgtgtgctgccagatattgggaagcctctgaagctaccagttactgttctctatatttgaagtcataagactatttgttgctattaaagcgattcttgcttgatgcaagttgtgtcctcattatgcactaccggcatattatgagtatggtttgtctgggatattgtcaatctaataaaagtacttgctatttgact

SEQ ID NO: 19 - DNA, 488 bp, Oryza sativa
  ref <308>: DATABASE ACCESSION NUMBER: AK058220
  ref <309>: DATABASE ENTRY DATE: 2001-12-06
aatgctattaaagtctcgagcgcatttgctggcacgagagagaaatgcgtgggatgcaacaagacagtctatccaattgaaagggttactgtcaataacaccatgtatcacaaaagctgcttcaagtgctgtcatggaggatgcaccattagcccctcaaattacatcgcacacgaagggaagctctattgcaagcaccaccatattcagttgatcaaagagaaggggaacttcagccaacttgagaatgaccatgagaaggcatcacaatctggatctgtagaggatgaagattcagaatattagtcctttgagaaatttccagagataaataatgatcttcttgcttttgctccagagcaccatgtctttctttgcgcggtctttacagttttttcccaatgaaggtcatgtgcattcagagaacaataatattatttggcttgtatccgcttgtaaaaccttgttatattggagtcagaatgtct

SEQ ID NO: 20 - DNA, 1242 bp, Oryza sativa
  ref <308>: DATABASE ACCESSION NUMBER: AK058221
  ref <309>: DATABASE ENTRY DATE: 2001-12-06
gattctgttgctgataatgctggagttccaaggcgaattgtcttcacaacaacacgtccagtggacattaagacaccatatgaaaaaatggtggagaatagtgttgagtttgggtcgccggacaaaaggtctggtggcttgctcaattcggctttggtggctcttgtttatgttgtattaattgctgtagttctgcagcgattgccaataagcttttctcagcattcagcaggccagctgaggaatcggaagaattcaaactctggtggggccaaagtttcagaaagtaccgatatagttacatttgctgatgtggctggagtagatgaggccaaagaagagctggaagagattgtggagttcctaaggaacccagaaagatatattcgtcttggtgcgcgacctccacgaggtgtcttgttggtgggccttccaggaactggaaagacgcttcttgcaaaagctgtcgcaggggaagctgaagtcccattcataagttgctctgcaagtgaatttgtggagttgtatgtaggcatgggagcagctcgagtgcgtgacctatttgctagagctaaaaaggaatctccttcgattatttttattgatgagattgatgctgtggcaaaaagccgtgatggccgttatcgtatcgtcagtaatgatgagcgagagcagacactaaatcaattactcacggaaatggatggatttgacaccaactcagctgtcattgtacttggagcaacaaaccgagcagatgttttagatcctgccctccgacgccctgggagatttgaccgtgtagttatggttgaagctcccgacagatttggaagagaatctattctgaaagttcatgtgagcagaaaggagcttccgcttggtaaagataacacgagtagctccaacagtttaaactgtacaagttctgaggtacgcaactcacgcccaagccaagacccttgtgatgctgtatatatctatgtgccgctccacgacccttgactacaggtctaccaggaatgattcatagcgagttgtaaaccccggagtattgtaagttccttcggtttcctcgtttgccgttggatgttgtttatagattagacgggtggtacacatgtaaaagaatattcgtttttcttctgtgttctttctctttctgttcatcctgcggaaggaattttttgttacattgtcatcttggcaaatattaataggaataattcatatacgtcgttg

SEQ ID NO: 21 - DNA, 480 bp, Oryza sativa
  ref <308>: DATABASE ACCESSION NUMBER: AK058222
  ref <309>: DATABASE ENTRY DATE: 2001-12-06
tccgatgtacaagctgacaccgaaactttccttaaccgaattgtaccagagggccgatctgctccttggaagcacactctagaaggacctgatgacatgccagcacatattaaatcatcaatgtttggttgtgccctgacgatccctataactgatgggcatctcaatatgggcacttggcagggtatatggctctgtgaacatcgtgacaatgcttcctcccggaaaattgtgatcactctcaatggggtctagatgaaggtcttcaaaggctgggatgcaggaaagagagcgaatgttggacagttcgaagcacgggcatgtaaaatcatgactcctgccgtatactgaattgttgttctaaatatcgattaatgctggggagctctatgaaatttactggtactgtttcctgtgtgatgtttgacatgctatgttatcttacaaacttgtgaattttatggcagtgatgcttaatgc

SEQ ID NO: 22 - DNA, 996 bp, Oryza sativa
  ref <308>: DATABASE ACCESSION NUMBER: AK058223
  ref <309>: DATABASE ENTRY DATE: 2001-12-06
ttgatgctggtgaagcttttgcaatgatggcagcttcttttgttgctcttgtggagtctactggtgcattcattgctgtctcacggtacgccagtgcaacaccatgccctccttctgttatgagtcgcggcattggttggcagggggttggtattttgctgggtggcttatttggaacagctaatggatcatctgtatctgttgaaaatgctggtttgctaggtttgacacgtgttggcagcagacgtgtggtgcagatttctgctggatttatgattttcttctctattcttgggaaatttggagcggtatttgcttcaattccaggcccaataattgcagctatatactgtcttctctttgcatatgtcggtatggcaggagtagggttccttcagttttgcaacctgaacagcttccgaacaaaattcatcgtgggattctccgtgtttatgggtttgtcggttccacagtatttcaacgagtacacctctgttgcaggctatggcccagtacacactcacgcaagatggttcaatgatatgatcaatgtggtattctcgtcaaaagcattcgtcggaggcgctgtagcatatttgttggacaataccctccagaggcatgacagcactgccaggaaggaccgggggcaccatttctgggacagattcaggtcgttcaggacagacccacgcagcgaggagttctactctctgcctttcaacctcaacaagttcttcccatccttctgattttgcacgccagtgttttgtatcaaattgggatagcattgtagtacgattagttcttgggtaagtaattctagcattgccagattgttgtttctcctagtgtttttatactcctgagttctgaatcctgcagaccccagtgtaaaactatctgaggaaggagagatgactcggtatttttgggtgtatattagttcggattaacagttaaatcaacaaactgaaaatgcctagtttttcttcc

SEQ ID NO: 23 - DNA, 371 bp, Oryza sativa
  ref <308>: DATABASE ACCESSION NUMBER: AK058224
  ref <309>: DATABASE ENTRY DATE: 2001-12-06
gttgcaagggcactggaaggaacaagaagaatggcaacatattcgagagatggaagtgcttcgattgccaagggtttgggctcaagagctgtcctagctgtggcaaggaagggctcacaccggagcagagaggtgaaagatagaacaaattaattgacaagaacaatacagacaccctgcacttgcatgccagtatcattatggttaagcttgttctgatgtaattatctagtggtaatttcttagctatagattagatggagtgcaagcttgtgtactgtatgtgaactgttgcaaaaagaacttgtgtatttgcaccctgcttgagatccaaactcagataaatatatgtcaggtcgagctgtgtactt

SEQ ID NO: 24 - DNA, 1294 bp, Oryza sativa
  ref <308>: DATABASE ACCESSION NUMBER: AK058225
  ref <309>: DATABASE ENTRY DATE: 2001-12-06
cgatgttgtacaatggcgctgaggcggctttgttggaggcaaccaccgatggtatgccgtcatctggtgtggacagcgagatagattatgacattgctgtgctgactaatgttaggcatgccggcgatgaggctggcatgacctacgaggagtacatgaacagcatggcctctctgttttctagaatggttgaccctgagcgccatcgtaaggtggtgaacattgatgatccaagtgctccattctttgctgcacagggagggcaagatgttcctgtggtgacatattcatttgagaacaagaaggctgatgtgcacactctgaagtatcagctttccctgtttgaaacggaggtcctggtacagacaccacatgggatcctcgagatttcgtcaggccttcttgggagggacaacatctataacatccttgcatctgtagcagttggtgttgctgtcggtgcaccactggaagacatagtgaagggcatcgaagaggtggatgcaattccaggccggtgtgagctaattgatgaggagcaagcatttggggtgatcgttgatcatgcaaggactccagagtctctttcgaggcttttggatggtgtaaaggaactgggcccacgtcgaattgtcacagttattggatgttgtggtgagcgagaaagagggaagaggccagtgatgacaaaagttgcagctgagaaaagtgatgttgttatgttgacatccgacaacccagcaaatgaagatccattggatatcctggatgatatgctggcgggagtagggtggaccatggaagaatacttgaagcatggcacaaatgattattacccaccactgccgaatggacataggatattcctacatgatattagaagagttgctgtacgagctgctgtcgcgatgggtgaacaaggagatgtagttgttatcactgggaaagggaatgatacttatcagattgaagtcgataaaaaggagttctttgatgatagggaagaatgccgagaagccttacaatatgttgatcaattgcatcgagctggaatagacacctcagaatttccatggaggttacctgaaagccactgattctgatgtattcaatatagccgggcttcttctttgcttgctcaaggagcagcattttagattctccctttttgctatggtaggatgtacttcagaccagcgggtgctcaaggttggctacttgacccccagtactaactgctaacttctcagtgatactcagtaggtacaaaatatatgcaatgcagcttcccctt

SEQ ID NO: 25 - DNA, 847 bp, Oryza sativa
  ref <308>: DATABASE ACCESSION NUMBER: AK058226
  ref <309>: DATABASE ENTRY DATE: 2001-12-06
tgttatgacttgatccgtgcggatgttgctcttgagcttgcatggatgaacaacatggtggactttgcattcccctatctgttacagttcattcgggagtacacaagcaaggttgatgagctagtgaaggacaggattgaatcacagaatgaagtaagggctaaagagaaggaagaaaaagatcttgttgctcagcagaacatgtatgcccaattgcttcctcttgccttgcctgctcctcctggtatgggcggtcctccaccgccaatggggatgccgggcatgcctccgatgggcggaatggggatgcctccgatgggtcctggacctatgccagcatatgggacgcctccaatgggaagctactgagttatcatccacttgtgaagagttcatttagataagaatttcaatttacacagaagaggaggcatctttcaagttgtagatgtgctattattggttgtttaaactgattcttttggtaccaggacaattttggcgagtgaaatctctagccaggtcgagttaattgctggttgctatatatattatgttacgatgggataggatgagggatggttgttaggttgagcgggagctgcaaaggctggtaccattatttgtataggttgtgtgataaaaaagcttgtagacattttgcatgtacactttgccgtagtggttggcgttggcagccataaacaggaacaccattgtctgtatgttacttgtttacggtctcatgtccagctgtttgaattttgtacctgaaatatttttttctttggacaaaaagatggagtatttgaatatttcgctcttgccagtgacttgtgtattctat

SEQ ID NO: 26 - DNA, 1321 bp, Oryza sativa
  ref <308>: DATABASE ACCESSION NUMBER: AK058227
  ref <309>: DATABASE ENTRY DATE: 2001-12-06
tttgatatgcggtttaattccactagaccccaagagagaagtcatcctggtcctttctcgcctttttgtcggcgtagcacaaggattcatatttcctgccattcacactgttctggcacaatgggtgcctccgcaggagcgctctcgctcagtgtctctaacaacctcagggatgtaccttggtgcagccggtggcatgttgtttttcccaagtttggtgaagcacatgggagctcagtcagttttctttgttgaagcagtgttaggtgtagcatggtctgtaatatggttaaagttttccagcgagccacctcgcactgaccttccgaaagtgtcaatgccaaaagtggcatcacgagagaagatcaaggcacaagcaggaggggttgttgcacctcgcactgtaaagatcccatggcgaaggattatcttcagtctaccagtttgggcaattgttgtaaacaacttcaccttccactatgccttgtatgtccttatgaattggctacccacctattttgaattaggccttcagcttagccttcaggatatgggatcgtcaaagatgcttccctatttcaacatgtttatattttctaatatcggtggagtggttgctgatcatttgattacaagaaggatcttatctattacaaagacgaggaaactcctgaacaccattggtttcgttgtttcagctgttgcacttatggctcttcctttattcaggactccctcagggactgtgctttgttcatcgatatcgctcggttttctggccctaggaagagcaggcttcgccgtgaatcacatggacgttgctccaaaatttgctggtatagtgatgggggtttcaaatacagctgggacattggctgggatagttggtgttggcctaacgggaagtattctggagggggcaaaggcttctaacatggatctgacaaactcagaaacctggaaaacagtcttctttgttccagggtacctctgtattttcagttccatcatttttttgattttctccactggcgaaaagatttttgaatagaggatgactattcttttacttttaatttacggtgaggctggatagcaatacgggattcttacatgtatctgtttgtcatttgttatattttggagttaagattgtatcccatacatccttaaaaaacagtgcagaaaggattgcacattttttgtagtaaatttatcatttctgtagtcagtcaagtttctgttattcaggcagattggatggcatctttacaacttacaagtgtaacattatgtattctgctgtcacctattcaggctt

SEQ ID NO: 27 - DNA, 769 bp, Oryza sativa
  ref <308>: DATABASE ACCESSION NUMBER: AK058228
  ref <309>: DATABASE ENTRY DATE: 2001-12-06
gctcattaggacagccagtttgcgagaactctgagaaaagaacagcaaaagccactgcaatagaagcgcgcgagcgctgagagtatctcagatccatggagatggaggctgccacgccggtgccgaggagtgacggcaggaagctggcgaggtgcccgaggctgcagatggacgccaagacggtcactgccatcgagcagtccacgggcgcggccatcgccgacgccgctgcggctggcgccgagggcgccggcggcgggatgcgcgtcaagatcgtgctgagcaagcagcagctgaagcaggtggccgcggccgtcgccggagggggcgccttcgcgctgccgccggcgctggagcagctcgtgagcgtgctcaagcggcagcacgcgaagaagcaggtggcagcggctgctgatgtggtcgtcggaaggcgccgctgccggtggtcgccggcgttgcagagcatcccggaggagtgctttagctaggtacccacgtctacgaatgtgtagtcgattcgcaacatgtatagcttcggtgatcagtccctcctttttttggcgatattcccttccttcctactaggctgcaaccgatcgatctagttgggccaaagttagtgcccaatggttgcatcccaactttgaaatgtcatgtattttaatctggcatttggacccaaattttcctccgttttcctggttcgatgcatgtacatatctctgcacacgaatagtattcaataagatgatgagctgggaaaaggaac

SEQ ID NO: 28 - DNA, 940 bp, Oryza sativa
  ref <308>: DATABASE ACCESSION NUMBER: AK058229
  ref <309>: DATABASE ENTRY DATE: 2001-12-06
acgaatatccacacccaattcccttctcacctttcctcctccaaatccgacctcctcttgttcttcctcctccacccccatcgccgatccgatcccccaaactcgcagtccacttcctcccgcggagatccatccaccaccagccgccagccgccgcggcgcgagattcagattcgtcgttctcttggttgtttgaggaggaggaggaggagggacaagatgggggcgtggatgtcgcgggtgtggttcttgatgttcccggcgaaggagtacaagatcgtcgtcgtggggctcgacaacgccggcaagaccaccacgctctacaagctccacctcggggaggccgtcaccgccgcacccaccatcggcagcaacgtcgaggaggtcgtcttcaagaacatccgattcgaggtgtgggatttaggaggacaagagagtctacggacttcgtgggcaacatactacagaggaacccatgctgtcatcgttgtaattgacagcacagaccgtgctcggatcaacattatcaaggatgagctcttccggctgcttcagcatggggacctcgagggcgcagtagtcctcgtgttcgcaaacaagcaggatctcaaggacgccatgtcgccagctgagatcaccgacgctctctccctccacagcataaagaaccacgattggcacatacaggcctcatgcgcgatcaccggtgagggcctctacgacgggctcggctggatagctcagaaagtcgccggcaaggccacaacaagctgacccatagcgcctgtatttccatggatttgttggagctggcaggttgtgtttgttattgctgctgctgctgctaccacttcagtgtttatttatgtctcacatgtctgaaaaaaaccatgtctgtattccctaccaatctgaaatataaaagatcaaatttgtgcgc

SEQ ID NO: 29 - DNA, 1430 bp, Oryza sativa
  ref <308>: DATABASE ACCESSION NUMBER: AK058230
  ref <309>: DATABASE ENTRY DATE: 2001-12-06
gttggtgcaggattcaaatacatgtcataaggtaatagatagagttgcctcaacactgatagatttagcaaatatctcaatgctcggtgattataaaaaacttggtgacaccattgtcacagtgctccaagaatgtatgcaacaatatgcaaattcacggaattcaattagtactcacaccaaagaacaaattgatgaactcttgagttccaagcagagttttaaattggagaagaatatgccaaaggaggatcttcatataaaacaagcagcagcattggttgttaagttggaaggcaattcacttttctcttcagggaacatagcaggagctgcagcaaagtactctgaagcacttgcgctgtgtccaatgaagtctaagaaagaaagagtggtgctttatagtaatcgagctcagtgttatctactcctgcagcagccattggctgccataagtgatgctacccgtgcattgtgccttcatagtcctttgaatcgccacgcaaaaagcttgtggagaagggctcaagcatacgatatgcttggtttagcgaaagagagcctgttggatgcaattctctttataaatgaatgctctcagtcgaatgatcctgacctgtcattaaagcaaaataaagttcctgattatgctgagcgtttggtgaagaagcagatgcgcacagcttggttattcagggaagcagctttgaaacatgggggaatccattgcgagggagaagctagtgatgcttttggtcaagaggcagatgactctgagtgggaaacagccagtgaaagtgatgctgagaatgatgcaacaggagaggcagatgatgaaactgaatggaagaacgataaccaagtatgagaaaagctgagaaccaggtttccttgccattcaggacgattgttggtgttgcttatgttagtagaaacaatggaaccacctgcttgtcttctgtacgagtaaactgaaacaaagttgtaaactggacggagccagcttacagaaagccttgcaagaatggctttcaaaagtgacaaatctggtgccactgtatttatcctattgagaacgaggctgaatttttcaatgccatttatcatctcatcaccatgttggatttgtcagggttgtgcttgtgattcgttcgatgtgttctattcggggagtagtttcatgtttggtgttgtaaaatgtgtttccaccgatttttcagcttttgaatggacaaaactgtgccttctttttttcctcctttcttgatgtgtgaagttttgccaagaggcaaactctggcactgttttctatattctgcagtattgaatgtacattttcttcagggtggatgctgtgttttcttattgtaaaactctatattggttgaggattaactggtttctagtttatgtgtccgtaggttgagttt

SEQ ID NO: 30 - DNA, 1099 bp, Oryza sativa
  ref <308>: DATABASE ACCESSION NUMBER: AK058231
  ref <309>: DATABASE ENTRY DATE: 2001-12-06
atggccgacgacgtcgtcgaagccgcggcgtcgtcctctcccagtacgcaaggcggcggcggcggcggcatccatgtcgtcgcgaagaacgcgatgaacagcagcaagcagttctcctcggccctcgcgcccgtggccgtgctgctcgccgtcgccgtcggggccgtctccctgctgccatcgctggcgcaggcggtgtgggaggtgccccacctcttcctcctcggcctcgtcgtctcctatggcgtcttcgcccagaagatttccaccggtggcagcggcggaggcggcggcggcggcggtggagatgatggcgccagggcgtggaactctcggtacctcagcgacgaccccctcgtcgtggtcgccgacaatgcggcgagtgacgacggcggcggcggcggcgcgagcgggaggccgctttccttgccggtgcggaggctgaagccgccgccaccggcgccgacgatgccggggatagagtccgaagccggcgatgccagcgacgacggcattggcgcagagacggacagctccgcatcgacggcgggattctggggcgccgccccttcgccgccctctgttcttgacgccgtctgcaggtcccggaaacccgctgctactgcgacggcggcggcgccgtccgccatgtcgaagggcttcccgagctacatttctccggcgcctcgttgcgaccagtcgttcagcgacgacggcgaggtcaccgactgggacgacgacgacgacgagaaggctgacgtgcaggacgagatggccgcgtcgccgcaaaggtcgtacgtcgaccatgacgactacaacggtgacggtgatgagctctccgagctggcggcggaggtggaggacgaggtggacaggaaggccgacgagttcatcgccaagttcagggagcaaatcaggttgcagaggttgtaggcgttcatggcaacttggcaagtatgcatacgtgatgcatgcagtcatgcaccgtaccgtggagtgagtaaaaccattatgagccattttacgtacgaagggggatcgtgacatgggtgtacttgtgaacagctgatctgttcatcggtaacgtcatgtttcttgt

SEQ ID NO: 31 - DNA, 1393 bp, Oryza sativa
  ref <308>: DATABASE ACCESSION NUMBER: AK058232
  ref <309>: DATABASE ENTRY DATE: 2001-12-06
acaatgcatctcgattcttatcccttccgtcctccttcctcctcccccctccccggttcgacgcgcacatcgaaccccgacgaccaccaccgcccggccgccgccgccgccgacgcggtcgtcctctccggctaggatctggtgcatctaactattcaagaaatagaaaagcatgagctacttcacttgcaagccgaacagtgggcttattgtggataggcccgtcgctggtcttgggaggacaggcagattactatctcatcctcaatattccctaacgacacattctgttcgatttcccaagcttcaaaagcaggtgtacccgcgacttgttcttgttgctgctagccagaaaaagcttcctcctctatgtgcctcgagtggaaaggtgaacccagaggcagaaaatgatccctttatggaatctttgaagaaggccatggatgatgccaaaaagccacggcctattcaagacttgctgaaagaacagatagctaagctgagagaacaaggatctggtggaggtggaggaaaccgaaatcgtcgtggaggcagtggtgattctggtggcccagaagatgaatcattcaaggaatcattggatgaactagtccaagttatcttagcaaccgttgcattcattcttgtgtacatccatataatcagaggtgaggagctgtatcgcctcgccagggactacaccagatatcttgttactggcaagcgtactgcgcggttgaaacgtgccatgcaaaaatggcgcaatttctcagagagctttatgcaaagtgaaggctcacaagaagaccagtatgaaagagcagccacctccaaaccaacttggtggcaacagcctcaaaagtttgttcatcttatggaggaactctgccgaggaaattggcgcccgcatgcgcaggagtcttagttcaggtgctcccttgttcctttttggccttctgaagcacatggatgtggcgatgagcagtactgttttcatggctggtgcaatgacctggaatctggatagcgttccttgcccggggcagtgatttgttcttctttgttcgttaatgcgtattttctacgttttgttaagcactaaccaagtgagtaacttcctggcaattttgtagttgatgagatcgcatatataagctagccggcgtctcatgtcatatgcggcaaattgtagattatgttgaagttgaaccggtgtagcttggtttcactgcattttggtttggtttccttagcgttggaatgtaatgggtcacccttgacaacgtggctccaaatgtataatcttcaatggaaaacgagtagtaagtaccgaagcgcttcttcgctgaacacaacatatgaattcttgtcgcgtgtcggactactaggcatc

SEQ ID NO: 32 - DNA, 396 bp, Oryza sativa
  ref <308>: DATABASE ACCESSION NUMBER: AK058233
  ref <309>: DATABASE ENTRY DATE: 2001-12-06
ctgaaaaatctgaaaaaacaaaataaccaatcgagcagaggaatatctatgacaaaggaagctagctagctgacgtgcctgaggcttcacgcatccgttgtgtctcatgaatctgtgtctgtgtcttgaatccgtgtgtctgtgtgtgaggtggtcgctggcgatgcgtgcagtgttttttttttcctatgtaactatgcgcctacgccgatagatcattgaaatatcaaatactagtagtgatagtgttagtggagtcataggcgatctagctagagagatgtctgaaatggtatgaggatgtaatgagagtgttcgctctgtatcctcctctgtaattaagcactatggaagtaagaaaaaaaatggaaagccatgcctttgctgctttctttc

SEQ ID NO: 33 - DNA, 912 bp, Oryza sativa
  ref <308>: DATABASE ACCESSION NUMBER: AK058234
  ref <309>: DATABASE ENTRY DATE: 2001-12-06
tgtttggaagagaacactacctgggacttggttgctgacatcgagaagcttagagaacatcttggcatcccagagtggcaggtgtttggtggttcatggggaagcaccttggctctcgcgtacagcgagagtcaccctgataaggtcactggcattgttctaagaggcattttcttgcttaggaaaaaggaacttgattggttctatgagggtggtgcagcagctattttcccagatgcatgggaaccatttagagattttattcctgaggatgaaaggaattgtttcatagctgcttatagcaaaaggctaacttcctctgatgctgatgtccaggctgaagctgctaagagatggacaatgtgggagatgatgactgcacatcttatccaaaatcatgagaacatcaagcgaggggaagatgataagttctcattggcattcgcaaggattgaaaaccattattttgtgaataagggatttttaccctcagactcgcatctgttagacaatgttgacaagattcgacacattaaagcttttattgtacagggccggtatgatgtttgctgccctatgatgtctgcctgggatcttcataaagcatggcctgaagcagaatttaagatggttccagatgcaggacactccgctaacgaggttggtgttgctgccgaactggtatccgccaacgagaagctcaaaagcatgtttacaaaatgaagcaggtgctctgatttcaaagggtttcatcgcatagctgatgcagaaatccagaagcgttttctctggtttcattagtgttgccagaaatacagaataaacagctcgtagtttgaacagccttgtgggcactgtggtgtgtcaaacgatgtcattataatctcaatcatagtttctggccttgttttg

SEQ ID NO: 34 - DNA, 364 bp, Oryza sativa
  ref <308>: DATABASE ACCESSION NUMBER: AK058235
  ref <309>: DATABASE ENTRY DATE: 2001-12-06
agggattccaaaaatctatcctctcgagcattgcacgggctggtcatgccattgaggagctttatgggtccccacaggatgttgagggtgcagtgaaggaagggaagctatacgtagtacagacaagaccacagatgtaatctatatgtatattttatagccaagtcaatcaggcaatgttgtagagtaagatatacgggccgtgggacatgtataacacgttacgcccttttttttattatttgctttcatactcacaatacactaatttatagggcttattttatcgccaataagtgtaatctgactatgatcataaataagcctcctaggctactgaaaaccattaaaggttattttgatc

SEQ ID NO: 35 - DNA, 277 bp, Oryza sativa
  ref <308>: DATABASE ACCESSION NUMBER: AK058236
  ref <309>: DATABASE ENTRY DATE: 2001-12-06
tgctactgatcttggttgttttatttctttcgaccctaattttcatccgaaataagaatggcgttgtgctcggatctgcaaacttattgttgtgcctggaaggatgtatacccaggtcgtgttgatgtcagttccacatcaatggacgagaccagtgttggaacgagtttttctttacattgtaactcaacatgttaacttcgtttatgcaaagattcgccttaagcgcgatttgtgcgctgtatctttacccttcactaaacattttattgtgtcc

SEQ ID NO: 36 - DNA, 536 bp, Oryza sativa
  ref <308>: DATABASE ACCESSION NUMBER: AK058237
  ref <309>: DATABASE ENTRY DATE: 2001-12-06
atccaccacgccgcctcgagcggcgcaggcgctgcctctcctcgccccgtcgcgcggcgccggcgccggcgcctctcaccgcatccgcccgcgccgccgcctcctctcgccgcagatgtcgccgccgcctcctgtcgccgcagaagtcgccgccgccgccgcctcacgtcggatctgcacgtgccgtctcaccggatctgcgggcgccgcatccctttgttcaccggtgccggcgcctcctcccttcctcccacggtgcacgacctcggcgcagccttctcttctccccacggcaaggtaatggagctactgatagccttgcagtaatgccttctgctcttgcacttacggagaatttggatttttgggactcttactttctgtttgtatgaaatgaatgtaattagttttcagtggcttatcctagctgattgtggtgatgaatatgatgtttaaatgagtaaatcatgtattgtgaatgggtgactgattgtggtgactgaatggatatgatgcaagcaatttttagaacattc

SEQ ID NO: 37 - DNA, 512 bp, Oryza sativa
  ref <308>: DATABASE ACCESSION NUMBER: AK058238
  ref <309>: DATABASE ENTRY DATE: 2001-12-06
atcgtgaagcaactggaagttgaaatgggtcaatctatggagatgggaaccatccatgctggagatttcctgaggcgtttctgttcaactcttgggatgaacaatcaagctgttaaagcagcccaggaagcagttcagcgttcagaggaacttgatataaggaggagtcctatttccattgcggctgctgtcatttacatgataacccaactctcagatgataagaagcctctgaaagacatatccttggctactggtgtggcagaaggtaccatcagaaattcatacaaggatctgtatccctatgcttcaaggctcatcccaaacacctatgccaaggaggaagacctgaagaatctgtgcacaccataggaaatttttttcttttcttttttgtcacataacatggaaattagatttgccagagaggagtaatgttgtccttggatgtgagttttactggcccatgtatcactgcacctaattttatgtgcatggacctggcctactgg

SEQ ID NO: 38 - DNA, 838 bp, Oryza sativa
  ref <308>: DATABASE ACCESSION NUMBER: AK103913
  ref <309>: DATABASE ENTRY DATE: 2002-08-28
aagccagttgagtcgaactgttgaggaatcgctcgctcgctcgctcgctcgccggcggcgcggacgaggagggggcgagatgttcttccacatcgtgctggagcggaacatgcagctgcacccgcggcacttcggcccgcacctccgcgacaagctcgtctccaagctcatcaaggacgtcgagggcacctgcagcgggcggcatgggttcgtggtggcgatcacgggggtggaggatgtcggcaaggggctcatcagggagggcacgggctacgtcaccttcccggccaagtaccagtgcgtcgtcttccgccccttcaagggcgagatcctggaggccgtcgtcaccatggtcaacaagatggggttcttcgcggaggctgggcctgtgcagatcttcgtgtccaaccatttgattcctgatgatatggagttccaatctggggatgtgccaaattatactacttctgatggatcggtgaaaattcagaaagatagtgaggttcggttgaagattattgggacacgtgttgatgcaacagaaattttttgcattggcacaataaaagatgacttcctgggcgttatcagtgatcctggtgcggcagtgtaaattatccggtgacaagattacgcctcttcatgctcttgaacgggaatattccgatgaattgtagtgttaaaatatggaagccccactggaaggggctgtaagtgggttggaacctgtattttcatcactataaatggcgctttaccgagttggcactgttgcttgagtgtgttgtgggattcaactctcaagcagtcatttaactaatcaagctctgaccttttt

SEQ ID NO: 39 - DNA, 238 bp, Oryza sativa
  ref <308>: DATABASE ACCESSION NUMBER: AK058239
  ref <309>: DATABASE ENTRY DATE: 2001-12-06
tatgtgttccaagcctatttggtcaaattctaccttttgggttggctcaagaaagtgaaagatgaaggagattctgaggttaggttgtagcagttggtctgaactgcttcatgtcctcctatcgagcatttctatgtacggatgggtattagcctattaggtgctgcagcagttgtggttgtaagaacaaatgtgatgtgagatgatcagtcaatttgctgctgcattttgagcctct

SEQ ID NO: 40 - DNA, 631 bp, Oryza sativa
  ref <308>: DATABASE ACCESSION NUMBER: AK058240
  ref <309>: DATABASE ENTRY DATE: 2001-12-06
tagaagcccccctgcctcctgcgcctccgccgccgccgccttcttcgtctgctgagttcgtagatcagctcgagctcgccgccatgtcgtccagcgaggtcgcctgcacgctcgccgccctcatcctccacgacgatggcatccccatcacctctgagaagatcgccaccctggtgaaggcggccaacatcaaggtcgaggcctactggcccggtctcttcgccaagctcctcgagcaccgcagcgtcgatgacctcatcctctccgtcggatctggtggtggtgctgctccagttgctgctgctgctgcccctgctgctggcggtggtgctgctgctgccccagctgccgaggagaagaaggaggaggcgaaggaggagagcgacgatgacatgggtttcagcttgttcgactaagcagtccacagatgttagccagtccgcctatgctttgcaagactatcttatgttgtgtcttttaggttcacttaaagtactctcaagttttgagttttgatatggtgttatcgagaatctgtgtctgtgggatgagaacctcaaacctccttggatggtcctattagaatgaaaccgttctacattcttatatctagctcttttattctgtggtc

SEQ ID NO: 41 - DNA, 635 bp, Oryza sativa
  ref <308>: DATABASE ACCESSION NUMBER: AK058241
  ref <309>: DATABASE ENTRY DATE: 2001-12-06
gaaagagaaatgctaaggcgaaaggtacctgtaaccggtttgaagacacccttccgggatggatatgtaagagatctagctgaagaaattctgcagttgtctaagaatggattagaaagaagagggtacaaggaagttggtttcttaagagaggttgatgcagtgatcagttcaggagtgaccccagctgagaggctgctcaatttgtacgagacgaagtggcaacgcagcgtcgatcctgtcttccaggagttgttatactgatgctgagaaacctcttacacagcaaaactggacagtctgtagatgtactcccccatacagaaaaaacctcatatccattctatttcatgcctcggcagctaatgtccgccatccgttcttcttgagcctgaagggggaaaaataaccgccgtgcagcaattcagcttcacggactcaattgtttctgcctcctggaacatttgaggtcggaagcctttgtaggtgctgtctttgttggggccttttacaacttccgatttccctcgtcaacagggagatgggacaaaccactgtttgtaccagaccctcttttgttcctgatgatttttgtatgaaaaataagcccatctggtgcatgatggaaactatat

SEQ ID NO: 42 - DNA, 999 bp, Oryza sativa
  ref <308>: DATABASE ACCESSION NUMBER: AK058242
  ref <309>: DATABASE ENTRY DATE: 2001-12-06
ttctcaagcaacgccaagttgaacagcgtggttggacacatactccactcctccatccttgtcccataccacggctggaggattagccacaggacgcaccaccagaaccacggtcatgtcgagaaagacgagtcctggcaaccgctgtctgagaggctgtacaatagcctggactatatgacgaagaaattgaggttcaccatgccgtttcccatgctggcattcccattatacttgtttgcaaggagtccagggaaaaaaggttcacacttcaacccaagcagtgatctgttccaaccaaatgagaagaaggatgtgataacatcaactgcatcctggctggcaatggttgggattcttgctggtctgacctttgtgatggggcccctcaaaatgttaaagctctatgctgttccatacgtgatatttgttatgtggcttgattttgtcacatatttgcaccatcatggccatgaggacaagcttccttggtaccgtggaaaggagtggagctatctgcgcggaggattgacaacacttgatcgggactacgggtggatcaacaacgtacaccatgacattggaacccatgtcattcatcatcttttcccacaaatcccacattaccatcttgttgaggcgactgaggcagcaaaaccagtgctgggaaaatactacaaagagccagagaaatcagctcccctcccattccacttacttggtgtgctagcaaagagcttaaacagcgaccactatgttagtgacaccggagacgtagtgtactaccaaactgacttgaaaactagttcttctgcacaaagctcggattgacagaacattagtctctagcttatttttcgatttctcaggagcctgggcttaacatctgaccagcctcctgggcgttgagcctagaatttcaaagcattatcattgtaaaggagcatacatgtgtaattctttcgaatgattgaagacggagatcacctctgatgtaac

SEQ ID NO: 43 - DNA, 712 bp, Oryza sativa
  ref <308>: DATABASE ACCESSION NUMBER: AK058243
  ref <309>: DATABASE ENTRY DATE: 2001-12-06
atcacactctcctgcaaaggcacttcacctggaggtgtagtgtgaggagagctttttctttgcaccttttggttttttggagcttcagcaatgggggaggtcaagcatctttgcctggtgaagttcaaggaagaggtcttggtggatgacatcctgcaaggcatgaccaagcttgtctcggagatggacatggtgaaatccttcgagtgggggaaggatgtgttgaaccaggagatgctgacacagggcttcactcatgtcttctcgctgaccttcgcgagctctgaagatctgacgacctacatgagccacgagagacaccaggagttcgccggcacgttcatggcggcgatcgacaaggtcgtcgtcgtcgacttccccgtcgtcgcctccaagcctgcaccaccggcggcaccggcggcggcggcgtgatgatgacgacatcaactgtccatcaagcatccatccgccatggcatcaaccattgcatcattgttccaagtactttcaggtatccatccatccatctacacacgcagatagctgtgatagatgtaccttaggttccattattgcatgtttctgctgcttcagtgttgagctggtgtagcttagctaaagctgtaatgcagctctatcccgtgcattccgttcaaagcttgttcggttattcttggaataaatttcggtgatcttttggttgctgtgactt

SEQ ID NO: 44 - DNA, 690 bp, Oryza sativa
  ref <308>: DATABASE ACCESSION NUMBER: AK058244
  ref <309>: DATABASE ENTRY DATE: 2001-12-06
accttggtgcaaagttcgatccacctgagggattttcactggacgatgaaccagccgtcgaagagaaggatcctgaaccagcaccagcgccagcagcagcaccaccacctccaccagtcgaggagaagaaggaagctgaaccaactccagtaccagtaacggtaggagcagcagtggcatcatcgccagcggatgacaacgacggtgcagcaccgcaaccagagcccttcgtcgctgcgaaatactcctacggaaagaaggagctgtcggactcgatgaagcagaagatcagggcggagtacgagggattcggaggcagcccggacaagcctctgcagtccaactacttcctcaacatcatgctcttgatcggagggctggccttcttgacgtctctgctcgggagctgagagcgatggtctgatgacctcctctgacgagtgttttgagttgttctgcctgtgctaagatttgcgtgtttctctttccatgttttgagtcgttattccgtaaataaattgaggtaaaaggatgggcatgtgaatggattccagtactttctgaacttcttgagtaattcctctagagaaatatttgtcggagagaaatgtcacattatctagttgtcatggctcatgactacattctctatactgagggaaattatgacattctctaaactaaggaggg

SEQ ID NO: 45 - DNA, 691 bp, Oryza sativa
  ref <308>: DATABASE ACCESSION NUMBER: AK058245
  ref <309>: DATABASE ENTRY DATE: 2001-12-06
aaaaaaccctagccgcctctgcgccgccacacacccccaaccaagcttccaccagcgcgaagcggcggcgagagggcgagatggcgcgcggcgtggcggtggcggcgaagggcggcgcgggcggcaagaagaagggctccgtctcgttcgtgatcgactgctccaagcccgtggaggacaagatcatggagatcgcgtcgctggagaagttcctgcaggagcgcatcaaggtcgccggcggcaaggccgggaacctcggcgactccgtcaccgtcacgcgcgacaagaccaaggtcaccgtcacctccgacggggccttctccaagaggtatctgaagtacttgaccaagaagtacttgaagaagcacaatgtgcgggactggctacgtgttattgcggctaacaaggaccgcaatgtctatgagctcagatacttcaacattgctgagaacgagggcgaggaggaagactagagtgtattccacatatatcttagttttggagttgttgaattttgatacttcatcttagtacctctagttattcaatccatgttatgttatgctgtggtcaacttggatggttaatttgaagaatccttatatttggtcgcctcaacttcaagagtgcctactgctaatgatgacttgtgaacctagaaaagcagtatggtgacttcttatcatgtttt

SEQ ID NO: 46 - DNA, 581 bp, Oryza sativa
  ref <308>: DATABASE ACCESSION NUMBER: AK058246
  ref <309>: DATABASE ENTRY DATE: 2001-12-06
aagatacaccattcagtagttggactccggtcctgcatttctgaaggcgcaataatagaggactcattactcatgggagctgactactacgagactgaagcagacaagaaactccttggtgaaaaaggtggcattcccattggtattgggaagaattgccacattagaagggcaatcatcgacaagaatgctcgtattggagataatgtgaagataatcaatgttgacaatgtccaagaagctgcaagagagactgatggatactttatcaaaagtggcattgttaccgtgatcaaggatgctttgctccctagcggaacagttatatgaagtagctgcgtaatatgtgatggggcatcggcgacgagcaccaggcgggcattataagaagaataaaagcagttcaaggcactctattccctttttttttcttctgttcttcctctattgtgttaggataaatgtaatggtagaagcaactgtttttcagatgttttgggagtgaatgataccgtgcttgaattttccatgttttgctttgcctctgcttgaaaatgaatccagcaatcccatgtgtttct

SEQ ID NO: 47 - DNA, 521 bp, Oryza sativa
  ref <308>: DATABASE ACCESSION NUMBER: AK058247
  ref <309>: DATABASE ENTRY DATE: 2001-12-06
acgcacgcggacgcggtgatgcgcgagacgacgcgcgcgcggcgctagctcacacggcacggcacggcaacggcagagaatctcttcgcggctcgcgggacgggacgcgtcgccccggcgatctgatcgccaacccaacccaacccgccacgcccacgcgcacactccccgcgcgcgcgcccgcggctggctggctcgcagcgcacgtacgtggccacccgcgctctcgcgtcgttgatagacagggcgcgcgcggcgccaacaccggccacgccgtcatcgcggggatcaagcagaacacatgtttgatacggctgttttatcgtttccgattaagatacatattttatcacggttttcactttgtgtgagggctatttatttcgtgcttaagatacatattttatcttggttttcttttttcaaatggtttgataggggtgttcaattctagatacatattttattccggttttcgtttttgatacggttaaacgttgtatttcctgggaaaaaattat

SEQ ID NO: 48 - DNA, 719 bp, Oryza sativa
  ref <308>: DATABASE ACCESSION NUMBER: AK058248
  ref <309>: DATABASE ENTRY DATE: 2001-12-06
ctcgccgccgccaccgctcgccgctcctctctcgccgccgccgccgccgccgccgcagcgaggaatctccggcgaggacaccaccgacgcaagcatggccgacacgaagacggcgccggcggtgacgctccgcacccgcaagttcatgacgaaccgcctcctctcccgcaagcagttcgtgctcgaggtgctccacccgggccgcgccaacgtctccaaggcggatctgaaggagaagctggcgaagctgtacgaggtgaaggactccaactgcatcttcgtgttcaagttccgcacccacctcggaggaggcaagtccaccggattcggactcatctacgacaacctcgacgccgccaagaagtacgagcccaagtacaggctcatcaggaatggcctcgccaccaaggttgagaagtctcgcaagcagatgaaggagaggaagaacagagcaaagaagatccgtggtgtgaagaagacaaaggctggagatgcaggcaagaagaagtaagcaatggtgttgaattgacataccaccttagctgccttaagttctccgcccactatcaatttttgtaccccttagcgcatctccttgtcgctattcgcagaatatggattgatctgctagaaaaaaaagttttttgagcattttgacatatgcccccctgttacattacattgctgcgtttactgtgacttggctttgatcaacatac

SEQ ID NO: 49 - DNA, 823 bp, Oryza sativa
  ref <308>: DATABASE ACCESSION NUMBER: AK058249
  ref <309>: DATABASE ENTRY DATE: 2001-12-06
atgctatcttcgtgttcggagcgtgggcgggcctttctcacggtggtgtgctcgtaggacttgccgcttgcggtgtcatgatgagcatcgtgtcgactgcctctgacctgatgcaagacttcaagactggatacttgactctggcatcaccgaggtccatgtttatcagccaggtgatcggcaccgggatgggctgtgtcatagctccctgtgtcttctggctcttctacaaggccttcagcaatattggcacaagcggcaccgagtacccggcgccatatgccatcgtgtaccgcaacatggccatcctgggtgtcgatggcttcaactcgcttccggagaactgcctcactctctgctacatcttcttcgccgcggcgatcgccatcaacctgatcagagacctggcgccgcacaaggtctccaggttcatcccgctccccatggcaatggcgatccctttctacattggatcgtacttcgcgatcgatatgttcctgggcagcgtgatcctctttgtgtgggagaagctgaacaaggccaaggcggatgcgtttggacctgcggtggcgtcagggttgatctgcggtgatgggatctggactcttccccagtccattcttgcccttgccaaggtgaagccccccatttgcatgaaatttttgtcgagggcagccaatgccaaagtggatagcttccttgccggttagtcgtgccatcgtgatcaattgatctttgaagagaacatttgcaaggagtgcgcgccatcctgtaattatctcctccaaatgtatttccagatcacttgttttgtagaaaagcc

SEQ ID NO: 50 - DNA, 553 bp, Oryza sativa
  ref <308>: DATABASE ACCESSION NUMBER: AK058250
  ref <309>: DATABASE ENTRY DATE: 2001-12-06
aatatctgccaagattcgatttttgattgattagttcagcccctgctgctcccagtgactgctgcatgttttaaagtttcagccttgtctgaagaattaccaatctgttgatgatacccatacacatgttctgagggagattttgggacaattttgaattaattagtttctttttttctattctgatgtttctgaatttgcaagattgtttttggttagtgttcgtctctgatgatgattaaaaatgattaactttcgttcttctgatgcgcttttctcatggcgcggtgcggaagcaatctggagacctgaactgaggagacaaatcgattaggtttcttttcaagttatttttggcagcgcagatatgtttttgttttttttttgttgcttcacgactggaagaatggccgatgatattggtttggtcatcctgtagagagaagcatagattgaatttggaccagaattaaacagcatggcgcttactaacccgcgtcaatgttacctgtctcctggcacattttgatttataaaatcgatttgaattttt

SEQ ID NO: 51 - DNA, 1343 bp, Oryza sativa
  ref <308>: DATABASE ACCESSION NUMBER: AK058251
  ref <309>: DATABASE ENTRY DATE: 2001-12-06
gaaaactcttaaggaggttgttgtgccgattacaggtcctcttatccgtattcttggagatcgatttccgtggcaagtcaagtcagctatcctatcaactctgactatcatcatttctaaaggggggcttgcacttaagcctttccttccacaacttcagactacatttgtcaagtgtctgcaggataacaatagatctgttcgaacaagggctgcatctgctcttggaaagcttagtgcacttagcacgcgagtggatcctttagttagcgatctgttgtccatgttgcagtcaggggatgatgcagtcaaagaaagcgtactttctgcacttaaaggtgttgtcaggcatgctggcaaaagtgttagccctgtagtcagatctcgcgggtgtgatcttctcaaagatctacttcaggctgatgctgatgacgtccgcagttctgcggcaaaggcaattggtacattatgtcagtacatggaggagaacgagacttctgacctggtgcaaaccttgttgaatatgggaaccttaccagactggtgtaccaggcatggtgctttgttaacattctgttcgatatcgatgcattgttcatctaagttgtgccgttcgatgtcatttccttctattgttgatcttctgaaagattctctgaaagatgacaagttccctgttcgtgaagcctcgacaaaaactttggggaggctactctgttaccagttgcagtctgaagctagcaccttgcaacttatccagttacttgccttggcattgcgcgatgattcaagtgaagttcgaaggagatctttgtctcgtctcaaagctgctgcaaagataaataacccagcccttgctacgcatctctcaatattgggcccagcaatagctgaagctttgaaggatacgaacacgcctgtgcgtgtagcagcagagcgttgtgcccttcatgttttccagttgacaaaaggagcagacaatgttacaattgctcaaaagcacctgaacatgacaggtttggaagtaaggaaaattgcaaaacttccagaggagagtgatggcagtgagagcagtgacgatgacaagaggaaataaaacgcattactcactgcagccactcggaccaaattttgcttctgtttgttgtccacccatatatgatcttttcttcatagttgtggaaatatggtcatttttctcctcctggccattggtataaacacccttttttgacaaaatacagtagcagaggaagacagttcggcgttgttcatattcttcttactagaaatcaacgttgttcataatacaatgatagtgttaatgaagattaattaatccc

SEQ ID NO: 52 - DNA, 424 bp, Oryza sativa
  ref <308>: DATABASE ACCESSION NUMBER: AK058252
  ref <309>: DATABASE ENTRY DATE: 2001-12-06
tgtaattgctgtaaatgttcatatttcatactttcctggaaacaattttccttggcattggcagttgctttgctagattttcttagctgtcagggactcaggcatgcttctaatttgcttgggagggtatgactggagatggaaacggtataggtcctgggcctcaagaaacatctgaagccgctgtaattaggttcagtttgtttgtttttagtttcttatgacagaccaattttctctttttggagcacatctgcagccttacatatgatttagatgtaacatgtattttatgtggaaacgttacatctgtttgcccatgtaactctagtggactatcctgggggatgacactcgatctgcagttcctgaatgcctgtaaagcgcattctggtgtatccatcggtgccttgcaatggttaag

SEQ ID NO: 53 - DNA, 967 bp, Oryza sativa
  ref <308>: DATABASE ACCESSION NUMBER: AK058253
  ref <309>: DATABASE ENTRY DATE: 2001-12-06
catgctcgcgttgctccaacgcagggtattagggatggtgtcaacaggagatgaacctgagactcagactccactaaaagctagcattgcaagcatccctccataccagaagccgctaaaacaatctgtccgtccaccgttaatcccaaatgaggatgaatctgagaaacaagaggttgaagaggggttctttacctcaatcggtaaactcatcgtgggagccaaatcgtctgttgcagagatagttggtgcagccttttctagaaagaagcgtttaaacattcatcagcagcaggctagagtacgctcttggccggttcaagaaagctacgccatcccgcgggatgagacgcctccaccactggatacaagaactccaaccccacgcaagaactatgctttcatgtcaaaggagcccgaaaagatccaccacatccggcatggtcggtctcagttcaatggttggaacggagacgcacctcagcagcagcagcaacagcagcagcagcagcaaatacatcaccagcagtacttacagcatcataggcagtattcatcaggaccgcaaactttctatgagccaagctgtgaggcaacaaacgagattgtctttggagccgtgcaggaggtagacagcaagcgccgcgctgtggagatcaaacccatgaaccatggcgatccgcagtatgaccaagatgggttgcggcaccgcagcagctacaccggttacagcaacaactggtaaatggccagatgtccttttttgcagctacatgattagatttactgctcgttaagttattttgccgtcgtcgaatttgtactgcctgaaacagataaatagaaattcaggaagtaccggtgatatgggcaaagtcgaaagctggtttttgctggatgaacgtcgtgatcttagacctctactgatatatatatctatgcaaatggaatgtgtttttcgcgtctg

SEQ ID NO: 54 - DNA, 769 bp, Oryza sativa
  ref <308>: DATABASE ACCESSION NUMBER: AK058254
  ref <309>: DATABASE ENTRY DATE: 2001-12-06
ggttttgcaatgtccaacccaactactaaagccgaatgtactcctgaagatgtattcaaatatgttggagacaatgcagtatttgccagtggaagccctttcagtaatgtcactttaggcaatggtagacaagggtacgctaatcaagcaaacaatatgtatctgtttcctggtatcggtttaggagcccttctttcaggtgctcggcatattacagatggcatgctccaatcagcagctgagtgccttgcgtcatacatcacagacgatgaaattcgaaaaggcatcctctttccatcaatctcaagtatcaggcacatcaccgcacgtgtcggcgccgcagtcgtccgtgccgctgttgatgaagatctggccgaggggcgttgtgatgtagacgctagggacctcaagagcatgactgaggcggacacagtcgactttgtggctcggaagatgtggtaccctatttacagccccctcgtgaacgataagtgaagctcgatgaagtgaaaaatctgacgttgcatgaaccagatgtagcacctgaacaactatcagtcacatatttgttcagacttattttttttgttgctattttcatttagctgcgctactggagggtaattcagcagataccgatgcccacgtctatggctatgttatcacgccacgccatttttttgttctgttttgacagcttccgtcatcaaacgttgctcaatttcaagattagttgagctacataaatttacatctcgtgctttactac

SEQ ID NO: 55 - DNA, 339 bp, Oryza sativa
  ref <308>: DATABASE ACCESSION NUMBER: AK058255
  ref <309>: DATABASE ENTRY DATE: 2001-12-06
ggtagagctcttgaagaaagtcagataggtactgtgatttctatggtgccgccttaccctgcatccgttgtcagtattttgtcattcatacgagtatagcgcaacttttgtcgcattaaatgtattgtgtgtacctccattttttgccatatgtgctataggttagtcgttcttttgtggagagctatgaatctagactgtaaggttggaactttagctgtggcttcttcatgagatgagattgagataattaaatcatgtttatacgatcttcagttgtaacatgcaacgttctacgtagtcagaattgcagtggagtactggctttatgccccaagt

SEQ ID NO: 56 - DNA, 339 bp, Oryza sativa
  ref <308>: DATABASE ACCESSION NUMBER: AK058256
  ref <309>: DATABASE ENTRY DATE: 2001-12-06
agggtttcctctccgccgcgccgcctccctcgtacctcgtcgcggatctgtgctcgcaccaccggcggcgccatgagtaagttgcagagtgatgctctgagagaagcgatctctcaaattgctaatgactctcgtgagaagcagcgcaaatttgtggaaaccattgagctgcagattggactgaagaactatgaccctcaaaaggataagcgtttcagtggttctgttaagctgccccacatccctcggcctaagttgaaggtttgcatgcttggtgatgctcagcacgtcgaagaggcagagaaaatgggcctagactatatggatgtggaagccctc

SEQ ID NO: 57 - DNA, 457 bp, Oryza sativa
  ref <308>: DATABASE ACCESSION NUMBER: AK058257
  ref <309>: DATABASE ENTRY DATE: 2001-12-06
atcacggagaccgagccacgagcagctcgaagatgcggtgtggctggcgagcttgaaggccagcagtggcgcggggatggctgcaactgcggcatcatggccggcatccttagctttccaatctgccttggcaattgcagtgatgatcctgcttgcccagcaggagcatcccgtattattcagctagtagcaagtgagaaggattcttgatcggtagtaggagtgatcaaaagggggagacgtggagagcacattctttaggactttttgtttgtggatagagaatgcaggcgtcctcaacctcaagtttggcagttgtagttgctgctcagcttaagtgtttgctttgctttatttgcctttcagaaaaccttgctattctagttacattctttgctgtgcttaattttttgggggtcctgatcaatgtggactccagatgcactgctctgaatct

SEQ ID NO: 58 - DNA, 629 bp, Oryza sativa
  ref <308>: DATABASE ACCESSION NUMBER: AK058258
  ref <309>: DATABASE ENTRY DATE: 2001-12-06
ttcttgtgtgataatggcgttagcagcaatctacagccttttcatcattaacaaatctggcggccttatatactacaaggactatggctcagcagggaggacggacaccaatgacagtctacgcttggcaagtctttggcattccatgcatgctatctcccagcagctgtcccctacacctggctgtgaaggcattgaccttctacaagcccacaactttgatctccattgcttccagtccctcacagggacaaagttttttgctgtatgcgaaactggtgctcaaaatatcgagactctactgaaagtcatatacgagctctacacggattttgttctgaaaaatccattctacgagatggagatgccaattcgttgtgagctttttgatctcaacctggctcaggtcattcagaaggaccgcgtcacacttctgggtcgatgaatcatttagaaaacatgacgcaccatgtctttgtatgtggcttatatgacatgtatggtgtcagtagggtacttggaattcaggcaagtcattacactgcatcacaaagtccatatacagtgtgcagtcgattccttctagttctgaaaattactttattcctgaagtatcatttgtgccattt

SEQ ID NO: 59 - DNA, 321 bp, Oryza sativa
  ref <308>: DATABASE ACCESSION NUMBER: AK058259
  ref <309>: DATABASE ENTRY DATE: 2001-12-06
gatgtgctattattggttgtttaaactgattcttttggtaccaggacaattttggcgagtgaaatctctagccaggtcgagttaattgctggttgctatatatattatgttacgatgggataggatgagggatggttgttaggttgagcgggagctgcaaaggctggtaccattatttgtataggttgtgtgataaaaaagcttgtagacattttgcatgtacactttgccgtagtggttggcgttggcagccataaacaggaacgccattgtctgtatgttacttgtttacggtctcatgtccagctgtttgaattttgt

SEQ ID NO: 60 - DNA, 219 bp, Oryza sativa
  ref <308>: DATABASE ACCESSION NUMBER: AK058260
  ref <309>: DATABASE ENTRY DATE: 2001-12-06
agatagctagtggttggatgtattttctcagttgtttgttttcgtttaatttcatgtacagggcagctattgcagtctcatgtgaaaaagggaacatttattatgtacagacatgatgttttggggtctttattcggattcggcggtgaaattgtaacatttttgtgcctgtggtacttggctagtactcatgtataagaggcttacccatttgacatt

SEQ ID NO: 61 - DNA, 283 bp, Oryza sativa
  ref <308>: DATABASE ACCESSION NUMBER: AK058261
  ref <309>: DATABASE ENTRY DATE: 2001-12-06
gaaaatagctgtagagaaatggaaactgggctgtttttatccgtgccccctaatatgagaaactatgcctccctcagatttttttggctagactaacagaaatatgagaatagcccatatcattgacattagatgcagagcatgggaaatgccaatgtggattggcttgtgtgtaacaactgacaaacatgtgctgtgcaattgtgaatactggagttgtacaagtggtatactgtaatactgttatagcatagcatcagaatacaaagacagaaatgaacac

SEQ ID NO: 62 - DNA, 1384 bp, Oryza sativa
  ref <308>: DATABASE ACCESSION NUMBER: AK103914
  ref <309>: DATABASE ENTRY DATE: 2002-08-28
gaacattttctttggttgagcttgaagctgccactgacaactttgagaactctttgctactggggcaagattctttcggcgagatgtacagggggagactaggcaatggcacactagtggccatcaggagcctgaaggttaagaggaatcagtcttccctaagcttcagtcgccacattgaaacaatttctaggctcagacaccggaacttggtcagcgctctcgggcactgcttcgagtatgatcttgatgattctactgtcactcagctgtacctcgtgttcgaatacgtgcaaaacgggaacctacggagcaggatttcgcaaggaactgaaggaaggaagcttacatgggcacagagaatatcagctgccatcggcatcgccaacggcattcagttcttgcatgctgggatgatgcctggcctgtttggaaacaatctgaagatcaacaacattcttctcgatcagaatcatgtcgcgaagatcagcagctacaatatcccaatcctaggagaggccatgaaatctgagaagggaggacctggaggcaagcaccatactgaaagcccactgctcaacgataaaaccgacatcttcgatttcggggtgatccttcttgagatcgtgtctggaaagccaatcacatccttatatgaggttgagataatgaaagaactgatgctatgggcagtcgccgacgaggatttggtgaggaggaggagctttgccgaccaggaggtgagcaagggatgctctgacgagtcgctgaggacgatcatgcagatctgcctgaggtgcctggccaaggaggctgtgcagcggccgtccatcgaggacgtcctctggaacctgcagttcgctgcacaggtgcaggacgactgggaaggagataaccggagcagcgacggttcaatggtgtcgtcgtcgtcccggatcacgaaatcctccagattccagaatgagcaaaccaggtctgggcgggaaaaagaatgtgaggattcgtcagctcgtggatcagtgtggctgcaggctgcaacagaagatggaaattttgagacaggcaggaggcaagctgaagatgaaagatattgatggaactgatcctccgggttgtgcttctgtcttgatgcacacaaccttcccctttcctgatcgtgtttgctcactgaatcctttaaatctcagaaacgccttcatttgttttttcttcttttctttcttttttgtctttaggcgtacaataatatgtgctttttaggcgtacaaataatgttgtgctgtgcaagcccctgtatcgttctgtcaatattaaagctggaatagtttctactaccaacggtcagagttccgtgataattataaaaacagctgcggttgctgcc

SEQ ID NO: 63 - DNA, 508 bp, Oryza sativa
  ref <308>: DATABASE ACCESSION NUMBER: AK058262
  ref <309>: DATABASE ENTRY DATE: 2001-12-06
gatcgtcttctccacctgcgccgcagcctcctcaactcaactctcttcggcagcgagcagcagcgccttccaccatgccgaagcagatccacgagatcaaggacttcctcctgacggcgaggaggaaggacgcgaggtcggtgcggatcaagaggaccaaggacgccgtcaagttcaaggtgcgctgctccaagtacctctacaccctctgcgtcttcgacgccgacaaggccgacaagctcaagcagtcgcttcccccgggtttgactgtccaggaggtttaagcatcaaagccagaccatgctgtttgtagcagcaggattgcttgctcccgttcgcattagtagctattagatgctgaaattttatctgtcttgagttttgaatgtaacacccaaagtttatgtgctgaaccttcttcgagtcagattgcgctgttactcctttctggagatagctaccagtcgtactgtccctaaacacactgaattttgctccatttctctct

SEQ ID NO: 64 - DNA, 730 bp, Oryza sativa
  ref <308>: DATABASE ACCESSION NUMBER: AK058263
  ref <309>: DATABASE ENTRY DATE: 2001-12-06
ttgcttatgggaaggagggagaagcaacagaatcagaaatcattgaagcagccaaattggcaaatgcccacaagttcattagttcctcgcatcagggttatggcacaacagttggagagcggggagctcagttgtctggaggccaaaagcagcgtatcgcgatcgctcgtgcgattgtgaaggatcccaagatccttctgctggatgaagcaaccagtgcgctggatgctgaatccgaaagggtggttcaagacgcgctggacagagtgatggtcaaccggacaaccgtgatcgttgctcaccgtttgtctacaatacaaaatgcggatttgatcgcagtcgtcaagaatggagtgatcatcgagaagggaaagcacgataccttgatgaacatcaaggatggcgcctacgcctccctcgtcgcccttcattcggcagcttcttcatagccgccggtagtaaggctcctgcaagtgtctgctgaacatatattaacagaactggcacacacactgcaataattctgcaggtgctagtctttgttcctcttttgatggcatacataactgcttatagccaagagggaaaggctatacagatagtaaggaccaaatgtaaatgcaacaagttggtccttaacatatatattaattcatatatatatatgtaacacggatcatagatacccaaatagatgatgattatgattacctctcatgtgtttgctctt

SEQ ID NO: 65 - DNA, 2167 bp, Oryza sativa
  ref <308>: DATABASE ACCESSION NUMBER: AK103915
  ref <309>: DATABASE ENTRY DATE: 2002-08-28
accacctcactcgtgttagctcggatctgtagcaaagagcgaagagcgaagctgcagcctgcagctacgcttgttcgcttgagacctagggtacgagcaacaataatagagagtgactgagtgagcgagcactgagtagcaagggcccggcacaaacaggacgcagccggcaacgtgtacgtcgaaccaaacagagaacagctagctaatcgatcggtcgccatgaccaaggacgacgccgtcccggtggccgtggcgccggcgaagcgcccgcccatcaacaagtacgccttcggctgcgctctcctcgcctccatgaactccgtcctcctcggctatgatatctcggtgatgagcggcgcgcagatattcatgaaggaggatttgaagatcaccgacacgcagatcgagatcctcgccggcgtcatcaacatctactcgctgttcggctcgctggcggcgggcatgacgtccgactggctgggccggcggtacaccatggtgctcgccgccgccatcttcttcacgggcgcgctcctcatgggcctcgccccgaactacgcgttcctcatggccggccgcttcgtggccggcatcggcgtcggctacgcgctcatgatcgcgcccgtgtacaccgccgaggtggcgccgacgtcggcgcgcggcttcctcacctcgttcccggaggtgttcaacaacagcggcatcctcctcggctacgtctccaacttcgccttcgcgcgcctccccgtccacctgagctggcgcgccatgttcctcgtcggcgccgtgccgcccatcttcctcggcatcgccgtcctcgccatgccggagtcgccccggtggctcgtcatgcggggccgcatcgaggacgcgcgccgcgtgctcctcaagacctccgactcgcccgacgaggccgaggaccggctcctcgacatcaagaaagccgtcggcatccccgaggacgcgtccgatggcgaggacgtggtcgccatcgtccgcgcgaacaaggcctcacagggagagggggtgtggaaggagctgctgctcaacccgacgaggcccgtccgccgcatgctcgtcgccgggctcggcctgatgttcatccagcaagccaccggcgtcgactgcgtcgtgatgtacagcccgcgggtgttcgagcgcgccggcattaagtcgaagacgaactcgctgggggcgtccatggcggtgggcgtttgcaagaccttcttcatcccgatcgcgacgctcctcctcgaccgcgtcggacggaggccgctcctcctcgccagcggcggcggcatggccatcttcctcttcaccctggccacgtccctgctcatgatggaccggcggccggagggcgaggcgaaggcgctaggcgccataagcatcgccgcgatgctgtcgttcgtggcgtcgttcgcctcggggctgggccccgtcgcgtgggtgtacacgtcggggatctacccggtgcggctgcgtgcgcaggcggcggccatcgggacggggctgaaccggctgatgagcggtgccaccaccatgtccttcctctcgctctccaacgccatcaccatcgccgggagcttctacctgtacgcgtccatcgccgccgcagggtgggtgttcatgtacttcttcctgccggagaccaagggcaagagcctggaggacaccgtgaagctcttcggcaaggacacagacgacgacgatgacgtcgacactagccgccatgagcgcaagaggtccactgagctgagcgctcagcactgaacagaacacgtccgtcccgagtccgagtgtggtcgaagcctattcgttctccgatagaaaaaagcttcgacatcgtgtgttgctttgtgaatcttcagattctggccacttaggttagattgctagacttttggatctcgtgcacatcagcttgttggccttagccaacatgtagggacattgagctgctttacgggggaaaagatcgtgtgatattccacactgcagggacgagtccacgtaaaaaggtcgcagtcaccgttgcggttacgcagcttggcacggatctgtgggtctttttcaccctgtacaacaattcaaccggccaatccttcgacgacagcattgagatccagggagccagggtctacctggctatgttttcttgttc

SEQ ID NO: 66 - DNA, 434 bp, Oryza sativa
  ref <308>: DATABASE ACCESSION NUMBER: AK058264
  ref <309>: DATABASE ENTRY DATE: 2001-12-06
gatgacaattctgcttctagccaaatcttttggttgttaaaagagagtgagctaacaccaagcaatgccaatatactggatgggcggtatgccgtatttggatatgtcaccgagaacgaggactacttggcagacctcaaggttggggatgtcattgaatcgattcaagttgtctcaggcttagacaacctcgccaacccaagctataagattgtaggataaaatgtttctttttttcaggagttccttgataggcaattattttaccatattgaaatcagtgtaaagtgctataatctctaaccctcatctcatgaccttctatgttttgtgagttttgcaatatgcgggattcaatattacttgaaagtaaagacgttcatcatttgtctcttgccatatgacctaaaactgaatatcaaccgttttgtctg

SEQ ID NO: 67 - DNA, 1122 bp, Oryza sativa
  ref <308>: DATABASE ACCESSION NUMBER: AK103916
  ref <309>: DATABASE ENTRY DATE: 2002-08-28
gtgctcagtttcactcttatcagtgaattagatcatatacttgtgtccttgacagctcgttaattagcatggctaggtctctcgctgctctccttctccttctggtcgcagccgcgggagccagccatgccgcgtcgccggcggagatgtactggaagatcgcgctcccgacctcgccgatgcccggcgccattcgcgacctcatcagcccggcgagctcagcggcctcagcttcgaaggataaggaggatacggtgggctccgtgttcttcctcgagaaggacctcttcccgggctccaagatggcgctccacttcacccgcgccaccgccggcgccgcgctgctccctcgcggccgcgccgactccgtcccgttcgcctccgaaaagctcccggagatcctctcccagctctccatccccgccggctcgccgaccgccgacgccatgcggtccacgctcgccgtgtgcgaggccgcgcggatcgccagcgagacggcgcccaagcacaagcactactgcgccacgtcgctcgagtccatggtcgagctcgtcgcctccagcctcggcacccgcgacgtccacgccgtgtccacggaggtggtcaacagggccgggccgacgccgaggcaggcgtacagggtggaggccgtgaggcccgtgccggtgcccgggggcgacatggtggcatgccacaggatgccctacgcgtacgccgtgttcggggtgcacgggatcaagggcgcggcgtacacggtgacgctggccggcgccgacgggaccatggcggaggcggtggcggcgtgccacggggacgtggacgggcacggcgtggcggtggcggaggcgtacaagaggctcggcgtggcgcccgggaaggtggcagtctgccacttcctgcctcaggacgacatgctctgggtgcgcaactgaatgaagcagctacctgcgcgccatccatggctaattaagctccttcctatattttcgatctacctgccggctggctatcatgttatcatcgcgtgtgtgtgcgcgccgatccgacatgcccacactacacgtcgacactacacgtgttttattttgttaattaataagtctggacaaccaggtcatcttg

SEQ ID NO: 68 - DNA, 1157 bp, Oryza sativa
  ref <308>: DATABASE ACCESSION NUMBER: AK058265
  ref <309>: DATABASE ENTRY DATE: 2001-12-06
aacaatgattgttggagaagtagctaactttgcagcatatgcctttgctcctgctatcttagtaaccccacttggtgcgctaagcatcatcatcagtgctgttcttgcagatattatgttgaaggagaagcttcacatatttggtatacttggttgtgtcctctgtgttgtgggttcaacaaccattgtgcttcatgcgccgcaggagcgtgaaattgattctgtagctgaagtgtgggctcttgctactgaaccagcctttctattttatgcagtcactgtgcttgctgcgacttttgtgctcatattccgctttatcccccaatatggtcagacacacattatggtgtatattggtgtttgttctcttgtagggtctctctcggtcatgagtgtgaaagcacttggaatagccttgaaactgactttttcaggaatgaaccagctaatctatccacagacatggatgttcaccattgttgttgttgcatgtatactaactcagatgaactatctaaacaaggctcttgacacattcaatactgcagttgtttcgcctatatattatacaatgtttacatcactaaccattttggctagtgtgataatgttcaaggactgggatcgtcaaaatccaactcaaattgtgacagagatgtgtggttttgttaccatcctttctgggacgtttcttcttcacaagacgaaagatatggtcgatggactcccaccaactctacctatccgaataccgaaacatgatgaagatggctatgcggctgaaggcatccccctcaggtctgctgctgaaggcctccctcttaggtcaccaagagcagcagaatgattttgaccagcgaactgcaagcaatcccagccattctttcattccatacaaattgtagatgtactttaggtcttataaggtaaaagctcggctcccctgtaatttttgagacatcggtacagattggggatagataccccttatacatctcaagatacccagaataggttagaatcaaaaaggttttttggatgtaaatcccgggtgatggtctgatagatgcatatgccgttctttggaactgttgtattctttgaaatgaacaattagaagtaggaagagcaactccaagaagataccattgctgatt

SEQ ID NO: 69 - DNA, 1380 bp, Oryza sativa
  ref <308>: DATABASE ACCESSION NUMBER: AK103917
  ref <309>: DATABASE ENTRY DATE: 2002-08-28
tcatgagaaaaagtttggcgccggattcataattgcagttgctgttgggggcttcgcagtactgatgtttgttgtggttgtgttggttgtgtgtaattcaaagaggaaaggcaagaaagagagtggtgtggactacaagggtaagggcactggtgtcagaagtgagaagccaaaacaggagttcagtagtggcgttcagatcgccgagaaaaacaagttggttttcttggagggttgctcctataccttcgatttggaggatctactgagagcttctgcagaagtccttggcaagggaagttatggaactgcttacaaagctatacttgaggatggtaccgttgttgttgtcaagagactaaaagatgtcgtggcaggaaaaaaagagtttgagcaacagatggaactaattggtaggttaggtaaacatgcaaacttagtcccacttcgtgcttactactattctaaggacgagaagctcatcgtctacgattatctcaccaatggcagtttctcaaccaagttacatggtatcaggggtgttactgaaaagacaccattagactggagcaccagagtgaagataatccttggaacagcatacggcattgcacacgttcatgcagaaggtggcgccaagctcacccatggcaatattaagtctacaaatatcctcctcgatcaagattacagttcttatgtttcagactatggtctaactgccctgatgagtgttccagccaatgcatctcgcgttgtggtcggttatcgcgctcctgagaccatcgagaaccgcaagatcacccagaaatccgacgtctacagcttcggcgtcctcctcatggagatgcttaccggtaaagctccactccagtcgcagggcaatgacgatgtcgtcgacctaccaagatgggtgcactcggtggtcagagaggagtggacagccgaggtgttcgacgtcgagctgatcaagcagcaaaacatcgaggaggagcttgttcagatgctccagatagcaatggcttgcacatcaaggtctccagatcgacgcccatcgatggaggatgtgatcaggatgatcgagggactgcgccattctgcttcagagagccgagcttcctctgatgaaaagatgaaggactccaatccaccaccggtttagttatgtgctcctgtgttcatatgcctcaccaagctgcgagttgcagatcatttgattcttagctaatttgtgattgagttcatgctaaacatggtcgacattagatgcagcctcagaaagctgagcatattctgattggaacttatgagtcttgaattcttgattcttgacaagtgtaggatttttttctctgggaattttgattgttggaattgtgc

SEQ ID NO: 70 - DNA, 743 bp, Oryza sativa
  ref <308>: DATABASE ACCESSION NUMBER: AK058266
  ref <309>: DATABASE ENTRY DATE: 2001-12-06
acacataggagatagaaaaggtgacacaacccacagaaacccaaaccccccaaaaaagccatggccatgtctcctctcaccaccatcctcctcctcgccgccgccgtcggcgccacctgcgccacctccgccaccgcctcggccgcgccgctccacggcatagcgaacgacctcctcccggagtacggcctcccgcgggggctgatcccggagacgatcgcgtcctacaccttcgacaacgacacgggggacttcgagatccggctgacgagcacctgctacatctggttcggctcccacctcgcctacttcgaggacgccatccgcggccggatcgcgtacggcaccatcacggggctctccgggatccaggcgcagaagttcttcgtctgggtctccatcaccaccatcgtcgcccaccccgaccagggcaccgccgagttccgggcggggttcatctccgaggcgctgccggagtcggacttcgccgaggtccccgtctgcggcgccggcgcgcggctccgcggcgccgccgggctcgcacgccagctcggcctgcagctccccaccgtcgccgaggtatagcttattagcttgtgtgtatgagttgctccatggctttcacttttcacatggtgacatacgcatgtgtgtgcccatgcttggttgcccatgtcaatcatttattttccaagcgaggtcctcatttccggcaataaaatccatcaaaattttcgttctgt

SEQ ID NO: 71 - DNA, 884 bp, Oryza sativa
  ref <308>: DATABASE ACCESSION NUMBER: AK103918
  ref <309>: DATABASE ENTRY DATE: 2002-08-28
atccctagctcccccactctcgtttagggtttccctccgccgccgccgcctcccgcatccacgcgcctcctcctcctccgccgccgccgccgccaccgcagcatcagccatggccgaagtggagctcccgcagcaggaggtcaagctcttcagccgctggtccttcgaggacgtccaggtgaacgacatctcgctggcggactacctggcggtgaacccgacgaagcacgcgacgtacctgccgcacacggcggggaggtactcggcgaagaggttccggaaggcgcagtgccccatcgtggagcgcctgaccaactcgctcatgatgcacggccgcaacaacgggaagaagatcatggccgtgcgcatcgtcaagcacgccatggagatcatccacctcctcaccgacgccaaccccattcaggtcatcgtcgacgccatcatcaacagtggccctcgtgaggatgcgacccgtattgggtctgcgggtgctgtgaggaggcaggctgtggatatctctcccttgaggagggtcaaccaggcaatctacctcctcaccactggtgccagggagagcgccttcaggaacatcaagaccattgctgagtgccttgctgacgagcttattaatgccgccaagggctcatccaacagctatgccatcaagaagaaggatgagatcgagcgtgttgccaaggccaaccgttgagtggtgatcccatgtcattgtgctaaagctcttgcgctgtttggcaggactatactttttgctagtaatttaagccttttcagacctacctgtggtttaatgtttgaatgaacatcactagtgctgagaaaaatatgtagtgctctattctatctatctatcgacatggttttat

SEQ ID NO: 72 - DNA, 1774 bp, Oryza sativa
  ref <308>: DATABASE ACCESSION NUMBER: AK103919
  ref <309>: DATABASE ENTRY DATE: 2002-08-28
aaaagtgacaacttggggaactaggcagtgcctctgcatagcatagatcttcctgtcctttctttcttgtctagtggtgagatctggtttgcagtaagcaggaaagatggtgaagatctgctgcatcggagctggatatgtcggcggcccaaccatggctgtcattgccctcaaatgcccagcaattgaggtggtggttgttgacatctccaagcctcgcgttgatgcctggaacagcgaccagctcccaatctacgagcccggtcttgatgaggttgtgaaggaatgcaggggcaggaacctcttcttcagtacggacgtcgagaagcatgtcgctgaggcagacatcatttttgtgtctgtcaacacccctaccaagacccgtggacttggagcaggcaaggctgctgacctcacctactgggagagtgctgctcggatgattgctgatgtctccaagtctgacaagatcgttgttgagaagtccactgtccctgtcaagaccgcagaggccattgagaagatcttgacccacaacagcaagggcatcaactaccagatcctctccaacccagaattccttgcagagggcactgcgattgaagatctcttcaagccagacagagtgctcattggtggccgggagactcctgaaggaaagaaggctgttcaggctctcaaggaagtttatgcccattgggttcctgaggacaggattatcaccaccaacctgtggtctgctgagctctccaagctcgcagccaatgcgttcttggcgcagagaatctcctctgtgaatgccatctctgcactatgtgaggcgactggtgccaatgtgtccgaggtggcctatgctgtggggaaagacaccagaatcggccccaagttcttgaatgccagtgtcggctttggtggctcctgtttccagaaggacatcctgaacctcgtgtacatctgcgagtgcaatggccttcctgaggttgccaactactggaagcaggtcatcaagattaatgactaccagaagagccggtttgtcaaccgtgttgtggcctccatgttcaacactgtctctggcaagaagattgccgtccttggctttgcgttcaagaaggacaccggtgacaccagggagacacctgccattgatgtgtgccatggcctgttgggtgacaaggctcaaatcagcatctacgacccacaggtaactgaagatcagatccagcgggacctttccatggccaagtttgattgggaccacccaaggcacctgcagccaactagccccacggcttttaagcaggtgagtgtggtctgggatgcgtatgaggccaccaagggagcccatggactgtgcatcctcactgagtgggacgagttcaagaccttggactaccagaggatctttgacaacatgcagaaacctgcatttgtcttcgatgggcgcaatgtggtcgatcctgagaagctcagggagattggcttcattgtctactctatcggcaagccgcttgatgcatggctcaaagacatgcccgcggttgcataattctgaatccccacctggagcgctctgctggagctgaagaaattcgataaggaaacagaaccggtcgaccactattttctgtagtctgtttttgcaggagacagctaccattttctcagtcgtaagttgaatatctgttagtatctttgtcgaagttttcatgtttgcagctttgcgcctttgtagatctgaaatcctcaagcctctgatctaagagtgccaccc

SEQ ID NO: 73 - DNA, 1597 bp, Oryza sativa
  ref <308>: DATABASE ACCESSION NUMBER: AK058267
  ref <309>: DATABASE ENTRY DATE: 2001-12-06
aaaaatctccaaaaccgcttcggcttcctctctcccctcacggcggccgtcgcttcgttcgccgattagccggcgccgccgccgccgccgccggtagagaacccaccccctccccgcatggccgccgcgggcggggccgcgcagccgccgcggcagtacaagctggcgccgcagagcgagctgcgggtggaggtgccccccgacgcgcccgtccgcgtccgcctcgtcgccggcacggcggaggtcttcggcaccgagctcccccccgagggctgggtccccgtcccgccccgctccaagatcgccattttcacctggcacggcgcgacggtggagctggacggggtcagcgagagcgagtacacgtccgacgagacaccgatggtggtttatgtgaacacccacgcgatccttgacgcgaggagggcgagggcgagggccgccgcggcttagggtgccctgccggagtcctcgcagggacccagagtgatcattgtggggccaagtgattctggaaaaagtactttgtgcaaaatgctccttagctgggctgccaagcagggctggaagcctacatatgtggatttagatattggccaaggttcgataaccatacctggatgtatttcggcaacacccattgagaagcctatagatatagttgatgggattcccttggagatgccgcttgcatacttttacggccatccaagcccaagtgttagtccagatgtttacagagctcttatgaaggagctagctcagacattggataaacaattctctggaaattctgaatctagggcagcaggaatgattatcaatactatggggtgggttgaaaaccttggtttagagttacttcacaattcaattgagattttcaaggctaatgtaatattggtattgggacaggagaaactatggaagatgctaaaagatgcagcaaaaaataagcccaacattgatgttgtaaaacttcataaatcagaaggtgttgttccgagaaatccaaagtaccgtcaaaagactagaagcttccgcatcaaggagtacttttatggcattgcgaatgatctagcaccacactcaaatgttgttaacttcagtgatgtatctgtttacaagattggcactcatcaagctcctaagtctgcactaccgattggtgcagagcctgtggcagaccctactcgacttgttgctgttaacatcagcacagatatggtccacaccgtgcttgctgtttcatatgctaaggaacctgatgaaatagtttccagcaatgttgccggattcatccacgtgacagatgttgacatccaaaggaagaagctcacatacattgcaccatgcccaggggacctgccaagtaagctgttaattgcgagctcgttaacgtggtacgaggcttgatcagctcatggcagaacgatcaacgatgtagctaggtggtcagttaaattaatcagatggatgtaacacagatgtatcccttgtcctatctccgggtgtacgttgtaaacttgcaagctttttagtaaactcaatgcactgctaactaaaacttataacagcaaatttcactcatttctct

SEQ ID NO: 74 - DNA, 450 bp, Oryza sativa
  ref <308>: DATABASE ACCESSION NUMBER: AK058268
  ref <309>: DATABASE ENTRY DATE: 2001-12-06
taccgatgtgccatacctaagctgcacaaagaaattgttcctgagaaatgcaaggttttagtcaagcctacaaagattattgtgacgctttgcaaagcttccaaaggcaactggttagacttgcatttcaaggaggataagttcaagccaagcatggctaaggagaaggatccaatgtctggaattatggatttgatgaagaacatgtatgaggaaggtgacgaagacatgaagcgcacaatagccaaggcctggtctgatgcaaggtctgggaagaccgccgattcagtgaggggattaccttgagtttgcccgaagcgttggctctgctgagccagttcgttgtgattgaatgcacttggttatcttattttgcatgtaacgaactggaaatcggtcacgccgggcctgttcatttgtgaagaaaacatcttctcgtgtgatattatc

SEQ ID NO: 75 - DNA, 1574 bp, Oryza sativa
  ref <308>: DATABASE ACCESSION NUMBER: AK058269
  ref <309>: DATABASE ENTRY DATE: 2001-12-06
ttgcatttctatatcagatgtgctctcaatcaccaaatgcttcctatataattcccattgaccctgctgctagtggtggaatgaacggatttctttgtttatctgaaaggaactgttacagcatcgtggtaacatctccagttaaggggttcaatggcatcgcccagaacagagttctgaatgcaacctaccttaaccctcagtatcacaaacacattcctgagcctccggaaggtgtcatcatacctgcaaagatattgaagcctagtgatttcaaaccctttcctattttgtggcatgaagataatagtcggcgtcagccaagagaaaggcctcaggtttctggagctctgtcaggctctgtcttaggagaggctgcacatcgcctggtgaaaaactcactgcagataaaatccggctactctgctgggctgcttgacatgccatacaggggtgccccctatggtcctggaaacagacctaggcctgctggaccattgggatatgagagaggttttgttgaaaattcatacaatggacacatgtccagaagcgttccaaattctcatcctcagttcttcggcgacgctcaagccaacagacagaatgtgaggatactggaacgaccaaactatcgaaacaacgacagtgccatccattcagggatgtcgcaactaacaatccaagatggcccaaggatgcatcaaaacaacaggatgcagaactccggattttcacctaatcagccacatcccaatcagtatgcaggattcccaccccagcgtcccatgcagaactccggttttacgccacagcgacctgcacaatattcaggatttccacaccagaggcctgtccaaataggacttcaacatcagccagcagtaaatgggattcaaccaccgttaccccccagtgcatggattggcaggccaataagtggagtcccagcaggagtacctgccaagcaggatcctaggatggccatggataggcagcccaaacaagataactcgagatcacagcatgacaagagacagcaggctactaaggtagtataccgtgtcaaaggtcaaggtcccaatggcctgagtgagtgaaaagtatccatgaaatcatcctcaaatcgcagtataaccaggaatcgcctttaagtttgtttgtacgatgttccatgtgagtgggcatgctgctactgggagaagcgacactggaagtctgcaagctcctagtgaaagcagccataggatttactttattttaccaccccatccatttacattccatcattgagttgttgtataacgtccaaaggagttggttttggttaagttatgatttaggacagggatttagacagaaacttccgtagttaggacaaaccttgagcaacaggcaaagcaccgccattgtaaatctgtaagctagagcaactcttatcaacgctgatgtgatattgttacttcttttgtgaacactccctggctacccagtgctgactatgtctgtattattgctcctgggtggtaatgtctttgatgatgaatataataaatcttgccatcaagtttctt

SEQ ID NO: 76 - DNA, 1313 bp, Oryza sativa
  ref <308>: DATABASE ACCESSION NUMBER: AK103920
  ref <309>: DATABASE ENTRY DATE: 2002-08-28
gacacggccacaccacccaccaactgagagctgagcaggcgagcgagcggacatggcagcatcgctccaagccgcggccaccctgatgcagccggccaagctcggcggccgggcctcctccgccgcgctgccatcgcgcccgtcttcgcacgtcgccagggcgttcggcgtcgacaccggtgccgccggcaggatcacgtgctccctgcagtccgacatccgggaggtcgccaacaagtgcgccgatgccgccaagctcgccggcttcgccctcgccacctcagctctgctcgtctcgggcgccagcgcggagggcgtgccgaggaggcttaccttcgacgagattcagagtaagacgtacatggaggtgaagggaaccggcacggcgaaccagtgcccgacggtggagggcggcgtcgactccttcgccttcaaggccggcaagtacaacatgaagaagttctgcctggagccgacgtccttcaccgttaaggcggagggcgtggccaagaacgcgccacccgagttccagaagaccaagctcatgacccgcctgacctacaccctcgacgagatcgagggcccgctcgaggtcagctctgacggaaccatcaagttcgaggagaaggacggaatcgactacgccgccgtcaccgtgcagctgccgggaggcgagcgcgtgccgttcctcttcaccatcaagaatctggtcgccaccggcaagccggagagcttcggcgggcccttcctcgtgcccagctaccgtggttcgtccttcctcgacccaaagggccgcggtggctctaccggctacgacaacgctgtggcgctccccgccggaggcagaggagacgaggaggagctcgctaaggagaacgtcaagaacgcctcgtcgtcgacgggcaacatcacgttgagcgtcaccaagagcaagccagagaccggcgaggtgattggcgtcttcgagagcgtgcagccgtcggacacagacctcggcgccaaggtgcccaaggatgtcaagatccaaggggtgtggtacgcgcagctcgagtagggaatgaacaaatgttttgtgcgtggccgggttgatatatcgatacatggagagagggaaggaaggctgcaatgtgtgtatctagtaatgcaaactcgatcgggctgttgatggttttaatttttagcttttgtttcttcctctgttctcgtgaactgatgatcatatcccccgatgatgttatttgcatttcgacaagcggagaggacattgtacgatacatatatgtgcctatcttcacgaacatttgccttccaat

SEQ ID NO: 77 - DNA, 758 bp, Oryza sativa
  ref <308>: DATABASE ACCESSION NUMBER: AK058270
  ref <309>: DATABASE ENTRY DATE: 2001-12-06
gaaccggataaatttaacacctgttgcactgatggaggctacctgcttttctaaaactgtgtttggtggccagccaactaaacctgattacagagatgtaccttgtgctgttttctccatcccaccactatcagtagtgggcttgagtgaacagcaggctttggaggaagccaagagcgatgttcttgtttacacttccagcttcaacccaatgaagaacagcatatccaaacggcaggagaagaccgtcatgaaactggtggttgattcagagactgataaagtacttggtgcatcaatgtgtggaccagatgcaccagagattatccagggtatggctgtagcgctgaagtgtggagccaccaaggcgacctttgacagcactgttggtattcacccgtctgctgctgaagagtttgtgacaatgcggaccttgaccaggcgcgtgagcccatcatccaagccaaagacaaacttgtaggcaagatgagtaattttggataaagaaacatatatacccgttttgatttatattttgtggcaaagtgtactctggtttgcatctggtaatttcacgttagggattctacctggaacggtaaaaaggagacaatgtatacttgattgaaataaggtttctgcatatcagcctgtacagagagtaaaacttctgcgtttttctgatccaaataagcgggcgggacatcattcgttctgcctgcagacaaactctctgaatatcatccattgctcactgt

SEQ ID NO: 78 - DNA, 1193 bp, Oryza sativa
  ref <308>: DATABASE ACCESSION NUMBER: AK103921
  ref <309>: DATABASE ENTRY DATE: 2002-08-28
aaaaaaaaacgtacccttgtgactacacccgcttcgcttcctcccctctctaagccggggaagctaagccatggcgtccgtcaccgcccgcaccccggtcgcagccctccgctcgtcggcgtcgctcaagtctaccttcctagggcaatcctccacccgcctcgcccgcgcaccgactacgaggcgtaatgttcgggcggaggccaagggagagtggctccccggcctcccttctcccacctacctcaacggcagcttgccaggcgataacgggttcgacccgttgggtctggcggaggacccggagaacctgcggtggttcgtgcaggcggagctggtgaacgggcggtgggcgatgctgggggtggccgggatgctgctgcctgaggtgctgacgaagatcgggttgatcgacgcgccacagtggtacgacaccggcaaggccacctacttcgcgtcgtcgtcgacgctgttcgtcatcgagttcatcccgttccactacgtggagatccggcggtggcaggacatcaaggaccctggctgcgtcaaccaggaccccatcttcaagagctacagcctcccgccgcacgagtgcggctaccccggcagcgtcttcaaccccctcaacttcgagcccaccctcgaggccaaggagaaggagctcgccaacgggaggctggcgatgctggcgttcttggggttcctggtgcagcacaacgtgacgcagaaggggcccttcgacaacctgctgcagcacctgtctgacccgtggcacaacaccatcatccagacgctgtcaggctgagcgtgtgatcgatttcatcagggccagggcatctcaaggagcttgatgagttcaggctggtgaaaccgatgattgggcgatggaagatgttctcttcttgtttcttctttttttttttgtggagtatgcatgtataagatgttaatgaattggggggaggagagagagagagatggatgtgatgagattcagacttactgtgtgtgttgtggtaattgtttcctgcatgcatggatctggatgcatgggtgagggggtgagttgagtggtgaatttctgatgtacagtactacagggggataaactatctcatggtagcagcagtgttctagctatctcatggtctcgatcttaattatggtggataaactacgcttaattgcttgtc

SEQ ID NO: 79 - DNA, 523 bp, Oryza sativa
  ref <308>: DATABASE ACCESSION NUMBER: AK058271
  ref <309>: DATABASE ENTRY DATE: 2001-12-06
tgctccgggcgagggcgtcgtccgacgacacctcgtcctccgccgcgaccggcgacgagctcatcgaagacctgaaagctaagtgggacgccgttgagaacaagtccaccgtcctcacgtacgccggcggcgccatcatcgccctctggctgtcgtccgtcatcgtcggcgccgtcaactccgtgcctctgcttcccaagttcatggagctcgtcgggctcgggtacacaggctggtttgtgtaccgctacctcctcttcaaggaaagcaggaaggaattggccgacgacgtcgattctttgaagaagaggattgctgggacagagtaaaaaatgccgtcgtctgcaccaattttttggaacgattctttggatcgcacattgcagagaccaaaacccgttgtttagagtactagtgtttggtaccgcgaagctttgttttgttcctttccttgatgggcaataacagtgtcttcacgtgtagatcgaattaataataattacgaattgcgtctcgactaatt

SEQ ID NO: 80 - DNA, 1839 bp, Oryza sativa
  ref <308>: DATABASE ACCESSION NUMBER: AK058272
  ref <309>: DATABASE ENTRY DATE: 2001-12-06
atggcactttatgttgcttcccattacaaaaattcacccaatgacttgcaactaatggctgatgcgccggctcatcacctatttgtattgcttggcccagtcgatgagtctaaaaatcagctcccggatattctatgtgtagtccaggtctgtttggaaggtcaaatatctcgaaaatcagctatgaaaagcctaagtgagggtcggtcaccttctggtgatcaaataccatggaaattttgtgaacagtttcaagacaacgtgtttccaagtctctcaggagctcggattgtacgaattgctgtccatccaagtgctgtgaggcttggatatggttcagctgctgtggaccttttgacaaggtactatgaagggcaaatgactctatttgctgaggatgaggaggaaaatgaagagcctgaagtcaggatcactgaggctgcagagaaggcttctctactagaagagaccgtaaagcctagggcaaatctcccaccactccttgtccatcttcgcgaacgtcgtcctgaaaagctccattatcttggtgtatcttttggacttacacaagagcttttccgtttttggcggaagcacaacttctatccattctatgtgggccaaattcctagtgctgtgactggtgagcatacttgtatggtcttgaggcccttaaatagcgatgacattgaagttaatgagtcaagcaaatgtggatttttggatccattttatcaagatttcagacaaagattcaggcgtctcttaggaacatctttccggcatctcaattttaagcttgcaatgagtgtattggcttccaagattgatttttcagatcacgaaccctcagactattataccaatattacctcaaagatattgggagatatgctatcaccacatgatatgaagcggctggaagcatattctaacaatttggtcgattatcatctgattctggaccttgtccctattcttgcacaccagtatttttcagagaagcttcctgttacactacatggtgcccaagcagctgttttgttctgtatgggactacaagacaaagacataggtgctacaaaggaagaactggggatagagagggaacaggttctatcaaacttcatcaagacaatgaagaagttatacggttaccttcataatattgcaggaaaagaaattgaagcaacattaccacgactaaaggaaattgatacagctcctcttaaatcattggatgaggaccttgatgaagcagccagggaagtaaaggaacaaagaagagcaatagatgaggatgatgtggacccaaagtttctgcaaaagtatgcaattgatgccgatgacgatgagattgagaaggcgctgaacggaggaaagatttccgcaagcggtgttatcagtgtgaaatccaacaagacaaaggctgacaagcaagagaagcgcaaagaaatgaagaaatcaaaaaggaaaggaaatgatggagagaaatctgagtctaagaagaagaggtcttgaatcatcaatttaaattagcacttccagaaagttgacctcggtagcttgtgaaactcacgagaaacaagttgacctcggtggctcgtaaaacttaccagaaaaactccctgtgcatgctgaggaagccctgctaacacaaagcctcgaaaacgtgttcatctcacaaggggggctcaaaggagcagacaagttctccagaaaacatctggcaccagcagccatcaattttgatgtttcaatttcttagaatattactatggttttgctgtatcctcactgtagcacagttaattttgttatggaagaaaattgcagctt

SEQ ID NO: 81 - DNA, 1473 bp, Oryza sativa
  ref <308>: DATABASE ACCESSION NUMBER: AK103922
  ref <309>: DATABASE ENTRY DATE: 2002-08-28
agcttgctgctgctgcattcttcttgatctgatcgtcggacatggcgtcgcccatgctctccgccgccaccgtgccactccagggaggcggcttgtcggagttctccggcctgaggagctcgtcgtcgctgccgctgcggcggaatgccacctccgacgacttcatgaacgcggtctccttcaggacccacgcggttggcacgagcggcggggcgcggcgggcgccgacggaggcgaagctgaaggtggcgatcaacgggttcggccgcatcgggcgcaacttcctgcggtgctggcacgggcgcggcgacagctcgcccctcgacgtcatcgccatcaacgacaccggaggcgtgaagcaggcgtcgcacctcctcaagtacgactccacgctcggcatcttcgacgccgacgtcaagcccgtgggcgacaacgccatctccgtcgacggcaaggtgatcaaggtcgtctccgaccgcaacccgtccaacctgccgtggggcgagctcggcatcgacctcgtcatcgagggcaccggtgtgttcgtcgaccgcgacggcgcgggcaagcacatccaggccggcgccaagaaggtgctcatcaccgcccccggcaagggtgacatccccacctacgtcgtcggcgtcaatgccgaccagtacagccccgacgagcccatcatcagcaacgcctcctgcaccaccaactgcctcgcccccttcgtgaagatcctcgaccagaagttcggcatcatcaaggggacgatgaccaccacccactcctacaccggcgaccagaggctgctcgacgcgagccaccgtgacctccggcgcgcgcgtgcggcggcgctgaacatcgtgccgacgtccaccggcgcggccaaggccgtggcgctggtgctcccgaacctcaaggggaagctcaacgggatcgcgctccgggtgccgacgccgaacgtgtccgtggtcgacctcgtggtgcaggtgtccaagaagaccctcgccgaggaggtgaaccaggcgttccgcgacagcgccgccaacgagctcaagggcatcctcgaggtctgcgacgtgccgctcgtgtccgtcgacttcaggtgctccgacgtgtcgtgcaccatcgacgcgtcgctcagcatggtcatgggcgacgacatggtgaaggtcatcgcctggtacgacaacgagtggggatactcgcagagggtcgtcgacctcgccgacatcgtcgccaaccagtggaagtgagaacgtagaagctgctgctgctgctgcctttgtaactccacctcgctccaaaaattttccccagacttcttccttcttcctctcgatcctttgtaatgagaatttcgaagtttcgagcgcccaacacagtttcttgtttctttctttgcttttcttccccacctcatctgacttttcactgtccggcacggattattatcgacttccggcaattggaaatcgc

SEQ ID NO: 82 - DNA, 1629 bp, Oryza sativa
  ref <308>: DATABASE ACCESSION NUMBER: AK058273
  ref <309>: DATABASE ENTRY DATE: 2001-12-06
ctgatgttgacatcaagatcctagcagcagggaagagcaagtatgcatctctgaaggaaagggacatagcaatggagacaaagacaaattctgagggatcattctttgcaggtcccctgtatgatgatattggatatacggtggaagcttcaaaggctggctatcatctaaagcaaactggcccgtacaccttttcttgtcagaagcttggtcagatattggtacggatttatggtgaacaagatgccgagcttttaccttctgtattgctgtctttgagtggtgaagaaggctacagaaataattctattagtggttctggtggaactttcagctttggtaacttatttccaggaagtttctatctccgacctcttctcaaggaatataaattcactccatcagcagttgctattgatctcaattctggtgagtctagagaggttgaattccgtgcaactcgtgttgcctacagtgccatgggttctgtaaccctgctgactggccaaccaaaagagggagtatttgttgaagcaagatctgaatcaagaggttattatgaggaagctactactgatccttttggtaggtttcgccttagaggactcgtccctggctcaatttattctgtaagagtggttgcaaaagatgatcacaggtttgcagcagttgagcgtgcttcacctgaatatgtgtcaattgatgttggtcaggatgacatctctggtattgattttgttgtttttgaaagaccggaatcaacaattttgagtggccatgtggaaggagatgatcttgacatgttgcaaccacaactgtctgttgaaattagatcagctgcagacccttctagaatagaatctgtactccctgttcctctctcgtactacttcgaagtacagaatttgccaaaaggaaagcatcttgttcagcttcgttctggtcttccatcacatacccatagatttgagtcagagatagttgaagttgacttggacaagcaacctcagattcatgttggtcctcttaaatataaaaccgaagagcgacatcacaaacaggaattaactccagcccctgtatttcctcttattgtcggagtttccgtgattgcattggtcatcagcatgccaaggctaaaagacttgtaccaaagtgctgtgggaatgactaccctaggttctgcggctgcgccgataaaaaaggagccaagaaagacaatcatgagaaagagggcgtgaggcataaattagcttcagattaggtgttgaaaaaacgggtacttacagttgatcacgtcaggagtagaaaatagccgtttctttgcatttaaggggtaattttgcagataaaaattggcagtcgatatttattaacgactacaaattttgatgccaatgttgggcatgtagtcattcgaaatgttgtacgatagtactgtgtacagttttcaggtgccagatgaagttttgagagcctggtctatctttcctcagctcagtatatttgtttagttttagtgtctggtctcgtttatgctactatgttgtagataaacacgttggcatttgcttcgggcatagttactgccttgtactttggcattaatttttcatgttttaaactgtc

SEQ ID NO: 83 - DNA, 443 bp, Oryza sativa
  ref <308>: DATABASE ACCESSION NUMBER: AK058274
  ref <309>: DATABASE ENTRY DATE: 2001-12-06
cgcaaaaggatttggctacacaatctgcagatcttgaggaacaaaggttgcagattgaagtccaggcagtctatcttgcaaaacaacggctcaaatgggagcgcttcagtaaaaataaggatagagaactggaacagatgaggttagagaatgaaaaaatgaggcttgagaataagcgcttggagctggaggtaaggcacaaagagttagagcttgaactcaagcaaaaaggcagtggcaatcatgcatgacatatttttaaccaatcaaggctgacttgtaagatggtcgctgatggcttctgttgttcgagtagactgacgcaagaaggttaaggttcagcatactttttttgttctgctttttttccctacattatttgtgctagtgagcttgatttgtaccataactcttattcttcagtgagcttgctaaccacacat

SEQ ID NO: 84 - DNA, 370 bp, Oryza sativa
  ref <308>: DATABASE ACCESSION NUMBER: AK058275
  ref <309>: DATABASE ENTRY DATE: 2001-12-06
tcaactgcaacgcgataaactagggcggccggcctgatgcgtacgtgtgtgcccgcgcctcccgtacgagaggagaataaaatgtcattagtaccatcaaattaagctagctagttaagctttacgaaaatcgatccctttcttcctctgtggtgtttagcagtttagggatcgtatgtctccacagttcctactatagtgtcgcttgggcgatggtggagctatattgtgcactttataaggtggtgttattatgtaacgcctgtgctagctttggtcctgatgttctccatgtgaactgtgtcaaccgtccattgttctgcaaatctgcagtatgtactgtgtgtgatagtatcaagctgaacttctg

SEQ ID NO: 85 - DNA, 1800 bp, Oryza sativa
  ref <308>: DATABASE ACCESSION NUMBER: AK058276
  ref <309>: DATABASE ENTRY DATE: 2001-12-06
ctctccgaatcctcccccgcattccgcgccggagctgaggagggacagcgagccagcgagggaggtggggcaatccagcgagcgccagatcgtgccgccagccccgctccgtcctctctccggcgaccctccgccccgcctgatcccgtggtggatcaactacaactcatctttaggaaagcctcttgaacattagccttgtgtgcctttcaacagtatggcctcggtaggtgtggtgcgttcttccttggggtttcagaacgaaacaagtacaagtggcgatgccgaccgacttccgaatgagatgagcaatatgagtataagggatgataataaggacattgacgacatagttgtcaatggcaatgggacagaacctggtcatgttattgtgacaagcattgatggaagaaatggacaggctaaacagaccattagctacatggccgagcgtgtcgtaggtcatggatcctttggaactgttttccaggccaagtgcctggaaaccggtgagactgtggctataaagaaggttcttcaagacaagagatataagaaccgtgagctgcaaacaatgcgagttcttgaccacccaaatgtggtgtcactaaagcattgttttttctcaaagactgagaaggaggagctttacctcaatttggtgcttgagtatgtgccagagactgctcaccgtgtaattaaacattacaacaagatgaaccaacgcatgccattgatatatgcaaaactatacatgtatcagatatgcagagctttggcgtacattcacaacaccattggcgtgtgtcacagggatatcaagccacaaaatcttctggtgaacccacatactcatcagctgaaattatgtgacttcggcagcgcgaaagtcttggtaaaaggagaaccaaatatttcttacatctgttcaaggtactacagagctccagagctcatatttggtgctactgaatacacaacagcgattgatgtttggtctgccggttgtgtgcttgctgaactcctcctggggcagcctctattccctggcgacagtggcgttgatcagcttgttgaaatcatcaaggttctgggtacccctacacgagaggagattaagtgcatgaacccaaattacaccgagtttaaatttccgcaaatcaaagctcacccatggcacaagatcttccataaaagaatgcctgctgaagcagtcgatctcgtctccaggcttttgcagtattcaccatacctccggtccactgcttcggaagcattgatccatcccttcttcgatgaactccgtgatccaaacacccgcttaccgaacggccgtttccttcctcctctcttcaacttcaagccccatgaactgaagggtatgccaatggaattcctggtgaagcttatccccgaacatgctcgaaagcaatgcgcgtttgtaggatggtgatttctgaggtcagcatgaaaactagttcagaatttcttcaccgtcctccattagaaagcagagatgaaccctgtgtgcagccatttgggaaagctggtgcatatggaagtggaactacatttttttgtccgagattctgacgccgcgtattcttttcccccctcccactttgctgctgccggtgtaaccaaaaaatcatccacggttctgtaaagttgatgaagaagagtgtaaaatcaggttgaaaactgaattcgatcggtttgtcaagattgtagcaacatgcaaggaaggatgttgcacactttgtatggcaatgttcgttcggtccaaatatttggacatgg

SEQ ID NO: 86 - DNA, 1571 bp, Oryza sativa
  ref <308>: DATABASE ACCESSION NUMBER: AK058277
  ref <309>: DATABASE ENTRY DATE: 2001-12-06
cttgcccctgtcaatcccccacgccgcgaggcgcgagcttccgcgatgttggccgccgtccggcgccgccgcctactcctcctcccgctgcctctccgcttcttctccgccgccgccgccgccgcctccaccaccaccgacccgaaggtcgtatcctacctgatatcctcctgtggcctcacccctgccgccgccgcccgcgccgccgccacctcgccctggctccccctcgcctctccggacttcgccagcaacgccgacgccgtcgtcgcgctcctccgccgctacgggttcaccgacgccgacatctccgccaccgtccgggcgttctccaggatcctcgcgtccgaccccgcccggaccctccagcccaagctcgactacctccgctccgtcggcatcacggcgccgctcctcccccgggtcgtctccctcagccccgtcatcctccaccgcagcatcgagtcccaccttgccccgctcatcgcctccctccgcgaggtcctcggctccgactcgcgcatcgtcaccgcgctccgccagatgccgttcgccatgcgctgcagccccaaggccaccttcctccggacgctccccgtgctccgcgacgtccacggccttacgcccagcgagctgtccaagctcgtcgccagccagcccggggtcatcctgctgggccccggccgcgccggggagatcgtccaggccgtcaaggacgccggcgtcgagccaggaagccccatgttcgtctacatcttcgccgccttctccaagctgaaggcccccacgctggagaacaagttcgcgatctaccgcagcctcggcttcggcaaggacgacatcgccgtgatgctgcggcggctcccgaacgcggcggggatctcggaggagaggctgaagaggaccgtcggcttcttgaccggcaaggcggggctgcgccgcgaggacatcgtcgcgtacccgaacctgctgtcgcggagcctggactcccacgcccggaggtgcgcggtgctcgccgtgctgaggagggaagggaagccggaggggcagcaccgcgtgccccatgtgctcgtggccagcctcgcacggttcatgaaggcgtacgtgaggcggtacgagggggaggtccccgatgtcttgcgggctatcaatggcgagatccccttcgagggctttgggcttggcgagttggagaagaagaagccacagcggcaggagaagatcagaaggtgaatatactgctactatataatgtgcattttgggctattgccaattcgccatcagccagccattgtttggtcactggtgtgtttcttcttggtagcacaatccatcggtcgttgaacattgtattggcgttgctgaatgaattttgagttaaacactgaaacccaatcgaattgtacgagtaacttacctggaacatgtttgccattaggaattagaagttcagatttcagttatgaacatttgtattatgtatctatatctactgtctgtttgaaactgggttttctacttgattggtaactgcacatacatttgcacgcaacggggccgtattgttct

SEQ ID NO: 87 - DNA, 1219 bp, Oryza sativa
  ref <308>: DATABASE ACCESSION NUMBER: AK058278
  ref <309>: DATABASE ENTRY DATE: 2001-12-06
gtttcctctaccgccatcctgaccagtgctctccatcgccctcgatgagctgctacgggtgagttgagaagccgccgccgcggcggcggttttctgggcctcatgagggctgcttgcaactgcaacacctgcctcttgctgggaaggagcaatcgccgctgctggagctggagtaggggctgctgcttcttgagcttcgctagggtcaatgtgggtgctcttctctttggagccaactgttataacatcaagcacacaacatgcattaggcattttttcgggtacggaaagaagggatacccagatggcggaagtttgatgcgataccttggggagaaactgtggtttgctgtgaagctgtcgctgtcgatgtcggggctcctcttttacttcttgactgcaacaagaacgggtaggcgttagttgaggtgaagggggaaggttatatggttaaatactgggcatcatgttcataccttcatctcatcgcagtactttacaacggctgatatattggagtaacggccgtggaccaaggtataaacccatagaaggagcttccttggaatactgaggtcaaggttctcaattgcgtctggggcttgctgtaggccttcaacaggtggctgcgatggggtgactgtgtacagattaatacccgatgggaatgttccgcaagagctcccccgatagaagttgtaggtgctcttcatgacagtaacagcagtctccatgttatcttcggatgtttgcctgatcggaatgttcttaattctgttaaaagtctcaaaccagttcatatcgaggcctttgaattgagcaggcccatcaggagacgagatgagaagctcatcaggttgcaagtcgatgtaaagcactagaccgctggatagtggagcaggctgatcagtcgtttccatggattcaggcagtggagtgatggatgcaagtttgatgagaatacaacggcaccatgccagagaagcgtgcttgcatatcttggcgaaattgctgtttgacagtttgggtgttttaaaacgctttcttatcttctcatttagtccttcaagaacatccagtcggacatcactctcaagcaaatggatgtattggtggatataactgccacaaggaaataaagtatgaaaaccatctggcttgagtaactatgtattttgcactctaatctagtaattacctgtaaagattgctttctgat

SEQ ID NO: 88 - DNA, 1415 bp, Oryza sativa
  ref <308>: DATABASE ACCESSION NUMBER: AK058279
  ref <309>: DATABASE ENTRY DATE: 2001-12-06
atcggtcgtcgctcatctccccacgtcgcatcccgtcgtccccatcgagcgatcctccctgatttctccgtctagaggtggcatcgatgctcctcgcctcctccaagatcttccatcgtaggtcgtcgcccacgacggcttgccatctgctatcccgtgcccagacgttggatgcatgatctcctccgtcggcacaatccgtgtagccgcatccatcggcgttcgtctccccgtacggtggcgatcggattggccactgaccattgcctcatctccgtacacgggagtggggttttcttttgttcaagctccctcctcggctgctccgttcatcttctctggatttctctggtgagtctgctgcattctttgccttcttttatccccttccttcacccttctctggtcaactacatcagtggctgcaagcctgcaagatggagctgagttgggaggctgagcaagcagcaacaggaggaatcaaggagcaaggggggaaatgtgagggaggaggaaactgggatacctaagtaatctgctaatgcgtttttaggctacctattccaatccctcatcgtatggtgtacattcagattcagatatgattggcttgatatttaggagaggccaaatcaaggaatgcaaataactatggagttgtacagggttccttaagccctctattaagttcaaccataactcgagctgtcaacttgcaagggttttcatcctgtctatatggtcaaatattgccactctgtaactaaatgttgtaaggacagccatggtatctgattattctcaattgttcttgatcttcagacaagtgaaaaatcgttggtcagtttaaaggaacaaatttcctcttgcaaaatacctattcctgtctagagggccaatgcactatcctcagctcaggaaaacataatggatgaagctgtcaattgttccactgagaaacaaacacaagataagataatagtgaacattcatactgcattgatctctgctccggagttctgagcaagagatgggccaaatgacatgcatctgtagctcatctcctgatgaaggtggtcatcccagagcttcagtattgtgcgagctattctgagatacactgccactggagtcgctcaaatatttggggctcccatgtaatattatcccacctaccatggcaagaagctgtctcaagtatagcaatgctcatgcttcggccactctttgttttgtgctgggaagataagaccaaggatatgttcttctgtattggcctggggatcaaccaactgatgttctagctattgctagctcaccatgtctaataggcaaacactaaatgattcgtatcgccgattcataatattgagcttctaaaaattatccctacaaaggattgtgcatattcagtc

SEQ ID NO: 89 - DNA, 524 bp, Oryza sativa
  ref <308>: DATABASE ACCESSION NUMBER: AK058280
  ref <309>: DATABASE ENTRY DATE: 2001-12-06
aaaaaaaaaaaaaatctccgccgccgccgccccactctccaaccctagccgagaggagcagaccaagcaatggggaagggtacgggcagcttcggcaagcgccggaacaagacgcacacgctctgcgtccgctgcggccgccgcagcttccacctccagaagagcacctgctcctcctgcggctaccccgccgcccgcatccgcaagtacaactggagcgtgaaggccattaggcgcaagaccacaggaactggaaggatgaggtacatgcgacatgtgcctaggaggttcaagagcaacttcagagaaggtactgaggctaccccaaggaagagagctgccgcagccaactagatcctgttttgctgtcaaagcagctatgaaactagaatttaagaacttttgcctggattgagccatctttcctatagtatgatgtacttatcttgttttatttgttatgatgctttaaaacttgacctctgaaatttcagtcagttgaacctctcgtatttttgtttcat

SEQ ID NO: 90 - DNA, 716 bp, Oryza sativa
  ref <308>: DATABASE ACCESSION NUMBER: AK103923
  ref <309>: DATABASE ENTRY DATE: 2002-08-28
aaacggaagacatgatggtactcccacacattcagtatgctttgtttggaacagtggtcgggagggtgaggatgtggaattggtgggggattttacaagtaactggaaagacaaagtaaagtgtgaccacaaaggtgggtcaagatatgaagctgaaattcgacttcgacatgggaagtactattacaaattcatagcagggggccagtggaggcactcgacttcattgccaacagagactgatgaacatgggaatgtcaacaatgttatcagggttggtgacatcgctcgtattcggcctgctcccagccaactgcagataagggacccaactgttgtcaaggtcatagagagggcactaactgaggacgagcgattcttactggccttcgctgcacgccgcatggcatttgcaatctgcccaatcagattgtctcccaagcaatgaacacatcataatacctactgagatgaactgcagcgaaaatttcagccctttcaagacgaactgaggcgcggtatatcgatgttccttcccttacatagcaaaactcatgtaacattgggacattcggggcaccacctgcctgttcaaatcaactggacattgctagagaggggttgtggacattgctcagcagttcatcacagtgcatacaacttgtgtaacagtgtaactctatgaactgtaatatgagataaacttcattttggtc

SEQ ID NO: 91 - DNA, 1183 bp, Oryza sativa
  ref <308>: DATABASE ACCESSION NUMBER: AK103924
  ref <309>: DATABASE ENTRY DATE: 2002-08-28
accacccacacattctcgaagaaggagaagaaggagaggagcagccatggcgtcgtcggtggcagcggcggcgagcacgttcctggggacgaggctggcggacccggcgccgcagagcgggaggatcgtggcgaggttcgggttcggcggcgggaagaaggcggcggcgaagaaggcggcgaggccgtcggcgccgacgacggacaggccgctgtggttccccggcgcggtggcgccggactacctggacgggtcgctcgtcggcgactacggcttcgacccgttcggcctcgggaagccggcggagtacctgcagttcgagctggactcgctggaccagaacctggccaagaacaacgccggcgagatcatcggcacccggttcgagaccggcgaggtgaagtccaccccgttccagccctacaccgaggtgttcggcctccagcgcttccgcgagtgcgagctcatccacggccgctgggccatgctcgccaccctcggcgccctctccgtcgagtggctcaccggcgtcacctggcaagacgccggcaaggtggagctggtggatgggtcgtcgtacctggggcagccgctgccgttctcgatctcgacgctgatctggatcgaggtgctcgtcatcggctacatcgagttccagcgcaacgcggagctggacccggagaagaggctgtacccgggggggtcctacttcgacccgctcgggttggcgtcggacccggagaagaaggagcggctgcagctggcggagatcaagcacgcccgcctcgccatggtcgccttcctcggcttcgccgtgcaggccgccgccaccggcaaggggcccctcaacaactgggccacccacctcagcgacccgctccacaccaccatcttcgacaccttctcctcatcctcttaatttaagctctttcgcgcgcaattcaaacgggatcgatgcgttggtgtgcgttcgcgcgcgctgtttagttttgtgatgacgagcgagctgggagggtatggagagaggagaggtcatccttttgttgattactacttaaattaggaaagctgggttggtggttaatggcgacttgcatggtggtgatttgtaatataagaacacccaagatgatgaattaatgcatccacttgtacatcgatcgatcgatcttggtatttgact

SEQ ID NO: 92 - DNA, 1631 bp, Oryza sativa
  ref <308>: DATABASE ACCESSION NUMBER: AK103925
  ref <309>: DATABASE ENTRY DATE: 2002-08-28
ataccaaagtcggcggctacacctgactcatcgatccactactgccgccgccgcccatggcctccgccgccgtcgccgtcgcccccgtcgtctccgacctcgtcgacttcctcaacgcctcccccaccgccttccacgccgtcgatgaggcgaagcggcggctgaaggcggcggggttctcgcagctgtcggagcgggaggagtgggcggggctccagcccggccgcaagtacttcttcacgcgcaaccactccaccatcgtcgccttcgccatcggcgccaagtatgctgccggcaatgggtttcacataatcggtgcgcatactgacagtccatccctgaagctcaagcctgtctccaaggtaacaaagggaggttatcttgaggttggggtccaaacttatggaggtggcttgtggtacacatggttcgaccgtgatcttactgttgctggtagggtgattgtaagggagaagaaggatggtgcagtgtcgtatgcgcataagcttgtaagagtgcaagagccagtcatgagaatccccactttggctattcaccttgacaggaatatctcctcagaaggtctcaagattaacaaccagaatcatcttgtccctgtgctggccacatctgttaagaatgaaatgcagaaattagtggcagaaaatggttcagagtcatctgagagtaagaacaccaagcatcatccactattattgcagttgattgctaaagaagcgaactgcaagcctgatgagatatgtgactttgagctgcagttgtgcgatacccagccaagtactgtagcaggtgccatgaaagaattcatcttttcaggaaggcttgacaatctttgcatgtcattttgttcgttgaaggccctaatagaatcgacttcttctgaagaatctcttgcgcatgaatctggtgtgagaatggtggctctatttgaccatgaggaggttggatctgattcggctcagggagctggttctcctgccatgttagatgctttgtcaagaatcacagggtcttttaactcttcaaattcgaggttgctagaaaaggctattcaaagaagctttctagtatctgcagatatggcacatgccttacaccccaattatatggacaagcatgaggagaaccaccagcctaaattgcatggaggactcgtgattaaacacaatgctaaccaacgatatgctacaaatgctgtggcagcatttatttttcgggaaattgctgagaggcaccatctacctatacaggattttgttgttcggaacgacatgggttgtggttcaaccatcggcccaatactagctagtggtgttggtattcgtactgtggatattggagcaccacaattgtcgatgcacagcatcagggaaatgtgtgctgtcgatgacatcaagcactcgtacgaacacttcaaggcatatttcgaagagttcactgaattggacagcaaagttaaagtagattgctaagatgaagtagtgaccatactggatcagccgactggtggtgttgctttgacatatcctgtactgttgcaaaataaatgaacaataaattgggttacattatctcgtcacaggaatctcatggagaatatattttctggc

SEQ ID NO: 93 - DNA, 1000 bp, Oryza sativa
  ref <308>: DATABASE ACCESSION NUMBER: AK103926
  ref <309>: DATABASE ENTRY DATE: 2002-08-28
agagtagtgttagtcttagcgaatccagcagcagaagcagcagcagcagctcagccgccgccgatggcgtccacgatcatggccccaacctcccgcgtcctcgccgccaagacccccttcctcggccatccccgcccctccaatgcccccgtccgcgacatcgccgccgccgccaccggccgcatcaccatgagcaaggagctgtggtacgggccggatagggtgaagtacctggggccattctcggcgcagacgccgtcgtacctgaggggcgagttcccgggcgactacgggtgggacacggcggggctctccgcggacccggaggcgttcgcgaggaacagggcgctggaggtgatccacggccggtgggcgatgctcggcgcgctgggctgcatcacgccggaggtgctcgagaagtgggtgcgcgtcgacttcaaggagcccgtgtggttcaaggccggcgcccagatcttctccgacggcggcctcgactacctcggcaaccccaacctggtgcacgcccagagcatcctcgccgtgctgggattccaggtcgtcctcatgggcctcgtcgagggctaccgcatcaacggcctccccggcgtcggcgacggcaacgacctctaccccggcggccagtacttcgacccgctcggcctcgccgacgaccccgtcaccttcgccgagctcaaggtcaaggagatcaagaatggccgcctcgccatgttctccatgttcggcttcttcgtccaggccatcgtcaccggcaagggccccttggagaacctgctcgaccacctcgccgaccccgtcgccaacaacgcctgggtctacgccaccaagttcacgccgggctcgtgaatggcccagccgccattgtagactactctctctctccatcgctcgatgtaccaatgcttgcacagattgtacgatgctgtgatgaatctgatatgatccatccagaattcagaaactgaaaaaagttggggtttgc

SEQ ID NO: 94 - DNA, 871 bp, Oryza sativa
  ref <308>: DATABASE ACCESSION NUMBER: AK103927
  ref <309>: DATABASE ENTRY DATE: 2002-08-28
cccatctcgctctcgccatctgctgcttgccaccaccacatcgtcgccggcggcgagagtggcctggagagatcgtcggcgatggcgggggaggggaggaagctgcgggtgtacgggatggcgctgtcggcgaacgtggtgcgggtggcgacggtgctgaacgagaagggcctcgacttcgacctcgtccccgtcgacctccgcaccgccgcccacaagcaaccccacttcctcgccctcaaccctttcggccagatccccgtgctgcaggatggagacgaagtcctgtacgagtcccgcgcgataaaccggtacatcgcgaccaagtacaaggcggagggcgccgaccttctgccggcggaggcgtcgccggcgaagctggaggtgtggctggaggtggagtcgcaccacttctacccggccatctccggcctcgtcttccagctcctcatcaagcccctcctcggcggcgccacggacacggccgccgtcgacgagcacgccgccgcgctggcacaggtgctcgacgtctacgacgcccacctcgccggcagccgctacctcgccggcaaccgattctcgctcgccgacgccaaccacatgtcctacctgctgttcctctccaagacgcccatggcggagctcgtcgcgtccaggccgcacgtcaaggcgtggtgggacgacatctcctcgcgcccggcgtggaagaagaccgccgccgccatccccttcccgccggccgcctgaccgccgccgccgctgccgcctcgccggccggtgcccgcatggatatgggacgataaataatttttttactactcattaatgtacgccgttaattatatgtcaaatactgtgctcgcgttttatc

SEQ ID NO: 95 - DNA, 1599 bp, Oryza sativa
  ref <308>: DATABASE ACCESSION NUMBER: AK058281
  ref <309>: DATABASE ENTRY DATE: 2001-12-06
ttgaatgttgatttactagatgcccatgcggacaaaagtacatttcatcgttttgacaaattcaaccttaagtacaatccgtgtggccaaagtaggctcagagagattttcctcaaacaggacaatcttatccaaggtcgttttcttgccgagctaacaaagcaagttttctccgaccttacagcaagtaaataccagatggctgaatataggatttcaatctatgggaggaagcaaagtgaatgggacaaccttgcaagctggatagtgaacaatgaattgtccagtgaaaatgttgtctggctggttcagatcccacgcttatataatgtgtacaaggaaatgggtattgttacatcattccaaacccttctggacaacattttccttcctctgtttgaggtcaccattgatccagcttctcatccgcagcttcacgtcttcctaaagcaggttgtagggttagatttggttgatgatgagagtaaacctgaaaggcgtccaacaaagcatatgcctacacctgaacaatggaccaatgtcttcaacccagcattttcatattatgcatattactgctatgctaacttatacacactcaataagttgcgtgaatcaaaagggatgaccacaatcaaattccgtccacatgctggcgaggctggagacatcgatcacttggcagcaacatttcttctttgtcacaatatatcgcatggaatcaacttaaggaaatctcctgtgcttcaatatctatactatcttggccagattggtctggcaatgtccccattaagcaacaactccttgtttcttgattaccaccggaatcctttcccaatgtttttccaacgaggcctgaatgtttccctgtcaacggatgatccattgcaaattcacctgacaaaagagccattggtggaagaatacagcattgctgcttcactctggaagctcagttcttgtgatttatgtgaaatagctagaaactctgtctatcaatcagggttttcacatgctctcaaggcacactggattggcaagaactattacaaaagaggacctacagggaacgatattcataaaactaatgtgcctcacatcagggttcagtttagggacttgatttggagagatgagatgcgtcttgtatacctaaacaatgtcatcttacctgacgaggtggaccagtaacatgtacctggtgtatatggcgcggttgccatgggagttacatttcatgtttggttattggaagtcagcatgagaagtgttgtgatacacatcgtgtccgggttccaagccgacgagagagaaacttcaaaccaagtagtgcccccaaaaagcacaaccaaaagtacaacaagatatacacaataaaattggatcttactagattaggaaggatgaagcggctcagctgggtgctggattttggggtgtagtgtaggggaggcaggcaaacaattgcttcggcgtgattgtaattgtgcagcctctcgtttgtgaaggatgctataccaacattgcatgtactttaactggtcttacacagttatactcctgcgaataaagtggcgccgcttgttttaaaaaaac

SEQ ID NO: 96 - DNA, 1394 bp, Oryza sativa
  ref <308>: DATABASE ACCESSION NUMBER: AK058282
  ref <309>: DATABASE ENTRY DATE: 2001-12-06
tggcatagagaggagcgtggcgccagtgaggcctgcgtcgcatgaaggcagggttggggaggctagaggcttggaggtgcaagagagacctagggtgggtgatgtgccagagagacctagggttggtgatgtgctgccagagagacctaagttgaagctgcttcctcgctccaagccaatcgaggcttcagaaccatctcctgtctatgttgaagagaagcaggtgcatcaggttccagtggtcgcgaatactgtgcaggttgacgttattcatgatgtgcaccagaatgttgtagcacctaaagcaggagtagcaggggcagatgctgagggccgggcagtggagcgaccacgattgaatctgaaaccccgctccaatgcagtaggacagtctgatgaaagtgctccaaaggaaaggcaatccctctttggtggagctcggcccagggaacaagttctcagagagcgtggaatagatgctttagcaagtgaccttgataagacatctccagttggcaggtctaaaagtgaatttgcaaagggtgagcagaaggtcgaagctatgtccattaacccttcaggtgaaaaggctgagagttttccagctggttctagaggcccaaggaatgctgataagaaagactacaggcgggatacagaccggagtgatgtgtataggcctacacgacgggaggacaacaggagagttgctagagatgtggagaagcccgagcaacagcgtccagagcctgaaacctggcgtaagccagttgagccaccaaagcctgaggttgttgcacctcgttttgggaaaggagcatctgcattggagcttgcacaagccttctcgaagtccatgtctgatactgtgcctcagagtcgcttgacaagtgttcctagccctaaagtgccccagagtccagggaccagggatcaggttggcttctcaaggctcactgacaaccgggcattacactctagcccctcgcagcgaaagattaacggttactaacctcattgcacatgcacgctgtgctcccatgatggcacgactcaaataccatggcctcgccgaagcgcactggttttatcttcatgtttgattcttccatcatgggaaaaaaaaatcaattgttgctctctggatggcgacacacgaggggtgctgatctcgtaaccggtggctcatttccactcttgataacaaagagatgagaatttatgaactatttgtgcttctattcttcagcctgctacccgtgatttaagctggggaataatttgcaacctctgtgctgctacttggatgtgccacatatgtttctggtgtgcttgttttaagatgttgccagatcagtgctatgcctatgtatgcagcatattggtttcccggt

SEQ ID NO: 97 - DNA, 278 bp, Oryza sativa
  ref <308>: DATABASE ACCESSION NUMBER: AK058283
  ref <309>: DATABASE ENTRY DATE: 2001-12-06
ggttttatatcagctagtcacttggtttaccggccagagaaatttaagcgattttgaggagtttagcttttgttttactgcacagactatctggttgcatcttgtacaacgcatgccaatcactcatttgcgttgaaatgatatttccatgcggtgttaactctttatctgtaatttctgtctgattgtcatggtgactgtcaaatgcaaccttctatagctttccatgaaccagatgccctttgatctatacaaacataacatcgctattgtgaacc

SEQ ID NO: 98 - DNA, 1064 bp, Oryza sativa
  ref <308>: DATABASE ACCESSION NUMBER: AK058284
  ref <309>: DATABASE ENTRY DATE: 2001-12-06
agcacgaggcggcctgagctgaacaccgcatcagcagcagcaagcagctaatcgcgcacgtacgcacaccgcgacccggggcgagatggcgcagtcgatgctggtgtcgggagccaatggcacggtggccgccgcgagcaccagcaggctgcagcccgtgcggccgacgccgttctcgcggctcgtgctgtcgcagccgtcgtcgtcgctggggcgcgcggtgtccgtcaagacggtggcgctgttcggcaggtccaagaccaaggccgcgcccgcaagaaaggctgagccgaagccaaagttcaagaccgaggacggcatcttcggcacgtccggtgggatcggtttcaccaaggagaacgagctgttcgtcgggcgtgtcgccatgctcgggtttgccgcgtcgatcctgggtgaggccatcaccgggaagggaatcctggcgcagctgaacctggagacggggatcccgatctacgaggcggagcccctcctcctcttcttcatcctcttcaccctcctcggcgccatcggcgcgctcggcgaccgcggcagcttcgtcgacgaccagccggtgacgggcctcgacaaggccgtcatcgccccgggcaagggcttccgctccgcgctgggcctcagcgagggcggcccgctgttcggcttcaccaaggccaacgagctgttcgtcggccggctcgcgcagctcggcatcgccttctccatcatcggcgagatcatcaccggcaagggcgccctcgcgcagctcaacatcgagaccggcgtccccatcaacgagatcgagccgctcgtcctcttcaacgtcgtcttcttcttcatcgccgccatcaaccccggcaccggcaagttcgtcagcgacgacgacgaagagtagaattacgaggatcgatcgatctaccgaggtttcgccgccattgttgtgcttgcgcatcattgagactttctttcaagtgtatatgtactgtgtacgtgtaggtgtaaagacgtaccttgtttaattagttgttaattaatgcccatggagaaaattaacgtgagatttagct

SEQ ID NO: 99 - DNA, 1529 bp, Oryza sativa
  ref <308>: DATABASE ACCESSION NUMBER: AK103928
  ref <309>: DATABASE ENTRY DATE: 2002-08-28
ccgctggggttctcgccgccgccgccgccgccgacgatctcgtctcgcaccgcctctctctcggtatctgagatttggatcgggcgcgaggccggcggctccagtcggcatggcgcttgtgttgcattgcggaagtggcaacaaaaatgcctttaaggcacttattgctgcagagtacactggagtcaaggtcgagctgaccaagaattttgagatgggtgtctcaaacaagacccctgagtttctcaagatgaacccccttgggaagattcctgttctggagactcctgaaggtgctgtttttgagagcaatgctatcgcgcgctatgttgctcgcttgaaggacaacagctctctttgtggttcttctcttatcgactattctcacattgaacaatggatggacttctcagcaacagaggttgatgccaatattggaaggtggttgtacccaaggcttggttttggcccttatgttcctgtgcttgaggaatttgctattacttcattgaagaggtcattgggtgctctgaacacacaccttgcttcaaacacataccttgttgggcattcagttactctagctgatattgtgatgacatgcaacctatattatgggtttgttcggatcttgatcaagagtttcacctccgagttccctcatgttgagcggtacttctggacaatggttaaccagcccaacttcaagaaggtcattggtgatttcaagcaagcagagtctgtgcctcccgttcagaaaaaggctgctccccctaaggaatcaaaagcaaaggaggccaagaaggaggctccgaaggaggcccctaaaccaaaggttgaggcttcagaggaagaggaggcaccaaagccaaagccaaagaatcctcttgatctactgccaccaagcaagatgattcttgatgagtggaagaggctatactcaaacacaaaaaccaacttccgtgaaattgccattaaaggtttctgggacatgtatgacccagagggttactctctgtggttctgtgactacaagtacaacgatgagaacaccgtatcgtttgtgacgatgaacaaggtcggtgggttcctgcagcggatggatctgtgccgcaagtatgcttttggcaagatgctggtcattggctccacaccgcccttcaaggtcaagggactctggctcttccgtggtcaggacatccccaagttcgtcatggatgaggtctacgacatggagctctatgagtggaccaaggttgacctctctgatgaggcccagaaagagcgtgtcaatgccatgattgaggaccaggagccgttcgagggcgaggacttgctggatgcaaaatgcttcaagtgagcagcacaatgtttagaagcaaaatcatcagttgcaaaagtactatttaggacttgaattcggagttaaaacagttgcctttttggtggagttttgttacttgctgtttatttgacctggtataccttttgaactggttgatttttgtgcaatgtctcagattttggat

SEQ ID NO: 100 - DNA, 1266 bp, Oryza sativa
  ref <308>: DATABASE ACCESSION NUMBER: AK103929
  ref <309>: DATABASE ENTRY DATE: 2002-08-28
aacacccccacccatctcacttcactctctttctcttctcttcacttcaccaccgccacctctctcatcggatccctgcagaggaggagagggcagtggcggcgaaaggcgacatgggctcgctgtcctctctcgccgccgcggcggtgtttctctccctcctcgccgtcggccactgcgccgccgccgacttcaacgccaccgacgccgacgccgacttcgccggcaacggcgtggacttcaactccagcgacgccgccgtctactggggcccctggaccaaggccagggccacctggtacggccagcccaacggcgccggccccgacgacaacggcggcgcgtgcgggttcaagcacaccaaccagtacccgttcatgtcgatgacctcctgcggcaaccagccattgttcaaggacggcaagggatgcggctcttgctacaagatcagatgcaccaaggaccagtcgtgctccggcaggtcggagacggtgatcatcaccgacatgaactactacccggtggctccgttccacttcgacctcagcggcacggcgttcggcaggctcgccaagcctggcctcaacgacaagctgcgccactccggcatcatcgacatcgagttcaccagggtgccatgcgagttcccggggctcaagatcgggttccacgtggaggagtactcgaaccctgtgtacttcgcggtgctggtggagtacgaggacggcgacggcgacgtggtgcaggtggacctgatggagtcgaagacggcgcacgggccgccgacgggggggtggacgccgatgagggagtcgtggggctccatctggaggctggacaccaaccacaggctccaggcccccttctccatccgcatccgcaacgagtccggcaagacgctcgtcgccaacaacgtcatcccggccaactggaggcccaacacattctaccgctccttcgtccagtacagctgaaccgccgctcgccggcggcgaccctcggcgccggcatcgccgccgctgctgctgctagtaatactactactgctatgatgtaattgtgttaccggttgggttctttgagtttgttggggttggggattgtgtggtcggtctgtgttgcgatttgcagaaaccgggcgagcgaaagaagaaaaaaaaagctgtgtgggaaatggaggaggtaggcgtacaaggttacgctctcccgcccactctcgcttttataatttatcattttcaaatggtgatgatatgatgattaatc

SEQ ID NO: 101 - DNA, 308 bp, Oryza sativa
  ref <308>: DATABASE ACCESSION NUMBER: AK058285
  ref <309>: DATABASE ENTRY DATE: 2001-12-06
aaagcatgcgtcgtagtgttagtagtgggttttaatcttttgcttataagaacaatctgagtagggtgtattttgtggaacaatatgtttctcatgatggtgctgtattcgtcttattggtggatctgtcaaaaatactcagcatattgtcagtgtgtctggtgactcttattttgttagtctgattcgtttgcgtcttattctagcggtgctgcctctttggcactgtgcatggctagatacaattacattgtaattcacctgtctctaatccgtgttaatgtaagtgttccgttgctgtccgtgtg

SEQ ID NO: 102 - DNA, 1638 bp, Oryza sativa
  ref <308>: DATABASE ACCESSION NUMBER: AK058286
  ref <309>: DATABASE ENTRY DATE: 2001-12-06
aaaaaagcaacacgcgtctcgcggagggaaacccgctcttgccgggaacaaacgaaaccaagcgaagcgaggagaagatgttgctgcaccggcaccggcacaggctgctctgctgcggcggcggcgtcgccaccgcccccggccggttcgccggcgatgccatcgcggaccatcagcaggcagccgccggcgccaagaacgcggcggccacgtcgtccgcgaggcagctgtcgtgggcgcaggtggaggccatgacgcgtgggttcacgtcggccgtcgtcggcgagggcggcttcagcaccgtctacctcggccgcgtcgccggctccctcgcggccgtcaaggtccaccgcagcagcgagcgcctccagcgcgccttccgccaggagctcgacgccctcctccgcgtccgccacccccacatcgtccgcctcctcgcgttctgcgaccagcgagacgagggcgtgctggtgctggagttcgcgccgaacgggaacctgcacgaacagctccacggcggcggcggcggcggcgcgatgccgtgggcgcggcgggtggcggtggcgctgcaggtggcgcgggcgctcgagtacctgcacgaccggtgcgagccgcaggtggtgcacggcgacgtcaagtcgtccaacgtcctgctcgacgccgccatgggcgcgaggctctgcgacttcggctcggcgcgcgcggggttctcggcggccgtccactgcccgcgcccgcgtccgtcggcgctcgccgtgctcggctcgccgggctacgtcgacccgcactacctccgctccggcgtggtcaccaagaagagcgatgtctacagcttcggcgtgctgctgctcgagctgctcaccggcacgcaggcgttccgcgacggcatgctgctgacggcggccgtcgcgcccaagctcaagggcgccgccgccggcgacgtggagaagctcgtcgacgagaggctagggtgccagtacaacgccgccgaggcggcgaccgtggcggcgctggcggcggcgtgcatcggcgacaacccgagcctccgcccgtcgatggccgacgttgtacggaccctggagaagcccgcgcaaaaggccggacggtgacgtgcaatgttgtgcgccgtaggatggttagatatgacgtggcaagtatcaggaccgtaggattggatgctgctcccgcgcgtggaaccccttgccgcgattgggttggtgaggagcaagaaagcaatagagacgaagcgtatcaaaattcaaaagcaaccaagcaagcaacgatcgagggtttggttcggacaaggactttttggaggatgtttgtgcagttttttcatagtattttggtggccgatcccgatcattgttgttcatcttctactaggtcgttggcacacaagtgcatgcagcaactgtaagagaggattcaatccacatccactgcatgcatattaaatttttagatgttttttgcacgccttcttcctgcttcagcaagcaccagcacgtaaaataaacgtgcacaaaatctgtaaatacatttgttcagagaatcatatgtttccaattctctcattttcttttatttcttgatgattgtactatatatgttgccaactcattaattgcttaaaac

SEQ ID NO: 103 - DNA, 1533 bp, Oryza sativa
  ref <308>: DATABASE ACCESSION NUMBER: AK058287
  ref <309>: DATABASE ENTRY DATE: 2001-12-06
ttccccctcccgccccggccaggtgtttgacgaaatggcctcctccgccatggagctctccctcctcaacccggcggcaatgcgcggcctctccgccgccaagccccgcgtcgtgtcttccaggcgcatcgtgcggttccgcgtggcgtcgtcagccgcggcgccgcccgcggcgaagcccgggacgcccaagaagcgcgggaagacggagatccaggagacgctgctgacgccgcggttctacaccacggacttcgacgagatggagcggctgttcaacgccgagatcaacgagcagctcaaccaggaggagttcgacgcgctgctgcaggagttcaagacggactataaccagacccacttcgtccgcaacccggagttcaaggccgccgccgacaagatggaggggcctctcaggcagatcttcgtcgagttcctcgagcgctcctgcaccgcggagttctccgggttcctcctctacaaggagctcggccgcaggctcaagaaaacaaacccagtggtggctgagatcttctcgctcatgtccagggatgaggcccggcacgctgggttcttgaacaaggggctgtctgatttcaacttggcactggacctcgggttcttgaccaaggctaggaagtacaccttcttcaagcccaagttcatcttctacgcgacctacctgtcggagaagattgggtactggaggtacatcaccatcttcaggcacctcaaggcgaacccggagtaccaggtgtaccccatcttcaagtactttgagaactggtgccaggatgagaaccgtcacggtgatttcttctccgcgctgctcaaggcgcagccgcagttcctcaacgactggaaggccaagctctggtcacggttcttctgcctctcggtgtatgtgaccatgtacctaaatgattgccaacgtactacattctatgaagggattggtctggacaccaaagaattcgacatgcatgtgataattgagaccaaccgcacaacagcaaggattttccccgctgttcttgacgtcgagaaccctgaattcaagaggaagttagacaggatggtggagatcaacaaaaagatcattgccataggcgagtctgacgatatccccctggtgaagaacctgaagaggattcctcacgttgccgctctggtgtctgagatcattgctgcgtacctcatgcccccaatcgagtctggctctgttgatttcgctgaattcgagccccagcttgtctactgattctgtaggaagaccatctccagcttttttttccttcaaaaaggaatgctgatattttctgcctgaggggcttcgaacggtgagatgatgggtggttagcagaatctgcacctcgtgtgttcctttgtaaagtattgagacttcaacaatgtaccatttggcaaaggttttgttatgatctccatttaagtggcagtgaactgcatcacagtgggggttacagttttccaacagaagggtaattatatgatgttttggggttgttgatactt

SEQ ID NO: 104 - DNA, 1694 bp, Oryza sativa
  ref <308>: DATABASE ACCESSION NUMBER: AK103930
  ref <309>: DATABASE ENTRY DATE: 2002-08-28
aacgctcgcactcctctcctctcatctgacatatctcctcccgtcctttcgaagcctctcgaatcgcatcgccgagccggatggcggtcaccgccgacgtgaagctcgagggcctccgcgccgccaccgacaagctcgaccagatcagcgagaacgagaagtccgggttcatcagcctcgtttcgcgctacctcagcggcgaggcggagcagatcgagtggagtaagatccagaccccgaccgacgaggtggtggttccctacgacacgctctcggctgctcccgaagatctcaacgagacgaagaagctgctcgacaaactcgtcgtgctcaagctcaatggaggcctcgggacgaccatgggctgcactggtcccaagtctgtcattgaagtccgcaatggctttacgtttctagaccttattgtgattcaaattgagtccctgaacaagaagtatggatgcaatgtccctttgcttctaatgaactcattcaacactcgtgatgacacacagaagattgttgagaagtactccaactccaacattgaaattcacactttcaaccagagccaatatcctcgcattgttactgaagacttcttgccacttccaagcaaggggaagactggcaaggatggctggtatcccccaggccatggtgatgtgttcccctccttgaataacagtggaaaacttgataccttgttggcacagggcaaggagtatgtctttgtcgcgaactcggacaacttgggtgctattgttgacatcaagatcttaaaccacctgatccataaccagaacgagtactgtatggaggttactcctaaaacattggctgatgttaaaggtggtaccctcatctcttacgaagggagagttcagctgttggagattgctcaagtccctgatgagcatgtgaatgaattcaagtcaattgagaagttcaagatcttcaataccaacaacctgtgggtgaacttgaaggccatcaagaggctggtagaagctgaagcacttaagatggaaatcattcctaaccctaaggaagttgatggtgtgaaagttctgcaactcgaaactgcagctggagcagccattcggttctttgaaaaagcaattggcattaatgttccccgctcgagatttctgccagtcaaggctacatctgatttgttgcttgtacagtctgatttgtacaccttggtcgatggctttgtcatccgcaacccagccagaacaaacccatcaaacccttcgattgagcttggacctgagttcaagaaggttgccaatttcctggcccggtttaagtcaatccccagcattgtcgagcttgacaccttgaaggtctctggtgatgtctggttcggctctggagttacactcaagggtaaggtgaccatcaccgccaagtcagggaagttggagatcccagatggagccgtgcttgagaacaaggacatcaacggtccggaggatctttgaggctgctcacggaaaccttccagatatatttagctgagcgttttgtaattgtcgtgtgcattcggcagccagggctcgatgatcccattacagaataattgtaatcatcttggcacatccgtacttctgttttttggtgtgccaagggcgttgtatttcatttacttaaatgatctcgtaataccatagttttgcatgcactgt

SEQ ID NO: 105 - DNA, 1383 bp, Oryza sativa
  ref <308>: DATABASE ACCESSION NUMBER: AK058288
  ref <309>: DATABASE ENTRY DATE: 2001-12-06
accccaagtgcttggattttgcagctgctcccctgatccggttcagataggctcttcttgacaggatcaccatgtctgcctttgtgggaaaatacgcagatgagctgatcaagacggccaagtacatcgcgacgccggggaagggcatcctcgccgccgacgagtcgacgggcaccatcggcaagcgcctggccagcatcaacgtggagaacgtggagcccaaccgccaggcgctccgggagctcctcttcacgacgcccggcgcgttccagtacctctccggcgtcatcctcttcgaggagacgctctaccagagcacggccgccggcacgccgttcgtcgacgtgctcaaggccggcggcgtcgtgccggggatcaaggtggacaagggcaccgtggacatcgccggcaccaacggcgagaccaccacccagggcctcgactccctgggcgcgcgctgcgccaagtactacgaggccggcgcccgcttcgccaagtggcgggccgtgctcaagatcggcgccgccggcgagccgtccgagctcgccgtcaagcagaacgccgagggcctcgcccggtacgcgctcatctgccaggagaacggcctcgtccccatcgtcgagcccgagatcctcaccgacggcgcccacgacatcaagacctgcgccgccgtcaccgagcgcgtcctcgccgccgtctacaagtctctcaacgaccacaaggtcctcctcgagggcaccctcctcaagcccaacatggtcacccctggctccgacagcccaaaggttggcgcggaggtgataggggagtacacggtggcggcgctgcggcgcacggtgccaccggcggtgcccgggatagtgttcctctccggcgggcagagcgaggaggaggcgtcgcagaacctgaacgccatgaacaagctggaggtgctcaagccatggacgctcaccttctccttcggccgtgccctgcagcagagcaccatcaagaagtggggcggcaagaaggagaacgtcgccgccgctcaggctgccttcctcgcccggtgcaaggccaactccgaggccacgctcggcaagtacggcggcgccgccggcgacgccgccacgtccgagagcttgtacgtcaagggctacacctactagaattcgtcccaatcactgggtggcgcctatgcggccgtgcctatgacagtagtagggtctcggtccaatccgcgtggcccacgtggcggtgcggattgcatcaagattcgtgcggatatacatgtgttcctttctgctgtatactctcgattctctgcttccttcccctctagctcttatattttaacaaaagctgcgtctaaatgttcatctctttgcagtttatttgcaatgc

SEQ ID NO: 106 - DNA, 1167 bp, Oryza sativa
  ref <308>: DATABASE ACCESSION NUMBER: AK103931
  ref <309>: DATABASE ENTRY DATE: 2002-08-28
atctctttccctccaagaaacacttcagcagaggagcaacaatggcggcggcagggtcgctgggacttctccaggcgccatcgtccttcacggcggcagcggcgagccggccggcttctcggcgagcaccgcgagctctgttcgccgtgagagcctcggctgccgccgatgccaccaaggacgccgtcctcaaggccttccgcgagaagagagctctcaagatcatttcagggcttcagaatttcgacaggagtagtgttgcctctgttgtctcggctgcagataagggaggtgccacccatgttgatatagcgtgtgaccaagacttagtaaagcttgctctggagcttacttcccttccgatttgtgtctcctccgtagatccttcagcattccgttctgcggtagaagctggagcaaagatgattgagattggaaactatgattctttttatgacacaggcatcgaattctcttctgagaagatcttaaagctgaccaaggagacaagggaaatgcttccagatataacactgtccgtaacagttccacatacactgagcctcctagatcaggtaagacttgcagagctactcgaagaggaaggcgctgatatcatccaaactgaaggagggaagtgttctagtccaacaaagcctggagtgcttggattaattgaaaaggcaacaccaactttggccgctgcatactccatctctcgggctgtcacaattccagtgatgtgtgcatctgggctaagctcagtgactgcaccaatggcagtaactgcaggagctgccggtgtgggagttggttctgctgtcaacaaacttaacgacatcgtcgcaatggtcgctgaggtgaaaagtattgctgaagcattgggtttgccttcacggaacgtgtctagcaacttgagaacagttcaccattaggggctagttacctcctcttctagacaaactctagcgatcaataatattatcaaaagatgcagtagcttgacatttcacagtctactgcctttcgtaacatatatgcaaagcaatgcagaggtgccaattggcgttttcgacggttgtaatgtagctttggccagtggcgttgttgaactgagatcaagtttcagctgcaatcaattgtcagattgtcacatctttcccatgc

SEQ ID NO: 107 - DNA, 1057 bp, Oryza sativa
  ref <308>: DATABASE ACCESSION NUMBER: AK058289
  ref <309>: DATABASE ENTRY DATE: 2001-12-06
aaaccacagcagctcacgagctcaaaagacacacattccaaaagcatctgtggccatctcctcctagtcctaggctcgcgtcaatggcggcgtccaccatggcactctcctcccctgccgccctcgccggcaaggcggtcgccaatgccaaggtgttcggcgagggccgcgtcacgatgcgcaagtcggcggccaagcccaagcccgccgcggcgtcggggagcccgtggtacggcgccgaccgcgtgctctacctcggcccgctctccggcgagccgccgtcctacctcaccggcgagttccccggcgactacggctgggacaccgccgggctgtcggccgacccggagacgttcgccaagaaccgggagctggaggtgatccactgccggtgggccatgctgggcgcgctcggctgcgtcttcccggagctcctcgcccgcaacggcgtgaagttcggcgaggccgtgtggttcaaggcggggtcccagatcttcagcgagggggggctcgactacctcggcaaccccagcctgatccacgcgcagagcatcctggcgatctggggttgccaggtcgtgctcatgggcgccgtcgaggggtaccgcgtcgccggcggcccgctcggcgaggtcgtcgacccgctctaccccggcggcagcttcgacccgctcggcctcgccgacgaccccgaggcgttcgccgagctcaaggtgaaggagatcaagaacggccgcctcgccatgttctccatgttcgggttcttcgtccaggccatcgtcaccggcaaggggccactggagaacctggccgaccacctcgccgaccccgtcaacaacaacgcatgggcctacgccaccaacttcgtccccggcaagtgagtgtggatctccggcgagcaacggcggtgaggtccattgctttcatgcaggctgcggtgagacgcgcgacgttctcctctttccgcgtacccgaatatttgcttcgttcgttcagattgtgtaaaacaatgttatctggttggttgatgaaagaagtacaatggacctgattgtgt

SEQ ID NO: 108 - DNA, 850 bp, Oryza sativa
  ref <308>: DATABASE ACCESSION NUMBER: AK058290
  ref <309>: DATABASE ENTRY DATE: 2001-12-06
gatctcgtcgattctatccgagcagtagactagggtttttgctgctcgagcggagagcagatggggaaggactccaagccgaaggacaaggggaagggcaagcaggctgccggctcgtccggcggcgatgacgccggcggcggcggcaagggaggcaagggcaagggcggcaagtccgccgacggcctcggcacctgcacctacgtcaaagctaggcacgtactgtgcgagaagcaagggaagatcaatgaagcttacaagaagttgcaggatggctggttggacaacggggacaaggtccctcctgccgagtttgcaaagatagcccaagaatactctgaatgtccatctggaaagaaaggtggagatcttggatggttcccgcgtggaaaaatggctggcccttttcaggatgttgcatttagcacacctgtgggagctactagcgcaccatttaagtcaacgcatgggtaccacttcatcctctgtgaaggaaggaagaactgatcagtctgcttcaggttggaacagaagcacctcagtctatacaagatgcagatgcctcgtgtctctgtcaacttaataagcactgaatgacgggcatccatattctatgtttagcctttctaatgctctctgaaagagtcttgaaaaactgtgctttctgtaagtaacctgtggtgtcaagcatgacatctatttgggatatgctgagatttagcatttgtctgtgtctcttatctaattggcatcttgttagctattgttatgtctctaattggatggttcctcctcttacgacaaggcgggtcttgcctgaaaattagaaaatgcgtaaaccttgtgcgcc

SEQ ID NO: 109 - DNA, 634 bp, Oryza sativa
  ref <308>: DATABASE ACCESSION NUMBER: AK058291
  ref <309>: DATABASE ENTRY DATE: 2001-12-06
agtgaccaatccacactgatcccagtagctctcattgtcctcacgcttcgactcgcttgctagatctttgggttcttgtgtgttgtgatcgcgcgatgaggacggtggcgcttggcattgtggcgatggcctgcctggtggccattgcgcatggaggcaacttcttccaggacgcggaggtgtcgtgggggcagggccgcggcaagatcgtcgatggtggccgtgggctcgacctcacgcttgacaggagctccggctctgggttccagtccaagagcgagtacctcttcggcaagatcgacatgagctaccgccgcatgaggtgggtgcagaggaagttcatgatctacaactactgcactgacgccaagcggttcccccagggcacccccgccgagtgcaagctccgttgagatcgacacgagaagatgatcataacgtacgctacgcatgcatgatccgtcatcgatgaaaaaaatgatgagaagagcacgtcagatggcgaataatgaatgtgttttgttgccacggagatgtaaatgtagtatgcatatcgcattctttgatatctttttgtaacacggggtcgatgtacgtaccaagtttgataaattttagtgagctgcttttagcc

SEQ ID NO: 110 - DNA, 1566 bp, Oryza sativa
  ref <308>: DATABASE ACCESSION NUMBER: AK103932
  ref <309>: DATABASE ENTRY DATE: 2002-08-28
agcttgctgctgctgcattcttcttgatctgatcgtcggacatggcgtcgcccatgctctccgccgccaccgtgccactccagggaggcggcttgtcggagttctccggcctgaggagctcgtcgtcgctgccgctgcggcggaatgccacctccgacgacttcatgaacgcggtctccttcaggacccacgcggttggcacgagcggcggggcgcggcgggcgccgacggaggcgaagctgaaggtggcgatcaacgggttcggccgcatcgggcgcaacttcctgcggtgctggcacgggcgcggcgacagctcgcccctcgacgtcatcgccatcaacgacaccggaggcgtgaagcaggcgtcgcacctcctcaagtacgactccacgctcggcatcttcgacgccgacgtcaagcccgtgggcgacaacgccatctccgtcgacggcaaggtgatcaaggtcgtctccgaccgcaacccgtccaacctgccgtggggcgagctcggcatcgacctcgtcatcgagggcaccggtgtgttcgtcgaccgcgacggcgcgggcaagcacatccaggccggcgccaagaaggtgctcatcaccgcccccggcaagggtgacatccccacctacgtcgtcggcgtcaatgccgaccagtacagccccgacgagcccatcatcagcaacgcctcctgcaccaccaactgcctcgcccccttcgtgaagatcctcgaccagaagttcggcatcatcaaggggacgatgaccaccacccactcctacaccggcgaccagaggctgctcgacgcgagccaccgtgacctccggcgcgcgcgtgcggcggcgctgaacatcgtgccgacgtccaccggcgcggccaaggccgtggcgctggtgctcccgaacctcaaggggaagctcaacgggatcgcgctccgggtgccgacgccgaacgtgtccgtggtcgacctcgtggtgcaggtgtccaagaagaccctcgccgaggaggtgaaccaggcgttccgcgacagcgccgccaacgagctcaagggcatcctcgaggtctgcgacgtgccgctcgtgtccgtcgacttcaggtgctccgacgtgtcgtgcaccatcgacgcgtcgctcagcatggtcatgggcgacgacatggtgaaggtcatcgcctggtacgacaacgagtggggatactcgcagagggtcgtcgacctcgccgacatcgtcgccaaccagtggaagtgagaacgtagaagctgctgctgctgctgcctttgtaactccacctcgctccaaaaattttccccagacttcttccttcttcctctcgatcctttgtaatgagaatttcgaagtttcgagcgcccaacacagtttcttgtttctttctttgcttttcttccccacctcatctgacttttcactgtccggcacggattattatcgacttccggcaattggaaatcgcaatgctgtgtaatgttcatgtgtaataccgtatatactaccggacaccggttgccaggttctggtatagaatttcagcatgttgcttgggacc

SEQ ID NO: 111 - DNA, 1439 bp, Oryza sativa
  ref <308>: DATABASE ACCESSION NUMBER: AK103933
  ref <309>: DATABASE ENTRY DATE: 2002-08-28
aatcaagcagctgttttcttgtttggtccagagtggtgtaggtgattcggctagctcagcgcgaagatgggggagatcaccaatgtcacggagtaccaggccatcgcgaagcagaagcttccgaagatgatctacgactactatgcatctggggccgaggacgagtggactctccaggagaacagggaggccttcgccaggatcctgtttcgcccacgcatactgatcgacgtatccaagattgacatggccacaacagtcctggggttcaagatttcaatgcccattatgattgctccctctgccatgcagaagatggctcacccagatggagagtatgcaactgcgcgtgctgcatcagcagcgggcactataatgacattgtcatcatgggctacttcaagcgttgaggaggttgcctcaactggaccagggattcgtttcttccagctttatgtttacaaagacaggagggtggtggagcagcttgttaggagagctgaaagggctggattcaaggcgattgcgcttacggtggatactccgcgacttggccgtagggaggctgacatcaagaacaggtttgttctgccaccatttttgacactgaagaactttgaaggcctggagctggggaaaatggaccaggctagcgattcaggactggcttcttacgtcgccgggcaaatcgatcgcaccctgagctggaaggatgtgaagtggctgcagaccatcaccacgctgccgatcctggtgaagggagtgatcactgcagaagacacgaggctcgccgtggagaacggcgcggccggcatcatcgtgtccaaccacggcgcccgccagctggactacgtcccggccaccatcagcgccctcgaggaggttgtgaaggcggctcgcgggcagctccccgtcttcctcgacggcggcgtccgccgcggcaccgacgtcttcaaggcgctcgccctcggcgccgccggcgtcttcatcgggaggccggtggtgttctcgctggcggcggcgggggaggccggagtccggaacgtgctgcagatgctccgcgacgagttcgagctcaccatggcgctcagcggctgcacctccctcgccgacatcacccgcaaccacgtcatcaccgaggccgacaagctcggcgtcatgccgtctcgcttgtaaacaacaacgacggcgaacttgtcgccgtcgatcgatcaccggccggccgccgcgacacgctttgccggccgacggatgatcggccgggaatgaagaagaaggtagtagctgccgaagaaaagattggaagatgcaaagttctataattttggatgatgctgcgtcatgtacttttgttaattgtcgagtgattgatcacctgtacctaattaaatggtttattggattattggcggtttatactaaacgaacaaattaatacc

SEQ ID NO: 112 - DNA, 591 bp, Oryza sativa
  ref <308>: DATABASE ACCESSION NUMBER: AK058292
  ref <309>: DATABASE ENTRY DATE: 2001-12-06
gcgaggaaggggaagaggagagatcgagatcggagagatccatccatggcgctgcgagccctgatcagcgagatccgggggatgaaggtgcgggaggtgccggggtacctgaagccgcggctgagctgggagaacgtgaagaagagcagcgaccaggccgtcgaccgctacatcgacaagtacatcgagaccagctcgccggagccgctcttccacgtcatctacggcctcatggccttctcctacctcatcaacctccccaaggagcgccgccacctcgcccacctcgaggagctcgagaggcagggcgccgccggcgccgcccaccactagatccgaggtcaggacttggggtttgtctgtggttgattcgatctaacagaatttctgttcttccaccgatgagctacctggagttgtgatgatgttcgtttgatggtttattttgtacggaaagtcagcaaaaaactttccagtttattgttacattcctatgcatcttatcataagcaacttcaagctggaagtgcatgcattgtgattaaaaactttttcagttaatttgagcacagctgcttcgatatatactct

SEQ ID NO: 113 - DNA, 1221 bp, Oryza sativa
  ref <308>: DATABASE ACCESSION NUMBER: AK058293
  ref <309>: DATABASE ENTRY DATE: 2001-12-06
aaccccccctcaccaccacccacacattctcgaagaaggagaagaaggagaggagcagccatggcgtcgtcggtggcagcggcggcgagcacgttcctggggacgaggctggcggacccggcgccgcagagcgggaggatcgtggcgaggttcgggttcggcggcgggaagaaggcggcggcgaagaaggcggcgaggccgtcggcgccgacgacggacaggccgctgtggttccccggcgcggtggcgccggactacctggacgggtcgctcgtcggcgactacggcttcgacccgttcggcctcgggaagccggcggagtacctgcagttcgagctggactcgctggaccagaacctggccaagaacaacgccggcgagatcatcggcacccggttcgagaccggcgaggtgaagtccaccccgttccagccctacaccgaggtgttcggcctccagcgcttccgcgagtgcgagctcatccacggccgctgggccatgctcgccaccctcggcgccctctccgtcgagtggctcaccggcgtcacctggcaagacgccggcaaggtggagctggtggatgggtcgtcgtacctggggcagccgctgccgttctcgatctcgacgctgatctggatcgaggtgctcgtcatcggctacatcgagttccagcgcaacgcggagctggacccggagaagaggctgtacccgggggggtcctacttcgacccgctcgggttggcgtcggacccggagaagaaggagcggctgcagctggcggagatcaagcacgcccgcctcgccatggtcgccttcctcggcttcgccgtgcaggccgccgccaccggcaaggggcccctcaacaactgggccacccacctcagcgacccgctccacaccaccatcttcgacaccttctcctcatcctcttaatttaagctctttcgcgcgcaattcaaacgggatcgatgcgttggtgtgcgttcgcgcgcgctgtttagttttgtgatgacgagcgagctgggagggtatggagagaggagaggtcatccttttgttgattactacttaaattaggaaagctgggttggtggttaatggcgacttgcatggtggtgatttgtaatataagaacacccaagatgatgaattaatgcatccacttgtacatcgatcgatcgatcttggtatttgactaagtgagtgtgactgtgaatgcac

SEQ ID NO: 114 - DNA, 2291 bp, Oryza sativa
  ref <308>: DATABASE ACCESSION NUMBER: AK058294
  ref <309>: DATABASE ENTRY DATE: 2001-12-06
aaaccacaagagaattagaattttcctcctcccttcccttcccttcctctcgccgaaccaacgcggaagaaggagctcgcccgccggctagggtttgccgcacacccgccgccgagcagctagcaccggagtgttgggaggggaggctcgcccgccgccgccgccatgccgcagtcggtgctcgtcgaccgcgcgacgagcgagtcgctcatcgggcccgactggtccctcaacctcgagatctgcgacatcctcaaccacgacccctcccaagccaaagatgtagtgaagtctatcaagaaacgcattgggcacaagaactcaaagatccagcttctcgcactaacattgctggagacactgattaaaaattgtggagactttgttcatatgcacgttgctgagagggatatactccatgaaatggtgaagatagctaagaaaaagcctgattatcatgtaaaagagaagatactaattctgatagacacttggcaagaagcttttggtggttcccgtgcaagatatccgcaatattatgtagcatatcaagagctcctgcgcgctggagctgtatttcctcaaagaccagacagctctgtgccaatctatactcctccacagactcaacctctacggaatcttcctccagctctgcgtaatactgagcgtcaacaagaagcacctgaatcttcttcaacaccagaagtacctacactgagtttgacagaaatccagaatgcacgtggtgtcatggatgttctttcagagatgttgaatgctattgatcctggcaacagagagggtctaagacaggaggttattgtggaccttgtggatcaatgtcgttcttacaagcagagggtggtacagcttgtcaactcaaccacggacgaggagctgctaagccagggtctttcattgaatgatgatttacagcgtgttcttgcaaaacacgatgcaattgctgcaggcatagcagttcgtgtagaaaaaccaaaatcagtccaggcccgaggggacaagtctccatcaatcaaaccagaaggggcaaaacagccagatcagaggtcttctgaagctgccagtaccgtgactccatttgagcaattagcgcttccagcacctgcatcatccagcagttccaaacctcctgtagaaccagctgttggccctagtattgacctacttagtggtgatgactacttcaagccagaacctgttaattcccaggcccttgtttctgtaggcaatccacctgctgcttcagccaacaataccttggacctggtagacatgtttgcacaaagcaatgttggcaacaacccgaaccctgctgtcacctcttctatgttgaattcaaatcctagtctctctgagccacagctgtatccctcacagcagactgtgccaccacaacagccttctccatactctaatgggttaacttcaaatacaatggcaccgtatgatcaaccctctgacataaacgccacaggttcatggaatagtcaatttgctcatggaatgcttcctccacagcttcctccacaacttcctccacagcaaccaccaaattacggtcaaggtcaagatcagagtggtgatctcccaccaccaccctgggaaactcaacctgcagaaagtgatcaattccagcctgggcaacctcgtgggctagcaatgccatcagggcaaattggaggcactcaatcccaacctgttcaagttcagcccgggcaagttgcaccattacaaccaatgctgaccgggcaacccacaggaatgcagtttcagcaagggtttggggatcagcttggggctcaacaaacacaacccttgcacacacaatatggtggaatgtatcctacaatgcaaggtaaccaatcagctggcatgtatccccagcagatggctggagatttctaccagcaacagatgtatggtggtcagatggctggttatggatacggtcagcagtctggaggatactatgctccaaacgctgcgtatgggtatggcggtgcaaacgagctttctcagggaatgaatggccttgcagtgcaagataacagtttgtatggaacttctgcatcctcttccttccagcagccaatgaggccatccagacccgaggattccctctttggtgatcttgttagcattgctaaaacaaagcctagcaaaactgcagctaataaggctggtggcttgtaaagatgagtggatgcttattaacacttgtggccgcggagatagcttttcctcatagtacataagttctttgaatt

SEQ ID NO: 115 - DNA, 1463 bp, Oryza sativa
  ref <308>: DATABASE ACCESSION NUMBER: AK058295
  ref <309>: DATABASE ENTRY DATE: 2001-12-06
gcgccaccaccaccaccgttcgtccgctcgccgcgtcgacgagcccctcctccgcttcgcgcttcgtgtcagggtttggagtggagtggagggggaaggaaaagggggagggatgatgcacgcgaagtcggagtcggacgtgacgagcctggcgccgtcgtcgccgccgcggtcgccgaagaggggcggcggcgtgggcgtgggcggcgcgaactactacgtgcagagcccgtcgcgggagtcgcacgacggcgggtacaagtcgtcgtcgatgcaggcgacgccggtgtacaacagcccgaacgagtcgccgtcgcacccttcctacggccgccactcccgctcctcctccgtcagccgcttctccggcaccctccgcgacggctcccgcaaggccggcggcgagcgcaaggcgctcaacgacaagggctggcccgagtgcaacgtcatcgaggaggagggcccctacgaggacctcgccggcgacaccggcctctcccgccgctgccagatcgtcctcggcttcctctgcttcgtcctcctcttcaccgtcttctgcctcatcatctggggcgccgctcgcccctacgagcccgacgtcgtcgtcaagagcttgacgatggatgatttctacgctggtgagggcacagaccacagtggggttccaaccaaattggttacactgaactgctctctgcacatagctgtatacaaccctgcttcaatgtttggaatccatgtcacgacgggtcctattcgccttctctattcagagatctctatcggggttggacaggttcgcaggtactaccagccgaggaagagccaccggttggtgacggcggtggtccacggcaacaaggtgcccctctacggcgccggcggcgggctgatgctgtcgagctccggcggcgcggtgccattgacgctggacttcgacctcacctcccggggatacgtcatcggcaggctggtgagggtgacgcacaaggtgcacgtgacgtgccccatcgtcgtcgacgccaagaagacgaagcccatcaagttctccaagaaggcctgcgccgtctacaagatctgagaggccatcgtcgccgccgccgtcgccggtcgtcgtccatcacgccggcggcgggcgtcgcctgcagtgatcgatcggcgacggagccgttcttctgttcttgcagttgttgtatgtattatgcttgtgaagaacaataagcgtttatatggtcacttgttaattttacttgagcttcgattttgttgataaatcagtaaatcactttgtatggtagtagtgttttattttctctgctttctttctttcctgaggaaactatgtaccgaagtgtggtactagagtcagtctagatggttttacgttaaagatcaccatgtttacagtttcgcatggacaatcactgcattttgttttgaacagagcatattaaacagcaagc

SEQ ID NO: 116 - DNA, 1426 bp, Oryza sativa
  ref <308>: DATABASE ACCESSION NUMBER: AK058296
  ref <309>: DATABASE ENTRY DATE: 2001-12-06
atatcacacttgcactgagcactggacgcgtcacattcacaacagcatactatagtcagatatagttgtgattaattagtgggtagagtgtgatacctggactttgagagctagaaatggcaccgacttcgacgttcccggtcatcaacatggagttgctcgccggggaggagcgacctgcggcgatggagcagctggatgatgcttgcgagaactggggattcttcgagatcctgaaccacggcatctcgacggagctgatggacgaggtggagaagatgaccaaggaccactacaagcgtgtgcgcgagcagaggttcctcgagttcgcgagcaagacgctcaaggaaggctgcgacgacgtgaataaggcggagaagctggactgggagagcaccttcttcgtccgccacctcccggagtccaacatcgccgacatacccgacctcgacgacgactacaggcgcctcatgaagcgcttcgcggcggagctggagacgctggcggagcggctactggacctgctctgcgagaacctcggcctcgagaagggctacctcaccaaggccttccgtggccccgcgggcgcacccaccttcggcaccaaggtcagcagctacccgccgtgcccgcgccccgacctcgtcgagggcctccgcgcccacaccgacgccggcggcatcatcctgctcttccaggacgaccgcgtcggtggcctccagctgctcaaggacggcgagtgggtggacgtgccgcccatgcgccactccatcgtcgtcaacctcggcgaccagctggaggtgatcaccaacggcaggtacaagagcgtgatccaccgggtggtggcgcagaccgacggcaacaggatgtccatcgcgtcgttctacaaccctggcagcgacgccgtgatctcccctgcgccggcgctggtgaaggaggaggaggccgtcgtggcgtaccccaagttcgtgttcgaggactacatgaagctgtacgtgcgccacaagttcgaggccaaggagcccaggttcgaggcgttcaagtccatggaaaccgagacctccaaccgcatcgccatcgcttagcaaccccggcctcgctcgctctgttctgtgtactgtgtgtgtgcatgaactgtggtttcgtcgtcgttttgtgatactcctacataggattcgtcagagtggttcgtactgtactgaataaaagagcatgcagctagccaggtgtagccgtgtaggtatgaatagattactactcgcgacgagctcgaaagtttgtaccgtgtcggattcttatttcgatccgtgtcatagcaagtccctgtttatttcttggctactagtactaagcactgcctgcagtctcctcgtgaccttgcctgtatcttggtttggatgcattattaccttgatttttttttggc

SEQ ID NO: 117 - DNA, 1130 bp, Oryza sativa
  ref <308>: DATABASE ACCESSION NUMBER: AK058297
  ref <309>: DATABASE ENTRY DATE: 2001-12-06
agataagaagagatcaagattcttcagcttccctttcggagaaatctaatgttgtacaaacaccagttcatcaaatgggatcagtttcatctctgccaagtaagaaaaactcaatgcaaccacacaacaccgaaatgatggtgagaacagcatcaacccagcagcaaagcatcaaaggtgattttcaagcagtaccgaaacaaggtatgccaaccccagcaaaagtcatgccaagagtcgatgttcctccatctatgagggcatcaaaggaaaggattggccttcgtcctgcagagatgttggccaatgttggtccttcaccccccaaggcaaaacagattgtcaatcctgcagctgctaaggttacacaaagagttgatcctccacctgccaaggcatctcagagaattgatcctctgttgccatccaaggttcatatagatgctactcgatcttttacgaaggtctcccagacagagatcaagccggaagtacagcccccaattctgaaggtgcctgtggctatgcctaccatcaatcgtcagcagattgacacctcgcagcccaaagaagagccttgctcctctggccggaatgctgaagctgcttcagtatcagtagagaagcagtccaagtcagatcgcaaaaagagccgcaaggctgagaagaaagagaagaagttcaaagatttatttgttacctgggatcctccgtctatggaaatggatgatatggatctcggggaccaggattggctgcttgatagtacgaggaaacctgatgctggcattggcaactgcagagaaattgttgatccacttacttctcaatcagcagagcagttctcattgcagcctagggcgattcatttaccagaccttcatgtctatcagttgccatatgtggttccattctaggtttgtgtagtgagatggagtaggtgagaagtagagagatgttgggagagagctgtgtgggtctgggagattatggttccctgccacagttttccagctttgttccagagcgtttcttgtttcaggttgctgagcctgtcaaacttcatgtaatgttgtatttttgcttcgtttattgcagcaattgaacttcaaatgatcatgttgttgagg

SEQ ID NO: 118 - DNA, 1035 bp, Oryza sativa
  ref <308>: DATABASE ACCESSION NUMBER: AK103934
  ref <309>: DATABASE ENTRY DATE: 2002-08-28
gtgctcagtttcactcttatcagtgaattagatcatatacttgtgtccttgatagctcgttaatcagcatggctaggtcactcgctgctgtcctactccttttggtcgccgccgcgggagccagccatgccgcgtcgccggcggagatgtactggaagatcgcgctcccgacctcgccgatgcccggcgccattcgcgacctcatcagcccagcgagctcagtgggctcagcttcgaaggaggacacggtgggcaacgtgttcttcctcgagaaggacctcttcccgggctccaagatgacgctccacttcacccgcgccaccgccggcgccgcgctgctcccccgcggccgcgccgagtccgtcccgttcgcctccgaaaggctcccggagatcctctcccagctctccatcccggccgtctcgccgaccgccgacgccatgtggtccacgctcgccgagtgcgaggccgcgcggctcgccggcgagacgaccaagcacaagcactactgcgccacgtcgctcgagtccatggtcgagttcgtcgcgtccagcctcggcacccgcgacgtccacgccgtgtccacggaggtgatcagcacgttgacgccgacgccgaggcaggcgtacagggtggaggccgtgaggcccgtggcggtgcccggcggcgacatggtggcatgccacgggatgccgtacgcgtacgccgtgttcgggttgcacgggctcaagggcgcaggcggtggccgcgtgccacggggacgtggacgggcacggcgcggtggcggaggcatacaagaggctcggcgtggcgcccgggagcgtggccatctgccacttcctgcctcaggacgacatgatctgggtgcgcaactgaattaatgaagcagctaccttgcgcgccatccatggctaattattttagacatgctccttcctatattttggatctacctgccggctatcatgttatcataaatttacgcgtgtgcgcgcgacgatccgacatgcccacactaacgtgttttactttgtt

SEQ ID NO: 119 - DNA, 248 bp, Oryza sativa
  ref <308>: DATABASE ACCESSION NUMBER: AK058298
  ref <309>: DATABASE ENTRY DATE: 2001-12-06
cagaagaagaccgaaggagatgaagcatcaagccttgtttctccagagcgtgttgaaaaatctcgtccttatggatagtatggttgtgccttataattcacatatgctatgttaccttccttccctcaattgtgccttagttgcatacctgcatgtttcttcggtaacatttgatgcttatgctcagctttgtcatttttgttgtaatcagaatgatgttaatggacaggattgttatctatgttgtc

SEQ ID NO: 120 - DNA, 1764 bp, Oryza sativa
  ref <308>: DATABASE ACCESSION NUMBER: AK103935
  ref <309>: DATABASE ENTRY DATE: 2002-08-28
ttttttctcctcctctccccttccaccgaaaccctagggatggcgtcgccggcgtctcggtgcgtcctgctggatccaggtgtgcccgactacgtgttctccatcggtccaacagaacaagggtgggcgtctatcgacttgaagaagaagaggtaccaagggtgcgggaggtacggccccttgttggcggagagcgtgaagctctatgtgcgcctcgccgaggagcacccggctctctctcggttggccatctgcgccgacaagaatatcatccgcaacatcgtggcggaagaactcaagaagaagaaagcttccaaggccgccgaatcttcatcccccggcctcatggtgccggatctggcgattcgcgccatcgagttcgacaagatcgatgagatctcaggtgtcactgcccgcgtcgaggtcgcagacaagaacctcatggtcctctccctgtccttcgtcttcacatctagcaagcactacctcctctatgatgccattcacgcatccatgtccatgatccccatcccgaattggtgctgcgatatctacttaccgtcgaaccctctccctgtgcggtacggtgatgagtacgccctagtcctctttgccaagaactatccctacaagagagaaggacgatccacctgcattgacttgctctacctgtggacgcctccaaagtcgtcgtcgcctccaacgttgctgccaccgccgccaccgccgccgcgagagaagatgtacccgaatccctccggtgaaccgtggcacaccaggaaaccgcgcttctcgaaggagacgccagcgtccttctgccaccacgtcaagttcacatccagtagccatgctttctgggctgatctcaccaagggcgtcctgtgctgccgcatcaaggacctcttggacagcttcttcgtccattttgacttcattgagttgccccctgggtgcaagtctgacgcccttgatgactccgatactgggccagcggagatgttccgaaccatgggctgcagcactggggacttgatcaagtttgtctccatctccttcgatgattctgtgccggaggacgacaagacggtgacggagtggacactggacatgggtaccttgcagtggaccaagggcgaggagctgcgcttcggaactctgtgggaactggatgacttcaagaaggatggattaccggagaccgagccagtgtaccccctgctgagcatggaggaaggcgatggtggagacctttacttcatactgtccaggccaatcatgcggtgggaggaccctgcggtgcaccacgtctgccgattcaacatgacaagcaagaagcttgtgtccaaccctctttcctggcgcccagataagattgttccttctggtttgttgggctgtgaattcttcagacaccttgatagtcagcgccttgttcctgacaataggaagatggatgcgggcaaagtgcaatcctgggtcgagatggagtcagcattggaggaagttgatgaaagcatgcagagagagatatcacggaagcaaatggtgtggtccgggagccagctagatttgttttgccaggcaaattagggagatcaaatgctgattagggagatcggactctgaattccatcattcgatgtccacaagctgggttctttaatacttctgtttattggtaccagtatgtttttgcttgtcgatctcacaaccttatgtatgcactgaagtaatttgaatttatcttgggtgaactgcttttgc

SEQ ID NO: 121 - DNA, 650 bp, Oryza sativa
  ref <308>: DATABASE ACCESSION NUMBER: AK058299
  ref <309>: DATABASE ENTRY DATE: 2001-12-06
atgttcttagagtaggaggtggtgaggtttcagtgcccttcttacaagagaaagacatcccttcacatatacgtgatgaagagaaactatcgaagctagcatctctcagccaaggagctgctggagaatcgtcaacggcacgggagaagactcctgatgcgccaccacgagctcctactacaggtgctccagctgtgaatcctccgcaaccacagggaggaggagatttcgaagcaaaagtcacgaaactggtggaacttggattcggccgggcatccgtaatccaagctctcaagttgttcaacgggaatgaggagcaggctgctgctttcttgtttggtggttagagtcttgtgatgatgatttgagagagttctttctattgctcacgaccctttcaagggctgaacattttatacacagtgatggagggagatatcagtatatcacctcttgggcctttgtgaaactagaacttctgtttggccaatacaggcttttggtttagagatgatggttcatatttctccttccatagaaaacccattttcttgccttcagtacctgatacaaagatcatgtgcatttcgatctcatttgtttgccaatgatgtgaattattggtctcatatatatggtcctcacaggtg

SEQ ID NO: 122 - DNA, 1392 bp, Oryza sativa
  ref <308>: DATABASE ACCESSION NUMBER: AK058300
  ref <309>: DATABASE ENTRY DATE: 2001-12-06
tgaaatgatcgagcagaggagtgcgtacctccaggagcaaattaaccagccagatgcctcgcctgaagaatactcaagggccaacaaggagctccacaaattggagagtactatggatatgatcgaggagctgcggtccaaacaggaggaaattgagggtttgaaatccttgatgacaaactctgttgaagagaaggacttccgcgagatggcagctcaggagctccttcaggctctggaggaggagaaacaactgcagcacaagctgtttcgatcattacttccaaaagatgaagctgacgagagggattgcatattggaggtccgtgcaggtactggaggagaagaggcgtctttgtttgcaatggacatatttaaaatgtacgagaagtactcccaaaagaatggttggaaattcgatgctattgatatcatggagtctgcattaaaaggatacaaggaagctagtgggactatatcaggtcctggggcatacgggaaactcaagtttgagagtggcatccatagagttcagcgagtaccagtaacggagaaatctggacgggtgcacactagtgctgtatctgttgctattcttcctcaagctgatgaggttgatgtacaattgcgcaatgaagacttgagaatcgatacctacagatcaggtggttctggaggtcagtctgtcaatacgactgatagcgctgttagaataacccatgttccaaccggaacagttgttgcgatacaggatgagaggtctcagcatcagaataaggccaaggccctcaaagttctccgagcaagactatatgaaattgaaaggcatcgactccatatggaccggtcaaagcttcgatcagagcagattggaagcggtgacaggtccgaacgtatccgaacatacaactttccacaagggcgtgttaccgatcatcgtgttgggatcacgcaccactccatagaagatgttatggagggggagagcttggatatcttcattgatgcgctcctcctgcgttatgaaatggacgcaatcgcttcatttgcttcttaagtcatactggttttgtggtttcttttagcatcaactacatcgggaccaaacagagaaggaaccatgtatacatcgcactgaaccggcagagacaacgtcaagaatcttgagttctcaagttttccttattctcaatgtataagcatgtagcttaggatcatagctgtatcgcccattattctgaaagcagtagcagccaaacagtttttcttcatattttttatcgcgccgcaagttatttgtgggcaactgaatcacgagtggctgccacatcggtgttcagtcaaatgggattacaattttgacagagataaatgggattacaaatttgacag

SEQ ID NO: 123 - DNA, 849 bp, Oryza sativa
  ref <308>: DATABASE ACCESSION NUMBER: AK058301
  ref <309>: DATABASE ENTRY DATE: 2001-12-06
agtcatggcactcgcctggttgccctgttggacctcaggtcttcgacaggcttgagaggaagtacaataagatatctgcatggccaagaccagaaaggaggcttctgtttgatcttgcaaatactgttctttctgagatccttgcaccatggaaatccagtagacggtgttgtcctgtttggggccctgaagggcctgttgaggtggtttggcaaacaatggtcaggcggcaggaagagcttgcagtaggacatcctgatgacaaagttcttgatccagaatggctggaagttggtgaggacatcaatacggtgggaaagcagatagccaagatgttacatggtgatctcttggatgaaattatattggagttcctctcaggatgtgttgcttcatgaggaaaattagtttctacttcgtgctacaccaatactaacagtactcgagttcaatggcattactgcaaagccagagttttgcctgaagaaacttgaaccacattgttcggtgccagtaacagcgtttcaaagtgcacatatgttgcccttttctggtccatatgatagaggctctgtttgacatttcattacaccttggggccttaatatacagggtctgaagggacaaaagatgtatgcacataccttgacgtgtgtagaaatgtgatcttttaggatatctttgcttgttatcggggtttcaaactgttcaaaaatcttaaggcaaatgtgtagcacattttagagtaaactaacatctgaagtcttgtaatttgttcagtatgtaatctgcaatcgcaaaatatttaaacaggagaataggtgaagaactgacgtgttttttcccctc

SEQ ID NO: 124 - DNA, 1450 bp, Oryza sativa
  ref <308>: DATABASE ACCESSION NUMBER: AK103936
  ref <309>: DATABASE ENTRY DATE: 2002-08-28
aaacgcaaaccgcatcgatcaactccttccccaagtcgaagcaaaatccctagcgatgtcgtcgccgccgcccgccgccgccgccgcgatggccgtcgacgacgccgacgacgaccagctcgcctccatgtccacggaggacatcgtcagggcaacccgcctcctcgacaacgagacccgcgtcctcaaggatgagctgcagcggacgaaccttgaggtggaatcctacaaggagaagatcaaggagaaccaggagaagatcaaactcaacaagcagctgccttaccttgtcggcaacatcgtcgagatattggaaatgaaccccgaggatgaggctgaagaggatggtgcgaacatcgatctggattcacaaaggaaaggaaaatgcgttgttttgaagacatccacaagacaaacaatattccttcctgtaatcgggcttgttgaccctgaaaagctcaagcctggggatttggttggagtcaacaaagacagctacttgatactagacacgctaccttcagaatatgattcacgggttaaggcaatggaggtagatgaaaagcctacagaggattacaatgacattggtggccttgagaaacagattcaagagcttgttgaagcaatagtattgcccatgactcacaaggaccggtttcagaagttgggaattcgccccccgaaaggtgttcttttgtacggaccacctggcactggaaagaccctaatggctcgtgcatgtgctgcccaaactaacgccacatttctgaaacttgctggtccacagcttgtccagatgttcatcggtgatggtgcaaagcttgtccgtgatgcctttcagcttgcaaaggagaaatccccctgcatcatttttattgatgaaattgacgcaattggaacaaagcgttttgatagtgaagttagtggtgacagagaagtgcagcgcacaatgttggagttgctgaatcagctagatggattcagtagtgacgagaggataaaggtgatagctgcaactaatcgcgcggacattcttgatcctgctttgatgaggtctggtaggctggaccgaaaaattgagttccctcatccatccgaagaagcacgagctagaattttgcaaatccattcaagaaaaatgaatgtaaaccctgatgtcaactttgaagagttggcacgatctacggacgacttcaatggtgcacaactgaaggccgtttgtgtagaagcaggcatgcttgccctacgccgagatgctacagaggtgacacacgaggatttcaatgaagggatcatacaagtgcaagccaaaaagaagtccagtttaaattattacgcttaattcttccgagagagttattaggcctaaggaaacgctccgtccaaaattgtttgtttgtaacactaccgttttatatatttgtgtggttcaagatgtgattgtacg

SEQ ID NO: 125 - DNA, 1290 bp, Oryza sativa
  ref <308>: DATABASE ACCESSION NUMBER: AK103937
  ref <309>: DATABASE ENTRY DATE: 2002-08-28
acgatacaacccacacggacacggccacaccacccaccaactgagagctgagcaggcgagcgagcggacatggcagcatcgctccaagccgcggccaccctgatgcagccggccaagctcggcggccgggcctcctccgccgcgctgccatcgcgcccgtcttcgcacgtcgccagggcgttcggcgtcgacaccggtgccgccggcaggatcacgtgctccctgcagtccgacatccgggaggtcgccaacaagtgcgccgatgccgccaagctcgccggcttcgccctcgccacctcagctctgctcgtctcgggcgccagcgcggagggcgtgccgaggaggcttaccttcgacgagattcagagtaagacgtacatggaggtgaagggaaccggcacggcgaaccagtgcccgacggtggagggcggcgtcgactccttcgccttcaaggccggcaagtacagcatgaagaagttctgcctggagccgacgtccttcaccgttaaggcggagggcgtggccaagaacgcgccacccgagttccagaagaccaagctcatgacccgcctgacctacaccctcgacgagatcgagggcccgctcgaggtcagctccgacggaaccatcaagttcgaggagaaggacggaatcgactacgccgccgtcaccgtgcagctgctgggaggcgagcgcgtgccgttcctcttcaccatcaagaatctggtcgccaccggcaagccggagagcttcggcgggcccttcctcgtgcccagctaccgtggttcgtccttcctcgacccaaagggccgcggtggctctaccggctacgacaacgctgtggcgctccccgccggaggcagaggagacgaggaggagctcgctaaggagaacgtcaagaacgcctcgtcgtcgacgggcaacatcacgttgagcgtcaccaagagcaagccagagaccggcgaggtgattggcgtcttcgagagcgtgcagccgtcggacacagacctcggcgccaaggtgcccaaggatgtcaagatccaaggggtgtggtacgcgcagctcgagtagggaatgaacaaatgttttgtgcgtggccgggttgatatatcgatacatggagagagggaaggaaggctgcaatgtgtgtatctagtaatgcaaactcgatcgggctgttgatggttttaatttttagcttttgtttcttcctctgttctcgtgaactgatgatcatatcccccgatgatgttatttgcatttcgacaagcggagaggacattgtacgat

SEQ ID NO: 126 - DNA, 1257 bp, Oryza sativa
  ref <308>: DATABASE ACCESSION NUMBER: AK103938
  ref <309>: DATABASE ENTRY DATE: 2002-08-28
acaagctctccgctcagctaagctctccaccattgcttgcaaagctggtcgtgtcactcctcccgttaagcttcccgcggcggcgagagcaagctaagctaggtcgggcatggggaaggacgaggtgatggagagcggcggcgccgccggcgagttcgcggccaaggactacacggacccgccgccggcgccgctgatcgacgcggcggagctggggtcgtggtcgctgtaccgcgccgtcatcgccgagttcatcgccacgctgctgttcctgtacatcaccgtggccacggtgatcgggtacaagcaccagacggacgcgtcggcctccggcgccgacgcggcgtgcggcggcgtgggcgtgctcggcatcgcgtgggcgttcggcggcatgatcttcatcctggtctactgcaccgccggcatctccggcgggcacatcaacccggcggtgacgttcgggctcttcctggcgcgcaaggtgtccctggtccgcgccatcctctacatcgtggcgcagtgcctcggcgccatctgcggcgtcggcctcgtcaaggcgttccagagcgcctacttcaacaggtacggcggcggcgccaacaccctcgccgccggctactccaagggcaccggcctcgccgccgagatcatcggcaccttcgtgctcgtctacaccgtcttctccgccaccgaccccaagcgcaacgcccgcgactcacatgtcccggtcttggcgccgctgccaatcggcttcgccgtgttcatggtccacctggcgacgatcccgatcaccggcaccggcatcaacccggccaggagcatcggagcggccgtcatcttcaacaacgagaaggcgtggcacaaccattggatcttctgggtcggcccgttcgtcggcgccgccatcgcggcgttctaccaccagtacatcctccgggccggcgccatcaaagccctcggctccctcaggagcaacgcgtgatatcaaaggagttcgagcagccattgttgggggataatggctggaaggcgttgatgaagcaattggccatgatgatgagttctaccgtgttatgattctccctttttcaaaaaaattaagttcgccgctggtcgttttgtttcagcagctgctcctcctcctgcttgtcgtgtgtgtgaagtgaacatccatgtgtttgtaatctgtttttaaatcgagggatgtctcatgtgtttagcctgtactcccatttaatttagcgacgataagcatcg

SEQ ID NO: 127 - DNA, 1402 bp, Oryza sativa
  ref <308>: DATABASE ACCESSION NUMBER: AK058302
  ref <309>: DATABASE ENTRY DATE: 2001-12-06
accccaagtgcttggattttgcagctgctcccctgatccggttcagataggctcttcttgacaggatcaccatgtctgcctttgtgggaaaatacgcagatgagctgatcaagacggccaagtacatcgcgacgccggggaagggcatcctcgccgccgacgagtcgacgggcaccatcggcaagcgcctggccagcatcaacgtggagaacgtggagcccaaccgccaggcgctccgggagctcctcttcacgacgcccggcgcgttccagtacctctccggcgtcatcctcttcgaggagacgctctaccagagcacggccgccggcacgccgttcgtcgacgtgctcaaggccggcggcgtcgtgccggggatcaaggtggacaagggcaccgtggacatcgccggcaccaacggcgagaccaccacccagggcctcgactccctgggcgcgcgctgcgccaagtactacgaggccggcgcccgcttcgccaagtggcgggccgtgctcaagatcggcgccgccggcgagccgtccgagctcgccgtcaagcagaacgccgagggcctcgcccggtacgcgctcatctgccaggagaacggcctcgtccccatcgtcgagcccgagatcctcaccgacggcgcccacgacatcaagacctgcgccgccgtcaccgagcgcgtcctcgccgccgtctacaagtctctcaacgaccacaaggtcctcctcgagggcaccctcctcaagcccaacatggtcacccctggctccgacagcccaaaggttggcgcggaggtgataggggagtacacggtggcggcgctgcggcgcacggtgccaccggcggtgcccgggatagtgttcctctccggcgggcagagcgaggaggaggcgtcgcagaacctgaacgccatgaacaagctggaggtgctcaagccatggacgctcaccttctccttcggccgtgccctgcagcagagcaccatcaagaagtggggcggcaagaaggagaacgtcgccgccgctcaggctgccttcctcgcccggtgcaaggccaactccgaggccacgctcggcaagtacggcggcgccgccggcgacgccgccacgtccgagagcttgtacgtcaagggctacacctactagaattcgtcccaatcactgggtggcgcctatgcggccgtgcctatgacagtagtagggtctcggtccaatccgcgtggcccacgtggcggtgcggattgcatcaagattcgtgcggatatacatgtgttcctttctgctgtatactctcgattctctgcttccttcccctctagctcttatattttaacaaaagctgcgtctaaatgttcatctctttgcagtttatttgcaatgcaaactaatatgaatacttc

SEQ ID NO: 128 - DNA, 1623 bp, Oryza sativa
  ref <308>: DATABASE ACCESSION NUMBER: AK058303
  ref <309>: DATABASE ENTRY DATE: 2001-12-06
cggatagtttgcaaaagatggaaccgtctcttatctgggaattactattattccttgcgcaagagaaacgggatggcggaagaatgggtttatgtctttaaaagggaccgtgaaggaaagatatcctggcatgcctttgacccactgcaccagctatggaagtcacttccaccagttccagcagaatattcagaagcattaggctttggctgtgctgttctgagtggttgctatctgtacttatttggcggtaaggatcctctgaggggctctatgaggcgtgttgtattttacaatgctcggacaaacaaatggcaccgagctccagatatgttacggaaacgacacttttttggttcttgtgtcataaacaattgcttgtatgttgctggtggggagtgtgaaggaatacaaaggacactcccgtctgctgaagtttatgatccaaataggaacagatgggcctgcgttgctgaaatgaacaatgggatggtacctttcattggagttgtatatgatggcaagtggttcctgaaagggcttgattcccatcgccaagtgacgagtgaagtctacctaccatcatccaatttatggtcaaccattgatgatgaaatggttaccggctggcggaacccaagcattaccttcaacggaaagctctattcatctgattgtcgagatggctgcaagcttagggtgtatgatccaaacacaggaacatgggcaaaattcatggacagcaagcaccacctgggcagctcgcgcgcctttgaagctgcagcgttggttacattaaatgggaagctttgcatcgtccgcaacaacatgagcatcaccctggttgacatctccgacccaacgatgagcattgagactgacagtgcacgcatgtgggagactgttgctcggaagggccagcacaggtcattcgtggcaaacctgtggtcgaccatcgcaggaaggaacctgaagagtcacattatccattgtcaggttttgcaggtttgaggtcagcctgttgtgaatctgaacataagcaggctagtagaaacaatccctccattgaaaggtcaattagattccataccgaaattgtggcagaagaagctcattgcccaaacagatctttgttcattagattaccagaaaacaccaattcagtattctggaaatttgaagctactcataaggtaggagatggatgccgaaaacttttgtgcaaactggaaactgagaagagaacttccttaatagttgcggtgataggggggagaatatgcatcggtggataacatttcactaagttggaatatccatcttcagcctctcactgtcactgatcactgtacttatctatgttgtatcatgccctcttggcatactgcttagtgtgcttaatgttggctctatgttgtagcggcagattagacttgagagtagagaagtaataagcctattggttactgtacttgaaaaatccgtatgtcctggtatcatgtgctgtaaatcttcgtaattacccctccaactctccaagcatttcattgcaccaatcctgtttctctatttaatttaatgtttagatgatttgagctgaaatgaagatactatgattgattg

SEQ ID NO: 129 - DNA, 1589 bp, Oryza sativa
  ref <308>: DATABASE ACCESSION NUMBER: AK103939
  ref <309>: DATABASE ENTRY DATE: 2002-08-28
atcatagacgattttatcgatgaacctgaaatagacatggcttgccacttgagattatttccctttactcaactactagtattggttctgtacaaaatcgccgccgtaggggcagatcctgcaaacgcagaactatccacaaagatcacccaacactctccattgtacaacccacagcctcaagactttccaaacgaggagctctaccgcaactatctagtcatccagcggttcaagaagacaatcacttccgaccccaagaacatcaccgccacctggaccggccatgacatctgcggcaacacgacctacctcggtttctactgtgcagcattgcctgggcgtactaagaagcccacggtcactgtggtgatctttaacggttatggcctgcgtgcaccgaagctggaaggatttattgaccatctccccgatcttgcacttttccatgctgcctccaacgacttcggtggtgacatcccctacctcacaggcctcgcctacaactacaagatcaatgtcgacagcaatctccaaatacaggatgattttagtcgtgacatggtcgggtcgcatgtaacaactaaagttcatggttattgcgttaatttagatctagatatcacatttcacctccggcccggaaaagacgacaagaaaggacgaagcatccccggtgccacagattctaaggcgctcctcctcaactacaatcacctgtccgggccattaccggtgaacatcggtttctccaagttaagctacctggccctcgccaacaacaggctcaccggcgcaatcccgccatcaatcttgcatttgcaagactccctcctcgaggtgctcctcctgaacaaccagctctccggctgcctcccccacgagctcggcatgctcaccaaggccgcagtgttcgacgccggcatgaaccagctcaccgggccgatcccctcctctttctcatgcctcaccagcgtcgagcagctcaacctgggcggcaaccgcctctacggagagatccccgacgcgctctgcaagctcgccgccgtcccagccggccgcctcgccaacctcacgctgtcgagcaactacttcacgtcggtcggaccggcgtgcttgtcgctgatcaaggacggcgtcctcaacgtcaggaacaactgcattccgggcttcgccaaccagcggcggccggcggagtgcgcgtcgttccacagccagccgaaggcgtgcccggcggcgagcgccacccacgtggcgtgccccgccggagctgccaacgctgcggcggcgccggcggacagggtggtcaaggactactccagctacgtgacgtacgccaccctgcacgagtgagcccggcgccacggcacgggcgcacgacgtgcgtgcatgcatgcagtaggggacagctagaagctagcgtctcggggtggtatttgctcttgtattcttgtgttcgtttgttgtgctcgtgagtcgtcattgtggtttgttttctctgcacgtgtggctagctatggctgtcacgtctagatctcacctcctgtactcttgtgtactgtactatgtgaaaatcattggtgattact

SEQ ID NO: 130 - DNA, 1384 bp, Oryza sativa
  ref <308>: DATABASE ACCESSION NUMBER: AK103940
  ref <309>: DATABASE ENTRY DATE: 2002-08-28
accaacacgaagcaaaaggacaccagaaacatagtacacttgagctcactccaaactcaaacactcacaccaatggctctccaagttcaggccgcactcctgccctctgctctctctgtccccaagaagggtaacttgagcgcggtggtgaaggagccggggttccttagcgtgagccagaaggccaagaagccgtcgctggtggtgagggcggtggcgacgccggcggcgccggtggcgagccccggcgcgggcacgtcgaaggcggacgggaagaagacgctgcggcagggggtggtggtgatcaccggcgcgtcgtcggggctcgggctcgcggcggcgaaggcgctggcggagacggggaagtggcacgtggtgatggcgtgccgcgacttcctgaaggcggcgacggcggcgaaggcggcggggatggcggcggggagctacaccgtcatgcacctggacctcgcctccctcgacagcgtccgccagttcgtggacaacttccggcgctccggcatgccgctcgacgcgctggtgtgcaacgccgccatctaccggccgacggcgcggcagccgacgttcaccgccgacgggtacgagatgagcgtcggggtgaaccacctgggccacttcctcctcgcccgcctcatgctcgacgacctcaagaaatccgactacccgtcgcggcggctcatcatcctcggctccatcaccggcaacaccaacaccctcgccggcaacgtccctcccaaggccgggctaggcgacctccgggggctcgccggcgggctccgcgggcagaacgggtcggcgatgatcgacggcgcggagagcttcgacggcgccaaggcgtacaaggacagcaagatctgtaacatgctgacgatgcaggagttccaccggagattccacgaggagaccgggatcacgttcgcgtcgctgtacccggggtgcatcgcgacgacgggcttgttccgcgagcacatcccgctgttccggctgctgttcccgccgttccagcggttcgtgacgaaggggttcgtgtcggaggcggagtccgggaagcggctggcgcaggtggtgggcgacccgagcctgaccaagtccggcgtgtactggagctggaacaaggactcggcgtcgttcgagaaccagctctcgcaggaggccagcgacccggagaaggccaggaagctctgggacctcagcgagaagctcgtcggcctcgtctgagtttattatttacccattcgtttcaactgttaatttcttcggggtttagggggtttcagctttcagtgagagaggcctgtcaagtgatgtacaattagtaatttttttttacccgacaaatcatgcaataaaaccacaggcttacatt

SEQ ID NO: 131 - DNA, 1934 bp, Oryza sativa
  ref <308>: DATABASE ACCESSION NUMBER: AK103941
  ref <309>: DATABASE ENTRY DATE: 2002-08-28
agctcaagcaagtgcgcaccaccaccagcaacaatgtcttccccttcctcggcccattggctgagcttggtaggaagtatctggctccagaccatcaacggccccaactccgacttcccggtgtactcgtcgcagctcaaggagctcaagagcatcagccaggtgcagctcaacttcctcgccttcgcgtccgacgcgggcaagctcttcggatggttctccggggtggcggcgctgtacctgccactttgggtcgtcgcgttcgtcggcgccgcgttcgggctcgtcggctatggcatccagtacatgttcttggacagctccggcctccggtactggcatctcttcctgctcaccgcgctggccgggaatggcatctgctggatcaacaccgtctcctacctcctctgcatcaacaacttcgcgtcgaacagccgcgtcgcggtgagcctcgccaccagctacctcggcctcagcgccaaggtgtacaccagcctggccgagacgttcccggggctggccaactccaagacgaagacgtacctcctcctcaatgccgtcgtgccgctgttcgtcaccgtcatggtggcgccgtccctcagggtgttcgacctcaagagcgcggcggcgagctcggacgcggcattcctcgtcatgttcgcgatcacgctcgccacgggcgcctgcgcggtggtcggcagcatcggctcgacggcgaacgggctgtcctccaaggagcacatgatcagcctcggcgtgctgctggccaccccgatcctcatcccggtggggctcaagatccgcgagaccctgaccaagatacgggagacgcagcgggagaacaggatccatgacctcggcaccgacgagtcggagtccgtggagagcgtcgtcgtcatcgacgtcgccgccgacgcaaacgccgaggttgccaaggaggaggacgccgtggtgaagaagccccaagaggaggtcggcggcctccggctgctgaaaagcccggacttctggctctattttttcagctacatgttcagtggcaccctcggcttggtcttcctcaacaacctcggtcagatcgccgagtcgcgaggaatcgggcagacttccactctggtctcgctctcgtcttcgtttggattcttcggccgtcttctcccggcgttcatggactactactccgcgaaaagtggctactccatatcgaggacggggtccatggcgtcgctgatggcgcccatggcgggggccttcttcctgctgctcaaccagcgggacttctttctgtacctggccacggcggtgatcgggacgtgcacgggcgccatcacgtcggtggcggtgtcggcgacgcgcgagctgttcggcaccaagaacttcggcgtcaaccacaacgtcgtggtggccaacatccccgtcggctccctgtgcttcggctacttcgccgcgttcctctaccagcgggaggccggcgcccgcggcacgctcacctgctccggcgccggctgctaccgcgagacgttcgccatctggggcacgacgtgcgccgtcgggacgctgctctgcgccgcgctctacgcgcggtcccgcaattttgccgggaggctacctgtaaggataccgtcctgcctcgcccgcttagctaaccttgtgtagggtgctagaactttcttacacctctcagaggaggcctcttcttaatttaacgaccatacacgaaagcatcagccattaggcgatgtaattaattaggttttgtttctttccaccacctttttctttctttctttctttcctttggttttcttgactgattatcccacggggggatacagacaaaaggttggagcctgatcagtagatattgtgcaggctgatcaccttgttttctctgcatatattatatatgcaatcatatacgagtggttaagggg

SEQ ID NO: 132 - DNA, 1469 bp, Oryza sativa
  ref <308>: DATABASE ACCESSION NUMBER: AK103942
  ref <309>: DATABASE ENTRY DATE: 2002-08-28
gaacgcataaatactgatccccaatcgaaacggctgctgaaaccctagccctagcaatcgagagagagggagaagatggcgcgtccgagaggcaggaagcgtgcggcggcggcggcggcggtggcggaggaggactccagcaagccggaggctgcagaggcgaagaagccggccgcgcgggggcgggggaagcgtgccaaggcgtcacccaagcccaagccggagacggagtacttccccgagaagcggaatctggaggatctttggctatcagcatttccggttgggaccgagtgggaaaacattgataagataaaggagttcaactggaactttgaaaatttggagaaagcactagaagaaggaggggagctttatgggaaaacagtttacttgtttggaagcacggagcctcaactattggaggttaatggtgaatcaaagatagtgcttattcctatagttgttgctgttgactgcccttttcctccctcagacaaaattggcataaattctgtccaaagggaaaatgaagagatagtgccaatgaaggccatgaagatggcctgggtgccttatgttccgctggaggatcggcttagtaggattgacagtttgaaaacaaaaatatttactcttggctgcacccagcggaggtctgcgctgaggcacctcaaaactgagagagtcaaattgtttgactactgcatgccatattatatgccactgaaccctcccgaagacgaagatgatacagttgtcaacatcatatatcccctagaacccccgatagtatgtgacttcgactgggagatggatgattacgaggactttgctgatgagaaagttaaagatgaggtgctaccagaggatgagaaagaaaaatttaaggaattcataaaggagagggttagagaaaggaaaagagagctaaaacaggctaaggaagcaagaaagaaagctattgatgatatggaccctaaggtcaaagaggcatttgaaaatatcaaattttacaaattttatcctgtaaaaactccagacacccctgatgtaagcaacgtaaaggcaaagtacatcaatagatattacaggcatgcacatcatctgatgtaattgcatcctatcttgaaatgagctatccaacttggagagctgacaccgaaattttgaaagccgtgggagagattcctggcgacatcttcaaattgggtctcttatagacccggggtgaaaacttgttgcaccttaactctgtactgcagttttcgtcagatcctgccattccttagagtatcgcttccttcggcattcttttttgttgtgcgtcgtgtaacattctgggaatagattatgtaaccatcaggccgtacatcttgtaagagcaaaacaattggtttaggaaaaatgctgattcctttcaccgtcctgtgaaggttgcttgggtgcaaaccccttgattttgtctt

SEQ ID NO: 133 - DNA, 1384 bp, Oryza sativa
  ref <308>: DATABASE ACCESSION NUMBER: AK103943
  ref <309>: DATABASE ENTRY DATE: 2002-08-28
accaacacgaagcaaaaggacaccagaaacatagtacacttgagctcactccaaactcaaacactcacaccaatggctctccaagttcaggccgcactcctgccctctgctctctctgtccccaagaagggtaacttgagcgcggtggtgaaggagccggggttccttagcgtgagccagaaggccaagaagccgtcgctggtggtgagggcggtggcgacgccggcggcgccggtggcgagccccggcgcgggcacgtcgaaggcggacgggaagaagacgctgcggcagggggtggtggtgatcaccggcgcgtcgtcggggctcgggctcgcggcggcgaaggcgctggcggagacggggaagtggcacgtggtggtggcgtgccgcgacttcctgaaggcggcgacggcggcgaaggcggcggggatggcggcggggagctacaccgtcatgcacctggacctcgcctccctcgacagcgtccgccagttcgtggacaacttccggcgctccggcatgccgctcgacgcgctggtgtgcaacgccgccatctaccggccgacggcgcggcagccgacgttcaccgccgacgggtacgagatgagcgtcggggtgaaccacctgggccacttcctcctcgcccgcctcatgctcgacgacctcaagaaatccgactacccgtcgcggcggctcatcatcctcggctccatcaccggcaacaccaacaccctcgccggcaacgtccctcccaaggccgggctaggcgacctccgggggctcgccggcgggctccgcgggcagaacgggtcggcgatgatcgacggcgcggagagcttcgacggcgccaaggcgtacaaggacagcaagatctgtaacatgctgacgatgcaggagttccaccggagattccacgaggagaccgggatcacgttcgcgtcgctgtacccggggtgcatcgcgacgacgggcttgttccgcgagcacatcccgctgttccggctgctgttcccgccgttccagcggttcgtgacgaaggggttcgtgtcggaggcggagtccgggaagcggctggcgcaggtggtgggcgacccgagcctgaccaagtccggcgtgtgctggagctggaacaaggactcggcgtcgttcgagaaccagctctcgcaggaggccagcgacccggagaaggccaggaagctctgggacctcagcgagaagctcgtcggcctcgtctgagtttattatttacccattcgtttcaactgttaatttcttcggggtttagggggtttcagctttcagtgagagaggcctgtcaagtgatgtacaattagtaatttttttttacccgacaaatcatgcaataaaaccacaggcttacatt

SEQ ID NO: 134 - DNA, 1823 bp, Oryza sativa
  ref <308>: DATABASE ACCESSION NUMBER: AK058304
  ref <309>: DATABASE ENTRY DATE: 2001-12-06
atcgcatcctctccccacacaatccccacccggcctagcgagcgagagagagggaagggttgcgacttgcgactcgcgagcggcgagatggcgaaggacgtggagatggcggtgcggaacggagacgacggcggcggcggcggctactacgccacccacccgcacggcggcgccggcggcgaggacgtcgacgacgacggcaagcagcggcgaaccggtaacgtatggacggcgagcgcgcacatcatcacggcggtgatcggctccggcgtgctctctctcgcatgggcaacggcgcagctcggctgggtggtcgggccggtgactctgatgctcttcgccctcatcacgtactacgcctctgggctcctcgccgactgctaccgcactggcgatccggtcagcggcaagcgcaactacacctacatggatgccgttgcggcctacttaggtggctggcaagtctggtcctgtggtgttttccaatatgtcaacctggttgggacagcaattgggtacacaatcacagcatccatcagcgcagcggctgtgcacaaggccaactgctaccacaagaacggccacgatgccgattgcggtgtctacgacaccacgtacatgatcgtctttggagtcgtccagatcttcttctccatgctgcccaacttcagtgacctctcatggctttccatcctcgccgcggtcatgtcattctcatactcgaccattgccgttggcctctcgcttgcgcgaacaatatcaggtgctactggtaagactactctgactggcgttgaggttggagttgacgtcacttcagcccagaagatctggctcgcgttccaagcgctcggtgacatcgcgttcgcctactcctactccacgatccttatagaaattcaggacacggtgaagtctccaccggcggagaacaagacgatgaagaaggcaacgctgctgggggtgtcgaccacgacggcgttctacatgctgtgcgggtgcctggggtacgcggcgttcgggaacgcggcgccggggagcatgctcaccgggttcggcttctacgagccctactggctgatcgacttcgccaacgtctgcatcgtggtccacctggtcggcgcctaccaggtgttctgccagcccatcttcgccgccgtcgagacgttcgccgccaggcggtggccgggctcggagttcatcacccgggagcgccccgtcgtggccggcaggtcgttcagcgtcaacatgttcaggctgacgtggcggacggcgttcgtggtcgtcagcacggtgctcgccatcgtgatgcccttcttcaacgacatcctgggcttcctcggcgccgtcgggttctggccgctgacggtgtactacccggtggagatgtacatccggcagcggcggatacagcggtacacgtccaggtgggtggcgctgcagacgctcagcctcctctgcttcctcgtctcgctcgcctccgccgtcgcctccatcgagggcgtcagcgagtcgctcaagcactacgtccccttcaagaccaagtcgtgatcccgatcacgacggcctttttttttttgcttttgcatcctgatgaaaaaagatttcagaaacatatgcacaacaaatgccggaagttagccaagagtttggtcaccagctcggtgcgttggtcggtcaggaggaggagggttcaacttgtgtaggttaagaaatgctagagagtatggagaccatcttcgattgctgctcatgtatagaaaaaagaggaagcttcgtattcatgtaatgaatcggaatgtttaacaaacaaggcttgttct

SEQ ID NO: 135 - DNA, 1045 bp, Oryza sativa
  ref <308>: DATABASE ACCESSION NUMBER: AK058305
  ref <309>: DATABASE ENTRY DATE: 2001-12-06
aactcacactcgctcgctcatcgccatctctctcagctctcacagctcactgcatcaatggccgcggccaccatggcgctctcctccccggtgatggcccgcgcggcgccgtcgacctcctccgcgctcttcggcgaggcgcggatcaccatgcgcaagaccgccgcgaagcccaagccggcggcgtcgtcggggagcccgtggtacggcgccgaccgcgtcctctacctcggcccgctctccggcgagccgccgagctacctcaccggcgagttcccgggcgactacgggtgggacaccgcggggctctccgccgacccggagacgctcgccaagaaccgggagctggaggtgatccactcccggtgggcgatgctgggcgcgctcggctgcgtcttcccggagctcctcgcccggaacggcgtcaagttcggcgaggccgtgtggttcaaggcgggctcgcagatcttcagcgagggcgggctcgactacctcggcaacccgagcctgatccacgcgcagagcatcctcgccatctgggcggtgcaggtggtgctcatgggcgccgtcgaggggtaccgcatcgccggcgggccgctcggcgaggtcgtcgacccgctctaccccggcggcgccttcgacccgctcggcctcgccgatgaccccgaggcgttcgcggagctcaaggtgaaggagatcaagaacggccgcctcgccatgttctccatgttcggcttcttcgtccaggccatcgtcaccggcaagggccccctcgagaacctcgccgaccacctcgccgaccccgtcaacaacaacgcctgggcgtacgccaccaacttcgtccccggcaagtgaagtgggggaccgtagcttagcagtggttaattgtggttggatggatttgtggccagcgagttcgttgtctttgggttggggaagatgggtttagtgcgacgagatgatgatcgagttggtgttgtgtacactaagaagatgaagaagaagatgatgtttttgcaataatgattttattcgtttcccaact

SEQ ID NO: 136 - DNA, 1298 bp, Oryza sativa
  ref <308>: DATABASE ACCESSION NUMBER: AK058306
  ref <309>: DATABASE ENTRY DATE: 2001-12-06
tcgacgtccaccgcggcaaggcgctccacggcggcaacttccagggcacccccatcggtgtgtccatggacaacgcccgtctcgccatcgccaacatcggcaagctcatgttcgcgcagttctccgagctcgtgaacgagttctacaacaacgggctgacctccaacctggccggcagccgcaacccgagcttggactacgggttcaagggcaccgagatcgccatggcctcctactgctctgagctccagtacctcgccaaccccatcaccaaccatgtccagagcgcggagcagcacaaccaggacgtgaactcgctgggtctcgtctcggccaggaagaccctggaggcggtggacatcctcaagctcatgacctccacctacatcgtcgccctgtgccaggccgtcgaccttcgccacctcgaggagaacatcaagagctccgtcaagaactgcgtcacccaggtggccaagaaggtgctcaccatgaaccccaccggcgacctctccagcgcgcgcttcagcgagaagaacctcctcaccgccatcgaccgcgaggccgtgttcagctatgccgacgacccgtgcagcgccaactacccgctcatgcagaagctccgcgccgtgctcgtcgagcacgccctcaccagcggcgacgccgagcccgaggcctccgtgttctccaagatcaccaagttcgaggaggagctccgctctgcgctgccccgggagatcgaggccgcccgcgtcgccgtcgccaacggcaccgcccccgtcgccaaccggatcgtcgagagccggtcgttcccgctctaccgcttcgtccgcgaggagctcggctgcgtattcctcaccggcgagaagctcaagtcccccggcgaggagtgcaacaaggtgttcctcggcatcagccagggcaagctcatcgaccccatgctcgactgcctcaaggagtggaacggcgagccccttcccatcaactaagccaagatcccatcgccattgccattgccatacacccatcatcgaggaggagaggagactaaaaataaaagaaaacgaaccgcttcgtgtatcttcagacaaaaaagaccctgtattttcttcgttcgttgccgtttggtttatagtgatctcgtgttctttgtgttagctgctctgctcagcttgccagccatggcggcaaagcaagcggcttttctaagatattgtcgctaaactgtattttggggtgaaagtattgctactcgattccatccttaaaaagttgtggtaatagaaatgttttgatcctat

SEQ ID NO: 137 - DNA, 1407 bp, Oryza sativa
  ref <308>: DATABASE ACCESSION NUMBER: AK058307
  ref <309>: DATABASE ENTRY DATE: 2001-12-06
gagcttggtgcacagtctaaatttgatgagaagactggtatttccttggttaatggggcacatgatactgctaagctggctggtctccttgagaacttcatcaagaagtatgtccaatgctatggatgtggcaaccctgagactgaggtcctaatctccaagacccagatgattacactgaagtgtgctgcctgtggttttgtgtcagatgttgacatgagggacaagctcacaacttttatcctgaagaatccacctgaacagaagaagggtgctgggaaagacaagaaggcaatgaggagagctgagaaggagcgtctaaaggaaggtgaggctgctgatgaggagatgaagaagctaaagaaggaagcaaagaagaaaggtgcatccaaggaaagtacctcctctaaaagtggtgctgggaagaagaaggctgctgctggctctgatgaggatcattcaaattcaccaactcgcagccatgatggtgacaatgtggctgcagatgaggatgatgatgatggtgtccagtggcagactgacacttcgttggaggctgcaaaacagcgcatgcaggaacaactgagcgctgcaactgctgagatggtaatgctgtccactgaagaacctgagaagaagaagaagcatgaggcctcacacaaggagggtgcctccaacggaagtacaaaacatgtggttgaagaggctaaaagcagtccttatgatgatctggtcaaggagatgaaggataacttgagcaagggtgccaatgctgttcagctcaagggtctgatgacttcctcagcgctgccaccccaggatgctatgaatgctctttttgatgcactctttggcggcctcggcaaaggattcgccaaggaggttgtgaagaagaagaaattcctcgctgctgctgtgcctgatgaagcctcccagatggtcctgctgcaagcgctggtggccttcggcgccaagtcaagccccgaagctgtgaaggaggtgccgattgttctcaaggccctgtatgatggggacgtcctggatgaagaagtgataactcagtggtataatgaatctgttgctggtggcaaggagtcccaggtggtgaagaatgccaagccgttcgtggagtggctccagagcgcggattctgaatctgaggaagagtgatgcgccgaatctcctcccaatcatcgcctacttcgccttatcgtcttttcagtatttcgttcgtcatgagtatttccagttcgcgtcatgagtgcttcgagtttgtttgtgctgtgcgctttcttatctgtaatgttggtcaataaataaacccagagtcccagacagtcctcagagactatgtggtgtcacactccagctggagatctttttatttatcaaaccttaatgtgtttc

SEQ ID NO: 138 - DNA, 1310 bp, Oryza sativa
  ref <308>: DATABASE ACCESSION NUMBER: AK058308
  ref <309>: DATABASE ENTRY DATE: 2001-12-06
gacctctcccgccgccgccgccgtcctcctccacctcctccgctctctcgcgcacggcgcacgcgcccgaagccctagaccccccggcggcgaagatggcggcggaaggcggtgccgccgctcgggcgctgtcccagcgggagcaggacatccagatgatgctcgccgcggacgtccacctcggcaccaagaactgcgacttccagatggagcgctacgtctacaagcgccgcactgacggtatctacattattaaccttggcaagacctgggagaagctccagttggctgcgagggtcattgttgcaattgaaaaccctcaggacatcattgtgcagtctgcgaggccctatggccagagggctgttctcaagtttgctcagtacactggtgctcacgccattgctggtaggcacactcctggtacatttaccaaccagctgcagacctcattcagtgagccacgccttcttatcctgactgaccccaggactgatcatcagccaattaaggagtctgcacttggaaacattcctaccattgccttctgtgacactgactctccaatgcgctatgttgatattggtattcctgctaacaacaaggggaagcagagcattggttgcctattctggcttcttgccaggatggttctccagatgcgtggtacaattctcccaggacacaagtgggatgtcatggttgatctgttcttctacagggacccagaggaagcgaaggagcaagaggaagaagaggcggctctggtggctcctgattatggtgcggttgcggaatatgctgccccagcggctgatacctggggtggagaatggggcactgacgctgcagctcaacctgctgccattccagcacaggctggtgctgactggactgctgctccagctcctgcagccggaggatgggacacggctgctgcccctgcccctggatgggaacaaggcagtgcaccagtcccagcggcagcacccacccctaactggggggagtgagtgaaagagtaactgatccagttcatgggtcagaggctgagtttgttgtcgggagcagctggtagacactatttaagtagctttaatctttttacagtactgagttatttagatgcaaatcaaattttgtgttcttgacaatgctgggactgcgaactagccagccttttttttgttacaatctcatggatagctttatttcaagagcaattctgctttgcgaacaaagtgtatgtgtttgcaacaacaaattgatggggttttctcctcatagttcttattgttcactgtcagatc

SEQ ID NO: 139 - DNA, 1358 bp, Oryza sativa
  ref <308>: DATABASE ACCESSION NUMBER: AK058309
  ref <309>: DATABASE ENTRY DATE: 2001-12-06
gatagcggcgttgccaaggcagccttactctctgttgtactggactaggcctgagcttgatgcatacttggtggcttcgccgatcagggaacgcgcaattcagaggatcactgatgtggtcggaacatacaatgatctccgtgacagaatattttctaagcattcagatttgttccctgaggaggtttacaacttagagacgtttagatggtccttcggcatcctcttctcacgcctggttcgattgccatcaatggatggaagggttgcactagttccttgggcagatatgcttaaccatagtcctgaggtggaaacattcttggattatgataaatcctcagggggaatagttttcactaccgatcgttcatatcaaccaggtgagcaggtgtttatatcctatggcaagaaatccagtggcgagctattgctttcatatggttttgttccaaaagagggaacaaacccaaatgattcagttgaattgctggtgtctcttaataagtctgataagtgctacaaagagaagctacaagcactaaaaagaaatggattgtcagagtttgaaagtttccctttacgcgtcacaggatggccagttgagttgatggcttatgcctttcttgtggtcagccctcccgagatgagccaacgttttgaagagatggctgtcgctgcatcaaataaaagtccatccaagcctggacttaattatcctgaactggaggaacaagctcttcagtttatcttggactgttgtgagtctaacatagcaaaatacacaaagttcctagagggtagcagtgggtctctgcaactttcaaccaattcaaagcaagccaaccggacgttactgctaaaacaactagcaagagatctttgcattagtgaacggagaatcctgtatcgtacacaatatatattgcgtaggagactgagggacatgagaggtggtgaacttaaagctctgtcattgttcaatgggctcagaaagctcttcaaataaaaggatggatttgtttttcaatgttagctgaagatttcgaggacaatgtttaatctctagtatcttgcttcttcctttcaggttgtctttgttgctgatgaagctcagactgttgaagaaaaggaaattgacaaatcagattacaatctcagccgacaagcaactgatgctagaagactagaagtggtcacagctcaatagaagacactagttgtaacttgcgattgaacagtccatatcttggtttaaatctactatagcaccatgcaacaatgtaccagtggagtcatctcgtgtatattttgtttcaggggtttcccctcgatatctatagcataatatcccttct

SEQ ID NO: 140 - DNA, 184 bp, Oryza sativa
  ref <308>: DATABASE ACCESSION NUMBER: AK058310
  ref <309>: DATABASE ENTRY DATE: 2001-12-06
ttacaccttttaagcaggccggcttgacgcttgctattaattatttctcctttttatgttttctctttgttctgtgtatcagatcgcgcccaagccatagctgggcatgacaagtttttgttaataataatataatataaagatatgggctatactatacatgagtatatttcatttgggtatc

SEQ ID NO: 141 - DNA, 1615 bp, Oryza sativa
  ref <308>: DATABASE ACCESSION NUMBER: AK058311
  ref <309>: DATABASE ENTRY DATE: 2001-12-06
gaacacaaaagaaggggagaaggggaaggatagatagatcgccgccgccgccgtcgtctccgcccctctccagccaccagatccagcgaccatggggcagggcaccccgggaggcatgggcaagcagggcggcgcccccggcgaccgcaagcctggcggcgacggcgacaagaaggaccgcaagttcgagccccccgccgccccctcccgcgtcggccgcaagcagcgcaagcagaagggccccgaggcggccgctcgcctccccaacgtcgcccctctctccaagtgccgcctccgcctcctcaagctcgagcgggtcaaggactacctcctcatggaggaggagttcgtcgccgcccaggagcgcctccgccccaccgaggacaagaccgaggaggaccgatccaaggtcgacgacctccgcggcacccccatgagcgtcggatccctcgaggagatcatcgacgagagccatgccatcgtctcctcctccgtcggccccgagtactacgtcggcatcctctccttcgtcgacaaggaccagctcgagcccggctgctccatcctcatgcacaacaaggttctgtctgtggtcggaattttgcaagatgaagttgatcctatggtttctgtgatgaaagtggagaaagctccgctggaatcctatgctgacattggtgggctagatgctcagatccaagaaatcaaagaggcagttgagcttcctttgacccatcctgagctatatgaagacattggcatcaggccacccaagggagtcatattatacggagaacctggaacagggaagacactacttgccaaggctgttgctaactccacatccgcaactttcttgcgtgttgttggaagtgagcttattcaaaagtatcttggtgatggtcccaaactagtcagggaactgttcagagttgctgatgagctttctccctcaatagtctttatcgatgagattgatgctgttggaacaaagaggtacgatgctcattcaggaggggagcgtgagattcagagaactatgttggagcttcttaaccagttagatggttttgactctcgtggtgatgtcaaagttatactagcaacaaatcgcatcgaaagtcttgatccagcattgctacgccctggtcgcatagatcggaagatagaatttcctctgccagatattaaaactaggcggcgcatcttccagatacacacatctaagatgacattggcagatgatgtgaacctggaagagtttgtcatgaccaaggatgagttttccggtgctgatatcaaagcaatatgtactgaagctggacttcttgctttgagagaacgccgaatgaaggtgacacatgctgacttcaagaaggcaaaggagaaggtgatgttcaagaagaaggaaggtgtgccggagggtctttacatgtgatgtgctcactggtcgccagtgacggggtgggtaaccttgtaggacgaatatatatttgatttatcacataggctatgctgccttggtttgtaaaatacttgtgaaatttgttttgttacttcttgggatggagttggatagaacaaattgcatttctcatgatttgccttctcaagt

SEQ ID NO: 142 - DNA, 1040 bp, Oryza sativa
  ref <308>: DATABASE ACCESSION NUMBER: AK058312
  ref <309>: DATABASE ENTRY DATE: 2001-12-06
agagtagtgttagtcttagcgaatccagcagcagaagcagcagcagcagctcagccgccgccgatggcgtccacgatcatggccccaacctcccgcgtcctcgccgccaagacccccttcctcggccatccccgcccctccaatgcccccgtccgcgacatcgccgccgccgccaccggccgcatcaccatgagcaaggagctgtggtacgggccggatagggtgaagtacctggggccattctcggcgcagacgccgtcgtacctgaggggcgagttcccgggcgactatgggtgggacacggcggggctctccgcggacccggaggcgttcgcgaggaacagggcgctggaggtgatccacggccggtgggcgatgctcggcgcgctgggctgcatcacgccggaggtgctcgagaagtgggtgcgcgtcgacttcaaggagcccgtgtggttcaaggccggcgcccagatcttctccgacggcggcctcgactacctcggcaaccccaacctggtgcacgcccagagcatcctcgccgtgctgggattccaggtcgtcctcatgggcctcgtcgagggctaccgcatcaacggcctccccggcgtcggcgacggcaacgacctctaccccggcggccagtacttcgacccgctcggcctcgccgacgaccccgtcaccttcgccgagctcaaggtcaaggagatcaagaatggccgcctcgccatgttctccatgttcggcttcttcgtccaggccatcgtcaccggcaagggccccttggagaacctgctcgaccacctcgccgaccccgtcaacaacaacgcatgggcctacgccaccaacttcgtccccggcaagtgagtgtggatctccggcgagcaacggcggtgaggtccattgctttcatgcaggctgcggtgagacgcgcgacgttctcctctttccgcgtacccgaatatttgcttcgttcgttcagattgtgtaaaacaatgttatctggttggttgatgaaagaagtacaatggacctgattgtgt

SEQ ID NO: 143 - DNA, 1431 bp, Oryza sativa
  ref <308>: DATABASE ACCESSION NUMBER: AK103944
  ref <309>: DATABASE ENTRY DATE: 2002-08-28
aagcgcacccagccatggcgactcctcagatctcgcgcaaagccctcgcctccctcctcctcctcgtcgccgccgccgccgcggtctccaccgcgtccgccgacgacgtgctcgccctcaccgagtccaccttcgagaaggaggtcggccaggaccgcgccgccctcgtcgagttctacgcgccatggtgtggtcactgcaagaagcttgcccctgaatacgaaaaactcggtgcaagtttcaagaaagccaaatcagtcctaattgcgaaggttgactgtgatgagcacaagagtgtgtgcagcaagtatggagtttctgggtaccccacaatccaatggttccccaaaggttccttggagcccaagaagtatgaaggtcaacgtaccgcggaagcccttgcagaatatgttaactctgaagcagccaccaatgtaaagatagctgcagttccttctagtgtcgtggttcttaccccagagaccttcgactctgttgtccttgatgaaaccaaagatgtccttgtagagttctatgccccatggtgtggtcactgcaagcatcttgctccgatttatgagaagctagcttctgtttataagcaagatgagggtgttgttattgccaatcttgatgctgacaaacacactgccttggcagagaagtatggagtttctggtttccccacattgaaattcttcccaaagggaaacaaagctggtgaagattatgatggcggtcgcgagttggatgacttcgtcaagtttattaatgagaaatgtggaaccagccgtgattcaaagggtcagcttacttcagaggctggcattgtcgaaagcttggctcctcttgtgaaggagttccttggtgcagcaaatgataagcggaaagaagccctctccaaaatggaagaggatgttgcgaagctcactggccctgctgccaagtacggaaagatctatgtgaactctgcaaagaagatcatggagaagggctctgaatacactaagaaggaatctgagaggcttcaacgcatgttggagaagtcgatcagtccttccaaagccgatgaattcgtcatcaagaagaacatcctttcgactttctcctcttaaagggtgtcccacgtaccccgacgagcaattggggtatagtcagtagcgcaatgcctgtctccaagaatggaaaacagaaagaaatgaaaagaaaaggcaatatcgatatcagcaagagatggcaatggaagttcgttagttgggtattctgttgaacaaacatgtatcccactacccggcatgatcttttttttttctttctgctattcgcttttgtggttacagggattgacatagcaatcagctagtttactcaagaacacaagaggttttgtaaccatcccgtgatgagtgatgacgccgttctacgtttgtc

SEQ ID NO: 144 - DNA, 565 bp, Oryza sativa
  ref <308>: DATABASE ACCESSION NUMBER: AK058313
  ref <309>: DATABASE ENTRY DATE: 2001-12-06
accaccagagcacaagaaagcataagcaacacaagggattaactcatcactcacttagctaattaaatcttcgaccatgtcggacaagtgcggcaactgcgactgtgctgacaagagccagtgcgtgaagaaaggtaccagctatggcgtcgtcatagttgaagccgagaagagccacttcgaggaggtcgccgccggcgaggagaacggcggctgcaagtgcggcaccagctgctcctgcaccgactgcaagtgcggcaagtgaagtcacgaagcaaccgaacactcgccgccggcgagtcacctaccttaattagtccacaataaaaaccacccatatgagtgtggtttgtgtgtgtgctgattattgctgaattaaacccgtgtgttatcgattaattaagcagctggtcgcttcggcgactatgcgtgtatcaacgtatgaatttgtgtgatgtgatgtacccgtgctattctcagtgaaattaatcaatcgtgtattcgtgtggtttgcctagtaaaaaggtctatcatactcaatcgaacttcaacaatttcttggtct

SEQ ID NO: 145 - DNA, 1208 bp, Oryza sativa
  ref <308>: DATABASE ACCESSION NUMBER: AK058314
  ref <309>: DATABASE ENTRY DATE: 2001-12-06
ttggatgatagtgttgatgatgataagttgagggagctttttgctgagtatggcactattacttcctgcaaggtgatgcgggattcaaatggtgtcagcagaggttctggatttgttgcgtttaaatctgctgaagatgcttcccgagctcttgccgaaatgaacagcaagatggttggcagcaaaccgctctacgttgcgcttgcacagcgcaaggaagacaggaaagcaaggctgcaggcacaattttcacaactgaggcctgtcccacttgctccttcagttggtcctcgcatgcccatgtttccacctggtgttcctggagttggacagcaactgttctatggtcagccccctccagcgtttatcaacacacagcctggtttcggcttccagcagcctcttatgcctgggatgaggccaggtgcaggtccaatgccgaactttatcatgcctatggttcagcaaggacaacagccgcagcgtccggctggtaggcgtgctggtgctggtggaatgcagcaacccatgccaatgggtcagcaacagatgatggctaggggcggccgtggctatcggtatcctacaggacgtggcatgcctgatcctgcaatgcatggtgttgggggtggtgtgatgccatctccatatgagatgggaggcatgcccatgagagatgctgctgcgtcacagcctgtacctattggagcattggctactgcactggccaacgcagcccctgatcagcaaagaatgatgcttggtgagaacttgtatcctcttgttgatcagctggagcatgagcaggctgcgaaggtgactggcatgctgctggagatggaccagactgaggtgctgcacctgctcgagtctccagaggctctcaaggccaaggttgctgaagccatggaggtccttcgcacggcccagcagatccagacgaacgcgacgcctgaacagcagcttgcttctctgtcgctgaatgacggcgtcgtttcctcctaagcataacgacgacagcaatttttgatccatatctcagttatcttatctatctagaattgaaaacgacttggttacttggtttattggagttttagttttattggtagttgaactaggcatttaggcaatgcgcgtggattgggtattttgtttgctcggatcttttattttgctttataagttatcatatggattgctacttt

SEQ ID NO: 146 - DNA, 1397 bp, Oryza sativa
  ref <308>: DATABASE ACCESSION NUMBER: AK103945
  ref <309>: DATABASE ENTRY DATE: 2002-08-28
cttccacaccgcaccactccacgccttcctcctcttctctcgcagtccactcgctggtctctccaattcttggcttctttgctctgctggattagcagcagctgctctgcttcttgctctgcccttgtctttgggctttcagggcggtgtgctgaggccgagcggtttgggcggtctcaagaatcgcttgtgcgtgcgggggagttgtcgtgggaggtggggatggagaggtacgaggtgatcaaggacatagggtcggggaacttcggcgtggccaagcttgtccgggatgtgcggaccaaggagctgtttgccgtcaagttcatcgagagggggcagaagatcgacgagaatgtccaaagggagattatgaaccacaggtcactgaggcatccgaacattgttagattcaaggaggttgtgctaactcccacacatttggccatagttatggaatatgctgctggaggtgagctattcgaaaggatttgcagtgctgggaggtttagcgaggatgaggcaaggttcttcttccagcagttgatttcaggagttagctactgtcattccatgcaaatatgtcatagagatttgaaactagaaaatactctcttggatgggagcatagcacctcggctcaagatatgtgattttggttactcaaagtcctctttgttgcactctcaaccgaaatctactgtcggtactccagcttatatcgctcctgaggtccttgctagaaaagaatatgatggaaaggttgctgacgtttggtcatgtggagtaactctatatgtgatgctgttggtgcgtacccctttgaggaccctgacgaaccaagaaacttccgcaagacaattactcggatactaagcgtacaatacatggttcctgattatgttcgagtttcgatggaatgcagacatcttctgtcccggattttcgtggcaaacccagagcaacgaattaccattcctgagatcaagaaccacccatggttcctcaagaacctgccgatcgagatgactgacgagtaccagatgagcgtccagatgaacgacatcaacaccccgtcacagggcctggaggagatcatggccatcatacaggaggcgcggaagccgggtgatggctccaaattctccgggcagatcccgggcctagggagcatggagctcgacgacgttgacaccgacgacatcgacgtcgaggacagcggcgacttcgtgtgcgcattgtgacgaggccgtgaacttgctttctcttcttggagtgtgctgctccttttgttgtgctgctgttcatttctgagagctccattctgttgttgtgtcagtgtttgtaaacgaggtgctgtggataatctgaactcttttatatgttggtgttcttagctg

SEQ ID NO: 147 - DNA, 685 bp, Oryza sativa
  ref <308>: DATABASE ACCESSION NUMBER: AK058315
  ref <309>: DATABASE ENTRY DATE: 2001-12-06
ctggaaaaagttcaaggccggcgcgcagatcttctccgagggggggctcgactacctggggaaccccaacctggtgcacgcgcagagcatcctcgccatctgggcggtccaggtggtgctcatgggattcgtcgagggctaccgcgtcggcggcggcccgctcggcgagggcctcgacaaggtgtacccaggcggcgccttcgacccgctcggcctcgccgacgaccctgacaccttcgccgagctcaaggtgaaggagctcaagaacggccgcctcgccatgttctccatgttcggcttcttcgtccaggccatcgtcaccggcaagggccccatcgagaacctcttcgaccacgtcgccgaccccgtcgccaacaacgcctgggcatacgccaccaacttcgtccccggcaagtgagcacaacgacacgatcgagatggtgccaaccaacgtaccatgtgtacacttgtagtagccacgcaccgaccctgcagttgcagttgcagcagtgcatgtatgtatgtaccttaattgtgtgtgtgtgtgtgatcgatcgaggagatttctagcttaattaatttctgtctgtcatcatctttgcttctttggatcgagatttaatgtaagccgcaggccgcatccaagggatgatcgaattaatgatgtatcgttattataggatct

SEQ ID NO: 148 - DNA, 1482 bp, Oryza sativa
  ref <308>: DATABASE ACCESSION NUMBER: AK058316
  ref <309>: DATABASE ENTRY DATE: 2001-12-06
ctttgaaagtccagatgatgctgctcaggctgtccaagagctgaatggtaagaagtttgatgataaggaatggtatgttggaagggcacaaaagaaatcggaaagagagatggaattgaaagagaaatttgagaagaaccttcaagaagcagcagataagtatcaaaacactaacctgtacctgaagaacttggatgatagtgttgatgatgataagttgagggagctttttgctgagtatggcactattacttcctgcaaggtgatgcgggattcaaatggtgtcagcagaggttctggatttgttgcgtttaaatctgctgaagatgcttcccgagctcttgccgaaatgaacagcaagatggttggcagcaaaccgctctacgttgcgcttgcacagcgcaaggaagacaggaaagcaaggctgcaggcacaattttcacaactgaggcctgtcccacttgctccttcagttggtcctcgcatgcccatgtttccacctggtgttcctggagttggacagcaactgttctatggtcagccccctccagcgtttatcaacacacagcctggtttcggcttccagcagcctcttatgcctgggatgaggccaggtgcaggtccaatgccgaactttatcatgcctatggttcagcaaggacaacagccgcagcgtccggctggtaggcgtgctggtgctggtggaatgcagcaacccatgccaatgggtcagcaacagatgatggctaggggcggccgtggctatcggtatcctacaggacgtggcatgcctgatcctgcaatgcatggtgttgggggtggtgtgatgccatctccatatgagatgggaggcatgcccatgagagatgctgctgcgtcacagcctgtacctattggagcattggctactgcactggccaacgcagcccctgatcagcaaaggatgatgcttggtgagaacttgtatcctcttgttgatcagctggagcatgagcaggctgcgaaggtgactggcatgctgctggagatggaccagactgaggtgctgcacctgctcgagtctccagaggctctcaaggccaaggttgctgaagccatggaggtccttcgcacggcccagcagatccagacgaacgcgacgcctgaacagcagcttgcttctctgtcgctgaatgacggcgtcgtttcctcctaagcataacgacgacagcaatttttgatccatatctcagttatcttatctatctagaattgaaaacgacttggttacttggtttattggagttttagttttattggtagttgaactaggcatttaggcaatgcgcgtggattgggtattttgtttgctcggatcttttattttgctttataagttatcatatggattgctactttatgtcttctggtagcatcttttattttgtgggtgatgcatgatttagcagtcttgatctgcaccaaatgaagcaaactttggct

SEQ ID NO: 149 - DNA, 1155 bp, Oryza sativa
  ref <308>: DATABASE ACCESSION NUMBER: AK058317
  ref <309>: DATABASE ENTRY DATE: 2001-12-06
aaccacgctctctctctctctctctctctctcctcgcgccgcgcacgaactccaaagcacacgggcgcgcgccgccgccgcctccgccgcgccccatgtcgccgccggtgagctcgggggcgccggtgcaggagcggcgcctcggggtgctcctctcccacctccgcccgtgcgcgccgccggccgcgcggcggggcaaccaccaccaccaccaccacgacctgcgggtgcgggaggcggagggaacgggcggcctcgccgcgtctccctgcgccgccgacgggagcggggagacctcgggaggccagcgctgcgtgttctgcgagatcgtgaagggcaacaagccagcctacaagctctacgaggacgatgtgtgcttgtgcatcctggacaccaaaccactgagcactgggcattcactgatcattccaaaacgtcactttccatcactacaggcaacaccgccatctgtaatagcagctatatgttgtaaactcccacttatttccagtgcaatcgtgaaggctactcaatgtgatgcattcaatgtgcttgtcaacaatggaaaggtagcagggcaggttatttttcacactcatgttcacctcattccccgtagaaaaggcgataacttgtggtcttcagagacttatgaaaggaactctatcaagcacaaccaggaaaccaaagatcttgttagcggcatcaaggaactactcttcccacctcaggatgacagcgctgaagggtcaacgataccgaaggaactctaagaagtagataaccaagtcaacaggcttattttctgcttctctcagtcatcttgaagagcactgctgcgagatgagttgatgtatagtttgtacctcatgcttcaaaattttgatactaactggctaagtaatcatcctagaaaagccaaatggcagaaacttgctagtgatctgaacacttcatgtgaaaaaaaaaatagtaaaattgggcttgttaaacttggtaggctttagctctgtggtttcatggaagcgaagaactggcaaacctgggccggccggtggtgaatcgtgggttgttcccacctgcacaatgttttgatcttttttttttttgaacatatggaagatggatgaatataaggcgtacatttggtgggat

SEQ ID NO: 150 - DNA, 920 bp, Oryza sativa
  ref <308>: DATABASE ACCESSION NUMBER: AK058318
  ref <309>: DATABASE ENTRY DATE: 2001-12-06
atcgtcttcatcgcatcagttgagctgccagctgagctatggcttctctccgccacggccacctctctccctccggcgccactgcaccaccctcctccttcgcccaactccgccgcccttcctcctgcctcgccggaccacgacctctccgctctcgtctcacccgggtgtacgcgctttccagcaacgatatcagggtgggctccaacctcgaggtcgacggagctccctggaaggttcttgaatttctccatgtcaagcctggaaaaggtgctgcttttgtaaggacaaaaatgcgtaattatatcactggcaacacagttgacaaaacctttcgagctggaagtacgatcccagaggcatccatttcaaaggaaactaagcaatttacctacaaggatggagcccagtttgtgttcatggatctgactacctttgaagaaagtcgcttaaatgagtcagatgttggcgacaggcagaaatggttgaaagaaggaatggactgcaatttgttatactggaatggacggatcattgattttgatctccccatcaccgttaggctgactgtaactgatactgacccagggcaaggtgacagtgcacaaggaggaacaaaaccagcaaccgtggaaacaggagctgttgtcacagtgccctcgtttgtgaacgtaggcgatgatatcctgattgattcaagaactggccagtatatgaacagagcatagaagagatgagagactagacatcaacagagcattagtttttgtctccccatttttggcccattccctcacctcacccaggtttgactgtattgtttacagcatttgaaccctcgacaggatcaaaatgctttctcaaatttttgtactgcatatgtgcgtacatatttcaccagagcagatgattaatgagcc

SEQ ID NO: 151 - DNA, 1421 bp, Oryza sativa
  ref <308>: DATABASE ACCESSION NUMBER: AK058319
  ref <309>: DATABASE ENTRY DATE: 2001-12-06
atagcgagtcgaatcgaccgaaggggagggggagcgaagctttgcgttctctaatcgcctcgtcaagatgcagatattcgttaagaccctcactggcaagaccatcaccttggaggttgagttctccgatacgattgacaatgtgaaggctaagattcaggacaaggagggcatccctccggaccagcaacgccttatcttcgctggcaagcagcttgaggatgggcgtactctcgcggattataacatccagaaggagtccaccttgcaccttgtcctccgccttcgtggaggcatgcaaatattcgtgaagaccctcaccggcaagaccattaccctggaggtcgagtcctccgacacgatcgataatgtgaaggccaagatccaggacaaggagggaatcccaccagaccagcagcgtctcatctttgctgggaagcagctcgaggatggccgcacccttgcagactacaacatccaaaaggaatccaccctgcaccttgtcctgcgcctccggggcggtatgcagatctttgtaaagacccttactggcaagacgatcaccttggaggttgagtcctctgacacgatcgacaatgtgaaggccaagatccaggacaaggagggtattccaccagaccagcagcggctcatcttcgctggcaagcagcttgaggacggccgcacccttgctgactataacatccagaaggagtccaccttgcacttggtcctccgccttcgtggaggtatgcagatcttcgtgaagaccctcaccggcaagaccatcaccctgggggttgagtcgtctgacacgatcgacaatgtgaaggccaagatccaggacaaggagggtattccaccagaccagcagcgcctcatcttcgctggcaagcagcttgaggatggtcgcacccttgcagattacaacatccagaaggagtccaccctgcaccttgtcctgcgccttcgtggaggtatgcagatcttcgtgaagaccctcactggcaagaccatcactctggaggttgagtcctctgacaccatcgacaacgtgaaggccaagatccaggataaggagggcatccctccagaccagcagcgcctcatcttcgccggcaagcagctcgaggatggccgcacccttgccgactataacatccagaaggagtccaccctgcaccttgtcctgcgcctccgtggtggtctctgagcgtgtgctgtggtgcagcattggacttcattatacctatgccgctcgtctgtcatatcatcgtgtcatggttgtgttgtgttctggtttagagtccctaagttgtgttgatactattatccatactagtacaatttgcttcactgtgcatcggtaccaatcgatgatattatcaaaaaaaaaaaaaaaaaaaaaaaaaaaaaaaaac

SEQ ID NO: 152 - DNA, 1364 bp, Oryza sativa
  ref <308>: DATABASE ACCESSION NUMBER: AK058320
  ref <309>: DATABASE ENTRY DATE: 2001-12-06
accaaaacctctccaatccccaaatcctcctcatctcctcttccagaacctttctttttcgatttcgtgttcgagttctttgtgattgcagcgatggcgtccgtggatctgaccccgaggcaggcgaggaaggcgtacggcggcgatggtgggacctactacgagtggagccccgcagacctgcccatgctggaactcgccaacatcggcggcgccaagctgtcgctcaacgccggtggcctcgccctgcccagcttttccgactccggaaaggttgcgtatgttcttcaaggcaagggcacttgtggcattgtcctgccggaggcgagcaaggagaaggtgatcgccgtgaaggagggagactccctggcactcccctttggcgtggtgacatggtggcataacctcccggagtccccaatcgagctcgtcatcctcttcctcggcgacacatcgaaggcgcacaaggccggccaattcacaaacatgcagctcaccggtgccaccggcatcttcaccggcttctccacggagttcgtcggccgcgcatgggacctcgccgagtccgacgccgtcaagctcgtgtccagccagcctgcctccggcatcgtcaagatcaagtccggccagaagctccccgagccgtcggccgccgaccgcgagggcatggcgctcaactgcctggaggcgccgctcgacgtggacatcaagaacggcggccgcgtggtggtgctcaacacggcgaacctgccgatggtgaaggaggtcgggctcggcgccgacctggtgaggatcgacggccactccatgtgctcgccggggttctcgtgcgactcggcgtaccaggtcacctacttcatccgcggcagcggccgcgtccaggtggtcggcgccgacgggaagcgcgtgctggacacccacgtcgagggcggcaacctgttcatcgtgccgcgcttctgcgtcgtctccaagatcgccgacgcctccggcctgcagtggttctccattatcaccacaccaaacccgatcttcagtcacctggcggggaagacgtcggtgtggaaggcgatctcgccggaggtgctggaggcgtcgttcaacgcgacgccggagatggagaagctgttccggtccaaaaggatcgactcggagatcttcttcgcgcccaactgagcagcttccctttgccattgcgtcgtcgcgtcggtgtcgtcttaaattaggattaagtcattaataatttcatctcttatcatgagatgttactaccttctgtcagtcttatgctattgcggttgaactgtggtgattcgccacttaaaattctattctattcgagagtgccttctggtgcaaatttgctc

SEQ ID NO: 153 - DNA, 1187 bp, Oryza sativa
  ref <308>: DATABASE ACCESSION NUMBER: AK058321
  ref <309>: DATABASE ENTRY DATE: 2001-12-06
ttgagcaattaccatactaaggagtgatcttatttatgactctggcaaaagtttgaatcctgctgtagacttgggccaggtttgatatattttgcattcaaatcttcttccatgtatctgagtataaacagatgagttttggtcgtcacacaagtgtgtatcaagtatcagatggatctgctccctttttttatgtaattgtttgttcgactctgtgatgacaaatagacaacacatttctctcataaagctttcactggcatataaaataacgagcagacataattagacatacttgccccaccggaatgaaaaaaaaaattaaccgcctctagaaggggctcgaaaaacaggttaaattacataattcaagttctgaagggattgtgagaaaattaaatgcatgtcgaacgtcatatatgatctgtactctcttatcatgcagattgaaggttcctttatacaaggaattggtttcttcatctatgaagaacaccaaacaaacagtgatggcttggttattagcaacagcacctgggactacaagatcccaagtgtggacaccatcccgaagcaattcaacttagaggtgctcaacactggataccatagaaccgtgtgctttcttcaaaagcttctggggaacctgccgtggttcttggagcatctgtgcattgtgcggtgagagaagcaatccaagcagcgaggatagagtttgcaggtggcagcgaatctacctgcaaatttcagcttgatgtccctgctccaatgacgctggtgaaggaactgtgcggcttggatattgtggagaagtacttggaagatctatctagccatggagttggaaattgcaactagagcattatctgcaattctgaaattcagtaacattcagttattgaaaggagtggtatgatccattcggtggggcttgataaaacagtgaaattcaaatgtttgcgatattcagtgtttttcttcaaccattttatcgacaatttgatggtactgaaccaccgatattttttatgtttattaaaacatgacaactgttgatgatataggagtttttccttgttttgaaggtatggtcaatcgaaacatatgtgccaaaaatcatggattatgtatgtactgtatataagctaaacaaaaataaagtgcacaatggtctatattgtgtgtct

SEQ ID NO: 154 - DNA, 1055 bp, Oryza sativa
  ref <308>: DATABASE ACCESSION NUMBER: AK103946
  ref <309>: DATABASE ENTRY DATE: 2002-08-28
accacagcagctcacgagctcaaaagacacacattccaaaagcatctgtggccatctcctcctagtcctaggctcgcgtcaatggcggcgtccaccatggcactctcctcccctgccgccctcgccggcaaggcggtcgccaatgccaaggtgttcggcgagggccgcgtcacgatgcgcaagtcggcggccaagcccaagcccgccgcggcgtcggggagcccgtggtacggcgccgaccgcgtgctctacctcggcccgctctccggcgagccgccgtcctacctcaccggcgagttccccggcgactacggctgggacaccgccgggctgtcggccgacccggagacgttcgccaagaaccgggagctggaggtgatccactgccggtgggccatgctgggcgcgctcggctgcgtcttcccggagctcctcgcccgcaacggcgtgaagttcggcgaggccgtgtggttcaaggcggggtcccagatcttcagcgagggggggctcgactacctcggcaaccccagcctgatccacgcgcagagcatcctggcgatctggggttgccaggtcgtgctcatgggcgccgtcgaggggtaccgcgtcgccggcggcccgctcggcgaggtcgtcgacccgctctaccccggcggcagcttcgacccgctcggcctcgccgacgaccccgaggcgttcgccgagctcaaggtgaaggagatcaagaacggccgcctcgccatgttctccatgttcgggttcttcgtccaggccatcgtcaccggcaaggggccactggagaacctggccgaccacctcgccgaccccgtcaacaacaacgcatgggcctacgccaccaacttcgtccccggcaagtgagtgtggatctccggcgagcaacggcggtgaggtccattgctttcatgcaggctgcggtgagacgcgcgacgttctcctctttccgcgtacccgaatatttgcttcgttcgttcagattgtgtaaaacaatgttatctggttggttgatgaaagaagtacaatggacctgattgtgt

SEQ ID NO: 155 - DNA, 1012 bp, Oryza sativa
  ref <308>: DATABASE ACCESSION NUMBER: AK103947
  ref <309>: DATABASE ENTRY DATE: 2002-08-28
gcacatcatccctccgcgcaaaagcctatcaacagctaagccaaacagggtcaggagccggggccgtccgggagagggaacactcgggcgatccgtccgtccgcccgcccgtcgtcgtcgcgcgccatggctgaggaggaggccaagaaggtggaggtggaggtcaccgaggcgccacccgccgctgccgctgccgcggagacggagccggctgccaaggacgtcgccgaggagaaggccgtcatccccgcccccgcgccgccggccgaggaggagaagcctcccgtcgacgactccaaggcgctggccatcgtcgagaaggttgcagatgaacctcctgccgagaaacctgctcaagggggctctaatgacagagatgttgctcttgcaagggtggaaactgagaagaggaactcattgatcaaagcatgggaggaaaatgagaagacaaaagctgagaacaaggcttcgaagaagctatctgctattctttcctgggagaacacaaagaaagcaaacatagaagctcaactgaagaagattgaggagcaactggaaaagaagaaggctgaatatgcagagaagatgaagaacaaagtcgcgatcgtccacaaggaagctgaggagaagagagcaatggtcgaggcaaagcgcggcgaggaagtcctaaaggccgaggagatggcagccaagtaccgtgccaccggccatgctcccaagaaactcatcgggtgctttggggcctaaagaaattttcgattcacaacgagcaaacgtgaaagtgttcatcagtggttgctttgcttctttcaccctcccaagtgcgtagtgtgtttgttggtgcaagaaaggtcgtgcctggtgtgtaaagtctggtgttgctgtatataacatattactcccaagacagatatgtttggtgctgtacatgtttgatgcttgacaggcaacattcttatgtgtagttaagaagccacattgttattgttattgacagtaagctgtttgttct

SEQ ID NO: 156 - DNA, 1452 bp, Oryza sativa
  ref <308>: DATABASE ACCESSION NUMBER: AK103948
  ref <309>: DATABASE ENTRY DATE: 2002-08-28
tactgatgctgattacaggtttgacctagctgtgcaacttggaaaattagaagttgcaaaggctatcgcgatggaagcgcaaagtgaatctaagtggaagcagttgggtgaactggctatgtccacaggcaagctagatatggcggaagagtgccttgtgcaagcgaaggacttaagtggcctgttgctactatattcatctcttggagatgctgagggaatcgagaagcttgcttctcaagcaaaggagcatggcaaaaacaatgttgctttcctctgtctctttatgcttggtaaattggaagattgcatacaattgctgatagacagcaatcgtatacctgaagctgcgttaatggcacgttcttatcttcccagcaaagtttctgagatagtagcaatatggagaaatgacctcagtaaagtaatttcttaatcttctgctcttatctttgcattgaaaagtgtgcttccatccagaaaacattttctgttattgttctggttttatctattcatatgttccttctgtacaggttaatccaaaagctgcagagtctctggcagatccttctgagtatccaaatttatttgaagactggcaggttgcacttactgtagaaaagaatgttgcttctcggagggtccattatcctcctgctgatgagtacttgaaccatgctgaaaagtcagacatgactcttgtggaagctttcaaaaggatgcaggtcattgaagatgaggaaacagaagatgcactagatgaaaatggagagcccgatgaagaggttttggaagagaacaaagtggaggagagcacagatgaagctgtcgaagttgatgctgatgagcctgaagagaccgttcttgtaaatgggaaagagggtgaggaacagtggggtacgaacaatgaaggaacttcgtcagcctaaaagaattgtttgtgctaactgaacatgagtaaggaccaaggatgctgtgccgttttgcattggtgatgctgtgccgtttgagctttgatcttatcatatccttcaactgaactccaaactcaagacatggaagcatgcttgtccaatggtatcaatccagaccggcttcttttttgctgcaatataggtgattctttcgtcctgcaacattttcatacccactcttcacgtcctgaaatcagtgggtttgggtgcagagctggttgtaacgaagggttttcttaataatttctatagagatgtgtagtatatgccacattaccatagccatcgcatgtcttctaggagatcaaagttttcgttggccatccactgtaatttcatgttattggacaaagtttacatgtagcatatgattgtggtgttaaaagctttccgtgtataattctctgttggtgctttgccgttgaacactgctgttgaaaatgctgattccttggaagagttaatctatcatttc

SEQ ID NO: 157 - DNA, 1055 bp, Oryza sativa
  ref <308>: DATABASE ACCESSION NUMBER: AK058322
  ref <309>: DATABASE ENTRY DATE: 2001-12-06
accacacaggcagccacacacacaccactccatttctgagctcttctagtttgagtgagagagcagcagaagggagtagtgcaagatgccgatccgcaacatcgccgtggggagccaccaggaggtgtaccacccgggtgcactcaaggcggcgttggccgagttcatctccaccctcatcttcgtcttcgccggccagggctccggcatggccttcagcaagctgaccggcggcggagcgacgacccccgccgggctgatcgcggcggcggtggcccacgccttcgccctgttcgtggcggtgtccgtcggcgccaacatctccggcggccacgtgaacccggccgtgaccttcggcgccttcgtcggcggcaacatcaccctgttccgcggcctcctctactggatcgcccagctcctgggctccaccgtggcgtgcttcctcctccgcttctccaccggcgggctcgccaccggcaccttcggcctgaccggcgtctccgtgtgggaggccctggtgctggagatcgtcatgaccttcggcctcgtctacaccgtgtacgccaccgccgttgaccccaagaagggcagcctcggcaccatcgcccccatcgccatcggcttcatcgtcggcgcgaacatcctcgtcggcggcgcgttcgacggcgcctccatgaacccggccgtctccttcggcccggccctcgtcagctggtcctgggagtcccagtgggtgtactgggttggcccactcatcggcggtggcctcgccggcgtcatctacgaggtcctcttcatctcccacacccacgagcagctccccaccaccgactactaagctcatcgccgccgccgccgcttgtccatgatcgcctcgtctccgactccgatccaaccgtttagtttctcgcatcagtgcatcatcaaacctgtttcatttgcttggatcagttgtacgttgaacgtactgtaagtgtggacctttgggaacccgttgctttgcttctgtaaaactgtgcatgcatttgcctgagttccttcgttttttcctagtc

SEQ ID NO: 158 - DNA, 1462 bp, Oryza sativa
  ref <308>: DATABASE ACCESSION NUMBER: AK058323
  ref <309>: DATABASE ENTRY DATE: 2001-12-06
tactgtcgtattgaatgatccgggtcgattgctttcggtgcatataatgcacacagctctagtttctggttgggctggctcgatggctttatacgaattagcggtttttgatccctctgatcctgttctggatccaatgtggagacaaggtatgttcgtcattcctttcatgactcgtttaggaataaccaattcgtggggtggttggagtatttcaggaggaactgtaacgaatccgggtatttggagttatgaaggcgtggcaggggcgcatattgtgttttctggcttgtgtttcttggcagccagctcgagcgagcgaagccagcagcagaagcagtagagagaaagtagagagatggaggggaaggaggaggatgtccggctgggagccaacaagttctcggagaggcagccgatcggcacggcggcgcagggctccgacgacaaggactacaaggagccgccgccggcgccgctgttcgagccaggggagctcaagtcgtggtccttctaccgcgcagggatcgccgagttcatggccaccttcctcttcctttacatcaccgtcctcaccgtcatgggggtcaacaactccacctccaagtgcgccaccgtcggcatccagggcatcgcctggtccttcggcggcatgatcttcgccctcgtctactgcaccgccggcatctccggcggccacatcaacccggccgtcaccttcggcctcttcctcgccaggaagctgtccctcaccagggccctcttctacatggtgatgcagtgcctcggcgccatctgtggcgccggcgtcgtcaagggcttccagaagggcctgtacgagaccaccggcggcggcgccaacgtcgtcgcgcccggctacaccaagggcgacggcctcggtgccgagatcgtcggcaccttcatcctcgtctacaccgtcttctccgccaccgacgccaagaggaacgccagggactcccacgttccgatccttgccccactgccaatcgggtttgcggtgttcttggttcacctggccaccatccccatcaccggcaccggcatcaacccagcgaggagccttggcgctgccatcatctacaacaggggccatgcctgggatgaccattggatcttctgggttggccccttcattggcgctgcccttgctgccatctaccaccaggtggtcatcagggcaattccattcaagagcaggtcgtaacctgcatcagctattatcactgtcaagatgccaatccagagcaagctgtttctgatgggcgcggctgtttcccgctgcctgctttgttagtaattattgtggagtcgacgttcctcttcaagtttgttgtactactgtttttatctgaacacagacttgtaatttcagtactcagttgtgtatccctcttttactatgtgcaaattaagctatcctcctcctattggagttcggttc

SEQ ID NO: 159 - DNA, 1310 bp, Oryza sativa
  ref <308>: DATABASE ACCESSION NUMBER: AK058324
  ref <309>: DATABASE ENTRY DATE: 2001-12-06
aaagaatgagccggcgactcataggcagtggcttggttaagggaacggaacccaccggagccgtagcgaaagcgagtcttcatagggcgattgtcactgcttatggacccgaacctgggtgatctatccatgaccaggatgaagcttggatgaaactaagcagaggtccgaaccgactgatgttgaagaatcagcggatgagttgtggttaggggtgaaatgccactcgaacccagagctagctggttctccccgaaatgcgttgaggcgcagcagttgactggacatctaggggtaaagcactgtttcggtgcgggctgcgcgagcggtaccaaatcgaggcaaactctgaatactagatatgacccaaaaataacaggggtcaaggtcggccagtgagacgatgggggataagcttcatcgtcgagagggaaacagcccggatcaccagctaaggcccctaaatgaccgctcagtgataaaggaggtgggggtgcaaagacagccaggaggtttgcctagaagcagccaccctttaaagagtgcgtaatagctcactgatcgagcgcccttgcgctgaagatgaacggggctaagcgatctgccgaagctgtgggatgtcaaaatgcatcggtaggggagcgttccgccttagagggaagcaaccgcgaaagcgggggttgacgaagcggaagcgagaatgtcggcttgagtaacgaaaacattggtgagaatccaatgccccgaaaacccaaggtttcctccgcaaggttcgtccacggagggtgagtcagggcctaagatcaggccgaaaggcgtagtcgatggacaacaggtcaatattcctgtactaccccttgttggtacggagggacggaggaggctaggttagccgaaagatggttataggtttaaggacacaaggtgaccctgctttttcagggtaagaaggggtagagaaaatgcctcgagccgaggtccgagtaccaagcgctgcagcgctgaagtatgagccccgtggactagccattgcttctccacgaggctcataccaggcgctacggcgctgaagtatgtaacccatgccatactcccaggaaaagctcgaacgaccttcaacaaaggggtacctgtacccgaaaccgacacaggtgggtaggtagagaatacctaggggcgcgagacaactctctctaaggaactcggcaaaatagccccgtaacttcgggagaaggggtgccccctatctactatgtatactactaccatatctgtccagacattctaattccaattttttttctctctct

SEQ ID NO: 160 - DNA, 1016 bp, Oryza sativa
  ref <308>: DATABASE ACCESSION NUMBER: AK103949
  ref <309>: DATABASE ENTRY DATE: 2002-08-28
cttgtcatctcggcggcggcgcggcgcggagcagaggaggacgaagcagcaggcggcggcggcagagcacggcgacctagcccgacctcgcaaccatggcaaggggtttgaagaagcatctgaagaggctcaatgcgcccaagcattggatgctcgacaagcttggtggagcttttgcccccaagccatcttctggtcctcacaagtccagggagtgcctgcctctgatcctcattatcaggaacaggctcaagtatgctctgacataccgtgaggttatttctatcctcatgcagcgccatgtcttggttgatggcaaggtcaggactgacaagacctacccagctggtttcatggatgtcatttccatccccaagactggtgagaactacaggcttctgtacgacaccaagggacgtttccgccttcagtctgtcaaggatgaggatgctaagttcaagctttgcaaggttcggtctgtgcagtttggccagaagggaatcccctacctgaacacctatgatggtcgcaccatccgctaccctgacccgatcatcaaggcaaacgacacaatcaagatcgatctggagaccaacaagattgtcgacttcatcaagtttgatgttggcaatgttgtcatggtgactggaggaaggaacacaggccgtgttggtgtgatcaagaacagggagaagcataaaggcagcttcgagaccatccacgttgaggatgccctgggccaccaattcgccacccgtctgggcaatgtgttcaccattggcaagggcaacaagccttgggtgagcctgcccaagggcaagggcatcaagctcagcatcatcgaggagcaaaggaagcgggatgctgccgcccaggctgctgccaacgcttaaaatctgctgctgcgtctgcctggagttttgctatagcgagttgtttgcaaggatatagaactatctgccccagactatccttttttgagctcttttgcctaatgttatgttgatcaattcgcg

SEQ ID NO: 161 - DNA, 1618 bp, Oryza sativa
  ref <308>: DATABASE ACCESSION NUMBER: AK058325
  ref <309>: DATABASE ENTRY DATE: 2001-12-06
gttccactcctccctcattctctcccacagttagcatctcgccattcctccgatccccacctccaccaatggcgctctccatctccacgccgccgacctcctcctccctcctgccggcctccctccaggtcggcaggtggagctcgtcggcggcgatgtcggccgggcctgtggcctttagcctccggaggccggttcttgcggcccgtgtagccgccggcggcaacgcaccgtcttcctccgtggacgaggtggtcactgagctcgatgccgtggccagcttcagcgagatcgtgccggataccgtcgtgttcgatgacttcgagaagtttgcgccgaccgccgccacggtgagctcgtcgctgctgctcggtatcgctggcctcccggatacaaagttcaagagtgctatagatacagcattggcagacggtgaatgtaacacaatggagaagcccgaggaccggatgtcctgtttcctaaccaaggccctggcaaatgttggagctgaaatggctcatctagtccctggtcgggtgtcgactgaaatagatgctcggttggcttatgatacccaaggaattatccagagggtgcatgagcttttgaagctatacagtgatcatgatgtcttatctgaacgcctgctgttcaaaattccggctacatggcaaggtatagaggcctcgaggttgcttgaatctgaagggattcaaacacatttaacatttgtgtacagttttgcccaagcagcagctgcagcacaagccggtgcatctgttgtacagatctttgtgggacgtgttcgggattgggcaaggactcactctggcgacccagagattgatgaagctttgaagaaaggagaagatgctgggcttgctttggtgaagaaagtgtatgcctacattcacaaaaatgggtataaaacaaagttgatggctgctgccatacgcaacaagcaagatgtgtttagcctcctggggattgactacatcattgcacctctgaagatattgcagtctttggaagaatctgtcactgatactgacgtgaagtatggttatgtcccaaggctgactcctgctcttggcaagacgtacaacttcactgaagaggagcttgtgaagtgggaccaattgagtctagcagctgcaatggggccagctgcggaagaactacttgcttctgggttggaaggatatgtgaaccaagcacgccgagtggaggaactcttcgggaagatctggcctcctccgaatgtttgaacacattctatgatgaggaccagaccatgccacagtcttctattccaaagaataataacaacagccacggacagtgctggccagcatttgctcgttcccttcaaagaatacttctcttagcctgtctgtgtttgtactttgtagttctctagctatctagcaaatctcacgatgacatgtcaagaacatctttgttttcttttcgcaaagattggatacggattctctcgagtatttcattagcccgtgagatgtgtaccatgaaatgtcacccaaatgctctgctggattgttctgaagtctgaactgaatcttcagagttgcagttacttatcactacgtttttttgt

SEQ ID NO: 162 - DNA, 1192 bp, Oryza sativa
  ref <308>: DATABASE ACCESSION NUMBER: AK058326
  ref <309>: DATABASE ENTRY DATE: 2001-12-06
atctccccaccacaccacacgccatctcctccctccgccgcggcgacgtcgagggaatcggggcggggccggagctagctagttcgccgccggcgagacgcgtgtgccatggtggcagcggcggggacgatggagctggagatcctggggatcaacttcgggtgcgtcctcgcggcgctcgcggacgccaagatcccggagaaggactgcctgctcccgctcgcctccaagctgctcggctacgccatcgtcgccgcctccaccaccgtcaagctccctcagatattaaagattttgaagcacggaagtgtaagaggacttagtgtagcatcctttgagcttgaggttgtcggctacacaattgctctagcatattgtattcataaaggactgccattttctgcgtatggggaactagcttttctgttaatccaagcaattattttggttgcaatcatttactattactccccaccaatgggaaccaagacatggatgaaagctttactatattgcggactggctccaacagtattgggtgggaaaattgaccctgctctttttgaagtcctctatgcttctcagcatgctatcttcttctttgctaggcttccacagatatggaagaattttatgaacaagggcactggcgagctgagctttctgacctgtttcatgaactttgctggttccatagtaagagtgttcaccagcatccaggagaagactcccttaagtgtgatactgggatctgcaattggcattgtgatgaatggtacgctcttgggtcagatagtgttgtaccagaagcctgctccaaagaaagagaagaagagagattgagcacaactgcacaacacaagaaaaggcagaatgttcatctctgtgtccatcttcagacaagcaaaaggctccagtgtatgaatttcttgcagagtcgtgtgatgatgaaaaacgatgggcaccatatacagactagatatggatatcttgcgtacttagttttagcatttagaagtgtcatgactgatgttagattattgttagattgctgtactgtgcaagctactgacagtggaaaaactgttctcttaactctatgtttgagactatttttttatcgtctgtttatttttcaggcataaatattgtaagcacggggctacatacaaaatccagaaagttgtttctc

SEQ ID NO: 163 - DNA, 1249 bp, Oryza sativa
  ref <308>: DATABASE ACCESSION NUMBER: AK058327
  ref <309>: DATABASE ENTRY DATE: 2001-12-06
agcagcgatggcaatggagaggcttatctcttcgccgctcctcccgcgccggcctccccgcgccgccttctcccgcccgccgccctccctcgccgccgcgccaccccaccaccgcgccggcggtgcggcctccgggtacggctccaggccgcctctcgcctcgctcctcctctccaggcaccaccaccaccaccagcctccggtcctcgcggccaatcctgctgccgatgtggccgccggcgaggctgtccctcccgccaccgccaccgccagccggcgcttcctccagaaggtggcgtcggctgcggctgccactctgttggcgacgattgcactgacgctgatccagccggcgtgggcgccgccggcgttggcgtcgttccactcggcggcgaaggcgggaggtggcatcttcaagtcggagctgctcagcagcgcgtggacggggttcctggccggctgcctgcacacgctctccgggccggaccacctcgccgcgctggcgccgctgtccatcgggaggtcgcgggtggagagcgccgccgtgggcgcgctctggggctgcggccacgacgccggccaggtcatcttcggcctcctgttcctcagcctcaaggaccgcctccacatcgaggtcatccgaacgtgggggacccgcgtcgtcggcctcacgctgctcgtcatcggcgccctcggcatcagggaggccaccgaggtgcccacgccgtgcgtcgcgctggagaacggcggcggcggcggcggcgcgcaccgtggcccgctcgatgctctaccagccaccaggaagaagatcaccttcgccacgttcgccaccgggatcgtgcacgggctgcagcccggcgcgctcatgatggtcctgccggcgctcgccctcccgtcgcgcgtcgccggcgcggcgttccttggcatgttcctcgtcggcaccgtggtcgccatgggcagctacaccgtcctggtcggctcttgtacggaggcgctcaaggagagggttcccaggatcacggagaagctgacatgggctgcctcgctcgtggccatctccatgggcctcggcatcctcatcagccagtctctcggctttagcttgtactgatccgccatccctcgcgacacctccttcttcttcttcgccattgttaagcttccactgcctccactgtaggaatctgccatgagaattttgcaaatgttgcttgttgagatccaggagaattcaagtttagttcacaag

SEQ ID NO: 164 - DNA, 559 bp, Oryza sativa
  ref <308>: DATABASE ACCESSION NUMBER: AK058328
  ref <309>: DATABASE ENTRY DATE: 2001-12-06
aggggccttttgatattttctctgtcggtaatgatgattcagaagccaatgtcataaagttcagcagtgatggcaggcggcttcttttaaccaccaaagctgggcgtgttcatgtgctagattcatttcatggcaataatcaacatacaacgtgaagccagtggtaagcaattcgacgctggaagcatcattcagccctgatggaaaccatataatatctggctctggtgatggcagtgtatatgcttggaatgttaggagtggaaaggttgctcgctggggaagcacagatagtgagccaccgctaattagatgggctccaggatctttgatgttcttgactgcatcttcggaactgtcttgttgggtccctgatctatctaagctgggatcctttactgttagtaagtaattcgaatggtacgagttgttgtttgtgtatgctcaggcctttgttctagctgtttgcaaaatgacaatgttaggtaaaaatctgagctgcagtgggtcaagcctcgggtcaacctagtccgggccatctgcatatcttgatcttgcc

SEQ ID NO: 165 - DNA, 1127 bp, Oryza sativa
  ref <308>: DATABASE ACCESSION NUMBER: AK058329
  ref <309>: DATABASE ENTRY DATE: 2001-12-06
gtttactttgcttaatttgcttgccctcatcctcatggctgcggcggcggcggctgcttctgctccccgcctcctcctgccgccggccgcctccaccttcccacaccagcacgagcacgtccgccgcaactggcaccggccccgccgccaggtcatctctgcccgcgccggcgcctccgtcgccgcccggggccttgatgcagacgacttccgccatccgctggacaagcagaacacactgctgctgagagcagttccagggcttaatgatatgggcaaggctttgctaggaccagtttctgagcaagttatggtacttcagaacattggatcgtctgtgctagtctctgaaaaccagctttcagatcttcatcagaccttgaccgaggcagcaaaactattgaacacagacgctcctgacttgtacattcggcagaaccctgttcctaatgcttacaccttagcgatcagtggcaaaaagccattcatagttgttcatacaagccttgtggagctgctcactagaaaagaactgcaggctgtgttggctcatgaactgggacacctcaagtgtgaccatggcgtgtggcttacatttgccaacatactgacaatgggagcatactctgtccctggatttggcatggttgctgggtttctggaagagcagctctacaggtggctccgggctgcagagctgacttgtgatcgagcggctcttcttgtagtgcaggaccccaaggttgtgatatctgtgctgatgaaactggccggagggtgcccgtcgcttgcggaccagctgaacgtggacgccttcctggagcaagctcgctcctacgacaaagctgcgtcaaaccccgtcggctggaacgctcagacgagagagctgtcgcatcctctgccggtgatgcgagcccgcgagatcgacgagtggtccaggagccgagagtacaagacggtgcagcagaaggtcattcagctccagctcaatgatcacgatgcaagctagctaagctgcaggctggaccggcctgatcaactcacttcactgtacaagtagaagtagaaatggaatctagctgtatatgtttgtacatggatggaacggaaccgaactgttggaggtc

SEQ ID NO: 166 - DNA, 656 bp, Oryza sativa
  ref <308>: DATABASE ACCESSION NUMBER: AK058330
  ref <309>: DATABASE ENTRY DATE: 2001-12-06
aagttctctctctcttcctctcgtcgccggaggcgggaggccatcgacgctgaagtgaaggggatcgcgatctccggcgagcgtgcgggggaagatggctgacccagagttggaagctatcaggcagaggagaatgcaagagctaatggcacagcatggtgcggcaaatccgcaaaatgctgggcaacaaaaagctcaagaagatgcaaagcaggaagctgaggaacggcggcagatgatgcttgctcagattttatcttctgaagctagagaaaggctctcccgcatagctttggtcaaacctgataaagcaagaggggtggaggatgttcttctgagagctgctcagtccggtggaatatctgaaaaggtgtctgaagaaaggcttatctcacttctggagcaaatcaatacccacactagcaaacagacgaaagttacgattcagaggcgccggagcgtccttgacgatgatgactagctgcatgtgtgttgtgtgtacgatgagctggtggaggagtctgctgtagcgcaaaactacttagaaatgatgattatcaaacgctatatcaacaaccatcaaaacttgagcgactatttgatggatatttggccgtatatgaattaattcgagtttggtttggcttgttccattg

SEQ ID NO: 167 - DNA, 1204 bp, Oryza sativa
  ref <308>: DATABASE ACCESSION NUMBER: AK058331
  ref <309>: DATABASE ENTRY DATE: 2001-12-06
accaccaccacacacacgggccacacacaccgcggaggaatccaatccagcggctgagatcgcgccacgtatgttcccccgcttgctcctcgcccaccgcctcctcgccggcgccgccgctcctctcccccgccgccggacggccgccgccatgtccgccgcggcgccggggacgcggctgctgcgcggcgtggtgttcgacatggacgggaccctgacggtgcccgtcatcgacttcccggccatgtaccgcgaggtgctcggcggggacgaggcctacgcggcggcgcgcgcggcgggcgggggctccgtcgacatactccactgcatcgagggctgggcgcccgacgagcagcgccgcgcctacgaggtcatcgcgcggttcgagcaggatggcctcgaccgcctccagatcatgcccggtgcctctgagctctgcgggttcctggacgcaaagcagatcagaagaggtttaatcacccgcaatgtgaagaccgcagttgatttgtttcaccaaaggtttggtatgatgttttctccagccttaagtagagaattccgcccctataagccagatccagctcccctgcttcatatttgctccacttggaatattccaccaaatgaggtggtcatggttggtgatagcctcaaggatgatgtcgtctgtggtaagagagcaggagcttttacttgcttgcttgacgaaacaggacgatacggtccccatgattctttgcctgaaggtgttcgacctgacttcaaggtttcttcgctttccgaagtattctctgtgctggaagagcattttgatttggcaccggtggtttcagagagtagaatctgacaggaaagtattagttatctgtgatctaacatggaacccagctcctgtgtcttaatactatgaacctccatcagtggtgtttcaagtaccagaaacccttacggcctatgaagattatgctctccaccaaagtggattgcagtttgattttgccacttgccctcaaaatgattcatcgttcattgtcagccggtttgatgtatatcactatgtcctgtccactatacctgttagtattctgtggcacggacagtgcgttctgttatagacaaaaatcaaccctcgcgatgactggcagaatttgccgtagtatttgggtgattcagaatcttttatctgtggccatctttcatattc

SEQ ID NO: 168 - DNA, 1701 bp, Oryza sativa
  ref <308>: DATABASE ACCESSION NUMBER: AK058332
  ref <309>: DATABASE ENTRY DATE: 2001-12-06
aaatcacatcacatcgcgtcggagaatccctctcctcccgtcccgccgccgccgccgacgacgacgacgacgtccagccctcctccgtaatcccccacttgttgggcctgcaccttgtggtagccactctttaatcaatggagagcacagagcccctacaggatatcatgtgcgagtttcgtgcgggtaagatgtcccttgatggaacacgagtgatcccagacacacgcaagggtcttgttcgcataggaaggggtgaagaaggcttggttcattttcaatggcttgatcgtggacagaatctagttgaagttgatcaaattgtcttccctgaggaggctgtctttgagaaggtaacacaatcttctggaagggtttacatcttgaagttcaggcacgatagcaggaaattcttcttctggatgcaggagccaagtgctgatgacgactcacaaatatgtcgccaagttaatgcctacataaaccgaccattagatggtgaggcagtttctattgaagctgaaatgtcacatgaagacacagctgatgatgacatctcctccagagctgggaatttagttgatcagagcatgactgctgatttagctggtgaggtgacatctgctgctgggccagtacggttggaagacctgcagagaatactgagtgctatacagccatcagatgctgtggcagaccctgatgctggattaggattaggagacatcttgaagcctgatttggtgttaccactcatggaaactttgcccattgaacagttggcatcatatcttccagagggcccatggactgctggtgatattcttgaactattgcaaagtcctcctttgcggcagcaagtagaagcgtttacccatgtgctgcggactgggcaaatagatctagcacaatttggagttgaccctagtaaatataaattcacagtagcttcgttcctggaggctcttgaagactccgtggcaaaagcttcaggagctggagacaaggattcagagtcccagagaggcggtggaaatgatcccatggatgagagttaatgtcaaaatggtttggtttgaaaacttgatgaaacacaaagcgggactggacttatgttggcacgcacaggcctatttctagtcatttgatctgattatagatgcttgataggtggcatagacattttgaagctggctttattctgcactgcctgtgctgttatgtgtatacagggaggatacggtggtctagcctattttgcactggtgtatgctcagtagagtattaaaggtactggaccattgttaagtgtacttgggcgtcgtcgtcatataatggatggatggatcggctgatcgatcagctgggttgggcgtacgtctgcgcactgctcctcccagttcaagtacggatgatcgatctcattcttctctgctctgcatgtatgatggtagaatcctgagcaagatgctcgcggaagttggcgattcccaaacagctttgcctcttgctgcttctttttcgtcgtccaaagcatcgttggtagcatctgtactgatgaagaagatgctcgccctcgtcatcgttgacgggaaaagcttcgatcctgtcgttgtcgttgttggacgccgttgttcatgtgtttcggcccacattagtactcataagatttggggcaaaagtatttactaatattcatgc

SEQ ID NO: 169 - DNA, 921 bp, Oryza sativa
  ref <308>: DATABASE ACCESSION NUMBER: AK058333
  ref <309>: DATABASE ENTRY DATE: 2001-12-06
ccagagcaagcagagaggaatgattggcctggtgttgtacagcacctggtacgagccgctgagagatgtccccgaggaccggcttgccaccgagcgagccttggcgttcgaaactccgtggtttcttgatccactggtctacggcgattacccaccggagatgcgccagattctcggcgggaggctgccgagtttctcgccggaggacaggaggaagctgcggtacaagctggacttcatcggggtgaaccactacacgaccctgtacgccagggactgcatgttctcagactgcccacaggggcaggagacgcagcacgcgctggcggctgtcactggagagagcaacgggcttcccattggaactccaacagcgatgcccactttctacgtggtaccggacgggattgagaagatggtcaagtacttcatgagaagatacaacaacctgccaatgttcatcacagaaaacggatacgcgcaaggtggagatagttacaccgacgcagaggattggattgatgacgaggataggatagagtacctggaaggctatctcacaaaacttgccaaagttatcagggacggagctgatgttcgtggctacttcgcctggtccgtcgttgacaatttcgagtggttgtttgggtacacccttcgatttggactgtactacatagactacagaacacaggaaagatctccaaagctatctgcgctgtggtacaaggaattcctccaaaatctgcatgaaaatcaatagataaagttgtactttcgaatttaaatagggtgtaaaatgatagtaattcgtgtaatgatgtaactgtagtactgtacattagtacataatgttgattagaatggatacatgatatccacctatatatatccaatttattggacaatttactgtaaact

SEQ ID NO: 170 - DNA, 569 bp, Oryza sativa
  ref <308>: DATABASE ACCESSION NUMBER: AK058334
  ref <309>: DATABASE ENTRY DATE: 2001-12-06
cttctccccgagctgctgttttggattaatgggttctagctcttttaacagcgataagaaggcatgcagattcttgaatcgcactggatgtagaagctcctgtaactcacatgagcatgtagtgaaagatttgatctctgcttggaaaaattaatacagcgtgtttgtagcctgtaaatcttagggatactgctgagcctctgtaaattatatggcattgtaccatttattgtcggtacccacattcagaatcaagactgggtctggttttgagcaacagagcagtcacacagagcagaaatcagttttcttagaagatgtttgtcaggttcaccatttacacatgtaatctggagcatgttggagtatatcatgttcaggtgccttttaagttaacataatgtagtctatgcacttacctctggtaagaaatgtcacttggatcaatgtttctgtatgcaaaccaatgtaaaatttgatagtgatggattcagtaagaactctgatgtcaaacacaaccagatacagttttgatttgccgtaatgtttatattgacaatattgatctc

SEQ ID NO: 171 - DNA, 1100 bp, Oryza sativa
  ref <308>: DATABASE ACCESSION NUMBER: AK103950
  ref <309>: DATABASE ENTRY DATE: 2002-08-28
ctctctctctctctctcttctccggctccggcgccgcctcccctcgttttccgagagagagagagagagaggcaggcggaaggggggatggacgactacgcgcgggagatgatggagctcaagacgctcgtcacccgcaccctcgagaagaagggcgtcctcgtcaagatcagggctgagctaagagcaagtgtgttcgaggccatagaagaggaggatagggtagtggagaatgatgatggtgggaatcccgctttgcttggtagctgcaatgaccgagctaagcagctgcatgcttcaccatcaggtaggttattaacagcacttgtaagtgaatacttggagtgggcccagctaagtcacacgatgaaagtttatctgcctgaatgtaatctgccaaaggacttctggaagaatgaattaaaggatttttctaacaaaagcggagctgaagggagcaggagtgctgaaagtggccccatgcttctagatgttcttgaaggatatctcaaatatgagaatttgtctcaaacaaggatggctggtactggtaggagaataatcaattccgagtcggatccggctctaaatgctgaacataggaacacgaggaggccaccgtcgtcttcttcagttacaggcttgcctcctatgggaaggccaatgccatcgtcacagatgtcagaccgaagaggggggtcttcggcttccaatgcaaggaaggatgaatacaactggagatatgatgctgatgatatctctgaagaagtgttgcgagcatcaagtgctctagaaaacgtccagctagaccggaaagctcgcaatctgacgacttcttggaggcatccaggcgacggtgctgagtaaaatcggaaggtgggatgggtccaattcaccattgcgctgcttggacccccttgggccatttgtatcgttttggttgctgcggtgggattgtgcgcttgcgtagaagaatgctcagtgttgatcatgcctactgtactcctagctcatttgtttatgcaccatatatgggatttgatttctgctggacaatcttgttcttgtgcgtataattttagttgcgtgtagtttctaac

SEQ ID NO: 172 - DNA, 378 bp, Oryza sativa
  ref <308>: DATABASE ACCESSION NUMBER: AK058335
  ref <309>: DATABASE ENTRY DATE: 2001-12-06
tacgccgttgtgtctggtgctaaagacacaagctttatccagatatactcaagaacacctaatcctggaccagaattcatcgagaagtacaagtcctacgctgccaacttcggttatgatccgagcaagatcaaggacaccccacaggattgcgaggtgatgtccacggaccagcttggtctgatgatgtcaatgcctgggatgactgaggctttgacgaatcagttcccagacctgaagctgagtgcacctgttgcattcaacccattcacaagtgtgtttgacaccctgaagaaacttgtagaactgtacttcaagtaaactccatattgtaaaacttgtgatcaatgttccctccacatgaagatgcagttgaat

SEQ ID NO: 173 - DNA, 1490 bp, Oryza sativa
  ref <308>: DATABASE ACCESSION NUMBER: AK058336
  ref <309>: DATABASE ENTRY DATE: 2001-12-06
aaaaaacgcgagaagagagagagagaggcttttaattcgaattctctctctcatcacggcttcttctgcttctccttctcctcccccctcatccctcctccgccggtagccgccggccggaagcgagcagcgagcgagaccggagcccgccggagccggtctcgctcccccctcctcccttgttcgcgccgcccccgaggaccccttacaatatctagtgtatttatggcctcagttacttatattgatgactccggttctgaggtaattgatcctccaaagactgaggtgctggatgttaccgaacttgctggtgatcctgttccgcattcaccaaaaccaaatgtggtagtttctagcagtgtgcgtgaactgcttgaatgtccagtctgcctgagcgcaatgtatcctcccattcatcagtgctctaatggtcatacattgtgctctggatgcaaaccaagggttcacaatcgctgtccaacttgtaggcatgaactgggtaatattagatgtcttgctctcgagaaggtggctgcgtcgcttgaacttccatgcaagtaccagaacttcgggtgtgtaggcatttatccttactactgcaagctgaagcatgagtcacagtgccaatataggccttatagctgtccatatgctggatctgaatgcacagttgctggtgacattccatacttggtgaatcacttgaaagatgaccacaaggttgacatgcataatggctgcaccttcaaccatcgctatgtcaagtcgaatcctcatgaagttgagaatgccacctggatgcttacggttttcagctgctttggccagtacttctgcctacatttcgaagcatttcagctggggatggcacctgtgtacatcgccttcctgaggttcatgggtgatgacttggaagcaaagaactacagctacagcctggaggtaggaggcactggccgcaaaatgatctggcaaggggttccccggagcatcagagacagccatcggaaggtccgggatagctatgatgggcttatcatccaacggaacatggccttgttcttctctggtggagaaaggaaggagctcaaattgcgggtcactgggagaatttggaaggaacagtgaaaataaaatgtgaaatgatctgttcatcgttcttaacccttgcatgaacctatgtatcatcacagtgcgagaattatagccattcataggcagtgactctaaaatgaagacttgtaatgttattagcttgttttagctaccatcttctgttagattggtgcctgtggatgactagatgacagtcatgtagaccagagtggcactattgtagaattcctggcaaacttctctttgccttgaactgcttgttgagttgccattctgtggtatagggaaatctaatggcaattcatgagatgaatgtgttgaactctttttcatgtttccagcatatttctagcttctttgttcattctttc

SEQ ID NO: 174 - DNA, 1285 bp, Oryza sativa
  ref <308>: DATABASE ACCESSION NUMBER: AK058337
  ref <309>: DATABASE ENTRY DATE: 2001-12-06
accgccgcccgcactttgctttgcttccggtctccggtctcctcctccaaactccggtcggtctccggcgcggcgcagccgagcccccaccatacgacgcggggaggcagacgacggggcgccgctgctgctgcccggggagccaccgccggtcgccgccgcagcagcagcagcagcgtgttcagaggagaagggggcagcaggtaccttggggctctgccgcatgccgctgtgggggacaggctcgtccgcggcgtccgcggcggcggagggcagcgcggccggaggggatggggcggcccgctcgtcgtccggcggcgccgcggtgatccggtcgctgctccccacccgccgccgcctccgcctcgacccgccatccaagctcttcttcccttatgagcctgggaagcaagtccggagtgctgtcaagatcaagaacatcagcaagtctcatgtagcatttaagttccaaacaacagcaccgaagagttgcttcatgaggcctccaggtggtatacttgctccaggagagagcatcatagctacagtgttcaagtttgtggagcatcctgagaataatgagaagccattagatcagaagtgcaaggttaagttcaagattgtcagtctgaaggtcaaaggacctatggagtatgtcccagaactgtttgatgagcagaaaaaccaggtagcagttgagcaaattctgcgtgttgtattcttggacgctgagcgtcaaaccccacaaatggacaagctcaagcgccagcttgctgaagcagaggcagcacttgaagcacgcaagaaacctccagaggacaccggcccccgcattgttggtgaaggccttgtaattgatgaatggaaggagcgaagagagagataccttgctcgtcagcagattgaaggggttgattcagcgtagacacggcaccatgaactgtaaaccattggttgcttgaacatatcgttttatcgtcgccacacatccttctgtccatggttttttcagtttttacaaaggttctgcttggaacaagagtgaggctttgtgtaattaggatttgagcttcatgctgcacttcattcctgggtctacatgtagatagccagtcactgcttgataataatattttctatgctagatcatgtacttggggttgtggacttagacgtgtggatgcgatacatttcttaggtgatgttcccatcaatattgaatgtaatgttgtctgaacgtgctcttcaaagtgataaaatgaaagctctcctatcatgttactct

SEQ ID NO: 175 - DNA, 365 bp, Oryza sativa
  ref <308>: DATABASE ACCESSION NUMBER: AK058338
  ref <309>: DATABASE ENTRY DATE: 2001-12-06
acagcacactgctactagctccatcacagctaagctaagctaagcctacgtacggtggtcatggcgtccaagaccatggtggtgctgttcgtcgtggcggcgtctctcctcctgctctcgcaggacgtggcgtttgccgccagagagctcgctgatgccagtggcgaggcgagtaagggaggcgataagaaggacgacatcagcatctccattggagtgaccgtaggcgccacgcctgtagtgaccataaacaccaagcccaaacaccatgggaagacgccgagctatggccactctcacccatgacgctctctcagctattgacactacaatgactctgttcaatacagtgatgattcgatgtt

SEQ ID NO: 176 - DNA, 979 bp, Oryza sativa
  ref <308>: DATABASE ACCESSION NUMBER: AK058339
  ref <309>: DATABASE ENTRY DATE: 2001-12-06
gagatgcggaaacaggaattgttagctcaattggcagcggaagaacaacgtgggcatgaactcacaaaaatagtcaaggaattgctacctactcctaagaagaatatgaattcggaaaggcaaccacgatatagaagaagaagcaatgatagagccagggtgtcaagacgtcttactgaagaggctgagcaatacttcgaagatttcctgtcaaatgttgaagatactgatttttcatcttttgatggagaaagaagtgatacaagttcaagcagaagagatgtggtacaaaacaccaagatcgaaactccaataacgcttccaaaagttgcttcacccgtcgaggcagacggggttgtccttccctggctgcaatgggaaacaagcaacgaccttcaaacctctccatgcaaaccaaagacacagggagcaagtaccgcatgcagcaccagcagtcgcactatgagcagccgcgggagttggagtcctggagatcatgatagcgcagctggctccaaggatacacttctgacaaggttcgaggaggctgcgtctcgccgaagcagctgccccgataacactcaaagatcgtcatttcacaccgatgactacatgcatttgcggaggagccacgatcttctcttggagcgatggaggcaaaaggaaagaattggcgacggtggccttatcctgtgcagtagatcatcaataatgtaggttatggcccatggttcatatgtagaagcagatgattagcatatcaaaaacaatgtagccattattcatctgtgtgcttacccattaggttgttggttgtgatgagctaaggccaaaagtgtgtacatttgcaaacttgacataattacttcatggacctgtggtgcttagctatattctaaatttgtatagacgtttgcttttaacttagtcctaaatttgtttaccaacctcagccataaagatatacgaaatcctttcc

SEQ ID NO: 177 - DNA, 1401 bp, Oryza sativa
  ref <308>: DATABASE ACCESSION NUMBER: AK058340
  ref <309>: DATABASE ENTRY DATE: 2001-12-06
cccctcctcccccgcgctctccctctccccctcacgccgtcgcgtcgctgtccccgacacctccgcctccgcctcccgctcccgccgccgcaggtccgccgttcgccgcctccgttgccgaccgccaccgccccgcgccgccttccccgcctcagcctccgcctccgcctccgcctccgcctccgcgcatcgcaacgcaacctcaggcgcagaggcggcgacttgactcccccctccccgccctctcgctctagggtttcctcccctccccgtcgtcagccgccaccccaccccctcccccgccgggcttcgccatgtacggtcaccgcggggcaatgatgggaggcgggggggtttcggatgggtacgagggatcaaagaggccacgaatgatcgaatccaatccatacttcgcagtgaccgcaggcagtcccttggatgtctcaaagagggccaggatgatggaaccagcccctccctatttcggagccatgggcagcagcgctgctggtggcaccagtgccttctaccagccctacggcgccaacttacctggtgcaggggctaacagtgccatccagaactttccaggggtccgtctacgagggctcccctttgactgcgacgatcttgacatcttcaagttctttgttgggctggacatagtggactgcctcttggttcacaagaatggccgcttcaccggcgaggcttttgtcgtattcccatcagccatgcaagcagagtttgcactgcaccgcaaccggcagaacatgggcaggaggtatgttgaggtgttcagatgcaagaagcaagagtactacagcgcaatagctgctgaggtgaaccagggcggcttcttcgactcggagtaccgtcactccccacctccacggcccaagaaaccagctgaagacaagagcagcatggaatatactgaggtgctcaagctccgtggcctgccctactctgctaccactgaagacatcatcaagttctttgtggagtatgagctgacggaggaaaatgtgcacatcgcgtaccgtccagatggtaaggccactggagaagcctttgtggagttcccaacagcagaggttgcaaagacagccatgtgcaaggacaagatgaccattgggacaaggtacgtggagctgttcccatcaaccccagaggaggccagcagggcgaaatcgcgagccaggcaatgaattatttgatccagtcatctactttgccctggccttgagcagctgtgttccagtttagctttcgctttgcatccttaaactgtatccctcgcctttaggtttgtgtgcgtgtgttttagtatgcatcatgttgctaccctgccacaacccgttggtgtggtgactttataagaacccgaattgcaatttt

SEQ ID NO: 178 - DNA, 873 bp, Oryza sativa
  ref <308>: DATABASE ACCESSION NUMBER: AK058341
  ref <309>: DATABASE ENTRY DATE: 2001-12-06
tgaaaaggaggccaagtcttatcttgaagcatttgaagatcgtaaagaaaaccttgtgtaccttacagccgatgctgaaactgtgcttgatgatctagacatgtcaaaaatatacatcatcggtggcctagtggaccggaacagatggaaaggtattacactgaaaaaggcggttgatcaggggattcaatgtgccaagctccctattggaaattatttaaagatgtcaagttctcaggttctgacagttaaccaagtgttcgagataatgctaaagtttgtggaaacaagggactggaagacttcgttctttcatgtgatcccacagaggaaaagaggagaagctgaagctgaaaatgatggggtcgatataagcatgaacaatgttgatgccgccgaaggggctgagaatcaaggtgaccttaccaaggtttttgatgaggatgtagatgatgacgatgttgttgatgaagaactacaagaggaagacaccgatatggctaagaaaaagcagtgtattagacatgaaaatggtgaggcagaggatgcctccaccaggccagctgaggatcactctcccggtgcagcagcagagacgacgacacccaccggaggcgctctcccccaggctgagcagagtaaagaaagcaatggtgccgatgactgaagaagactggactgcaggtgtatgatcactgttctgtagaactgcttttctttaacccggggttttaactcgggcgtacattgtttggagcgctctcttttcgtgtatctcagtcgtgtttgacagcctactcttgtcattgatgactataacaaggtagccctgaacccgttgcaatgcctgcaagcgtttggccagtgatgttt

SEQ ID NO: 179 - DNA, 336 bp, Oryza sativa
  ref <308>: DATABASE ACCESSION NUMBER: AK058342
  ref <309>: DATABASE ENTRY DATE: 2001-12-06
aaatgaaattgcagaataggtgagcatggtggatggcaatatttcaccagctatatgtagttatcagaatacaacagcaaattacctgttcatcttcctggtggcacaacctgaagaagtttgaagactgtcaagaatttgtttgtcatacagttcatgccgtcaagaggaagatggctatttctcagatacaaagcagcatcagtgtcaacctagcgctgtcgagatctttcgttgatccaggctattgataagctgaaagccccttttttggatagggttccatcaacattcagcacctgttagccgtatagagtcacagatgattcattcctt

SEQ ID NO: 180 - DNA, 590 bp, Oryza sativa
  ref <308>: DATABASE ACCESSION NUMBER: AK058343
  ref <309>: DATABASE ENTRY DATE: 2001-12-06
cggatgcaaggtggagttctggctctgtcttctgctcaccttcttcggctatctcccggggatcatctacgcggtctatgctatcaccaagtagtagttacatctcatctttactatacatctaaggtgattgaagctagctagtagtactagtgaaacctgtcttgcgtctatgtatcgattcatgtggtctacgtacgtactggatctcaactacttgatctgtatcggttcatgatcaggcctctgggctacttcacgtcataagggagaagaattcttgtgcaatcagtgttgagtgctttgccgacctttcatctaactgcccttcaagctcccaaatgggtaatcagtagaatagatcgttaccgcagatccttcttatggaagggagaagaccctgacaaaacaaatccgggaagtagcttggtaaattgggtacagtctgtagaccaaaaattttaggaggccttggaattccagaccttgagaaattttttcgcgctctaagactacggtggctctggttcaaatggaaagaggacaacaagccttgggttggaatggatttaccttgcgatgactgcgac

SEQ ID NO: 181 - DNA, 919 bp, Oryza sativa
  ref <308>: DATABASE ACCESSION NUMBER: AK058344
  ref <309>: DATABASE ENTRY DATE: 2001-12-06
aaactccgctctttgattggagcgggtgtcactacgtgctttgatttgggggggaatggatgactccggcagcagctcgccgccggcgccggcgccctccttccgcaacaggtactggatcctccgccatggccgcagcgtccccaacgagcgcggcatcatcgtctcctccctggagaacggcacgaagccggagtttgggctggcgccgcagggcgtcgagcaggcgcgcttggccggcgaatcgctccgtaaggagcttgaggaattgggtgtgccactggattctgttcagatccgatattccccattctcacggaccatggaggctgccagagaggttgctagagtgcttggtgtcccctttgatactcccagctgcattccagctgttgaacttcgggaacgctattttgggccatcgcatgaattgctttcacatgagaagtatgcagaagtatgggcagtagatgaagtagatcccttaatggcaccagatggtggcgagagcgttgcagatgttgctactagattctctcaattcctgtctgctgcagaaatggagcttcatggctctgcaattcttattgtcagtcatggggacccactacagatctttcaagcagtactcaaagaaacaaaggagaacccttcttcccttgatgaggtaagtgaccttaaaaagagaggcatgataacactatccgtgttgtcacagcaccgtcagttcgcactcctcactggggagctgcgccgacttgtgtgacttgctgcagatatgattttatgtttttatttagtagacaattaatttatgaagtagcaaaattcagttgggtgtatttttttacaactcggcagtgatccaacagcagaaggatgtttattttgcccataaaatattctgttctttagttgg

SEQ ID NO: 182 - DNA, 919 bp, Oryza sativa
  ref <308>: DATABASE ACCESSION NUMBER: AK058345
  ref <309>: DATABASE ENTRY DATE: 2001-12-06
agcgccgaagaagaagaagcagcagcagcgaatcgaacaaacaatacaaaacccacgcgacgcgactcaagacttgcacccaaatccattcccacctaccggattcgcatccgccgctgctggccccgtcgcctcgccctccgccaccgccgccgtgcttgctctcctctccctcctcctccagatcggcccgatcccctgcccaccccccctccccgatggaggccaagatcgggaagctcgtcgagtcggtggggagcttcttctccggcggcgacaccatcccctggtgcacccgcgacatcatcgccggctgtgaaagggaggtagctgaggctgcaaatgaagagcagaagagtgatagcattatgaggctgtcttgggccctcgtgcattccaagaaccaggaggatgtaaatcgtggaataggcatgcttgaagcatcattaggtcaatccaacagcccactgcagactagggagaagctatatctgctggcggttggacactacagaaatggtgactacccaagaagtcggcagcttgtggaccgttgtttggagattcaacctgattggaggcaggctttgtctctcaggaaggctatagaagataaaattgccaaagatggtctgatcggaataggcatcgccacaactgctgttggacttctggttggtgggattgcagctattgctgcaaggaagaagtgagatgatatctgcttgctgatgtagtaaccaagtagatgtttggcttgtttgttcttttttcaattcgtggtattccagtcgagaatcgccacagtaatgtgcataaaacaaattgatgaccatggtactccggatgcaacatgtacctttccttttctttggttttattgtcactagtttcaagcacctctggcttgattctgatc

SEQ ID NO: 183 - DNA, 1267 bp, Oryza sativa
  ref <308>: DATABASE ACCESSION NUMBER: AK103951
  ref <309>: DATABASE ENTRY DATE: 2002-08-28
atcgagctccagacatccatcaatggccatggagctctctaacctgacgaagtgccatctgccactgctcctgctcttcctgctggcaggatcctcctccatggctttgccagtgcatcctgcaatggacagggtgagatggcaggtcgacaaggtcaaccggcggggccattccatcgggctcgtcatgtcgtacatcgatgaggccactgctcttgaatcctccggctacttcagaccttggcatgtcctccccttcgttgacctctacggacgaaggtatcacatcgggagtattagaggtgtcaatgttatatatgcactgacaggacaacgcaggttaaatgcggctgtgactgtacagactctcatcgacgtctttactgtgtctggcattgttcattatggcacagcaggaagttctaatgattcaatgtcatttggcgatgtcagtgtccccaaatttgttgcttatacaagtgcttggacatggaagaagttcaaatcaccaaaagagtcggatacagaacttagctttggagattttactgtcccaaatggaggagagaatcttctaggagctctgaaattcagaaatgaggagctatactcagtgggtaagcctatgaaagaagttttctggttacctgtagattcagcatggttcaaaatcgcagaaggacttaaggtttcacttgaaagatgtaacgacactttctgcttgccaacaactccaaaagtagtctgtgggctaaaaggatcgtcagctgatatgtttctagacaatgcagaatataggaagttccttttcagagaatttggtgtatcaacagtagatgaggagagtgcagcagtggtgatgacaacaacatctcctggcatacctgtgattgtattccggggagtttctgatttggctggaggggagccaacatggtcgtcaacaagcctgatgaacctggcatctattaatgcactcaaagtggcagtggagtttattgctacagtcgggaaacagaagtcaacaatgtcagcaggaagtgctaataactgaaggaaaaagatcacatccatgctgatccaataatgccctggaataacattttacagcagtagctgcattcagaataagatgctttcctgagcttcaagtgcatgtcctctcccataaaggatattagtgttgaattattttgtcgaaacttgtaagcatgcatgtgcgatcattttattgcaaatggaatagcagatgatgttgctttttacg

SEQ ID NO: 184 - DNA, 1505 bp, Oryza sativa
  ref <308>: DATABASE ACCESSION NUMBER: AK058346
  ref <309>: DATABASE ENTRY DATE: 2001-12-06
gttgtggtaaaaccgtagttgctttccttgcatgcatggaggtcattagctcaggatttcaggctgctttcatggttccaacggaggttcttgccctccagcattatgaacatctaacttcattgctggagaagtttgatggagatgaatgcaaaccaaacattgctttactaactggttcaacttccacgagggaatcaaggattattcgaaatggtctcaagacaggagaaatagcaatggtcattggaacacacagcttaattggtgataaaaccgaattctcagctttgcgcatctctgttatagatgagcagcagcgctttggtgttgttcaaagaggaaggtttaatagtaagctatataccccttccacgaaatcgagtgatgatgatacaatctcagacgagaattccgcttctgaaatatttatggctccccatgttcttgctatgtccgctactccaatcccaagaacgttggctcttgctctgtatggggacatgtcccttacacagatcacggacttgcctccaggaagacaacctatagaaactcttgctcttgaaggaaatgatgctggttttgaatctgtcttccagatgatgagtgatgaactggttgatggaggcaaggtctacctcgtatatcctatcatagaagaatcagagcagctaccacaacttcatgcagcaaaagccgagtttgattccataaagcaaaaatttgaaggttatccctgtgggctgttgcacggtcgcatgaggagcgatgagaaggatggagccctcagcagttttagatccggggaaacacgtattctcctctcaacacaagtgattgagattggagtcgatgttcctgatgcttccatgatggttgtcatgaatgctgagagatttggaatgtctcagctgcaccagttaaggggtcgggtagggcgtggcgaaaggaaatccagatgtgtgttcctatgctccactcctagcgcgctgccaaggttgaaggtgcttgagaagtcatccgatggattctacttggctaacgccgacctgctactgcgtggccctggtgatctactcggcaagaaacagtcagggcatcttccagagtttccaatagctagactggagattgatggcagtattctacaagaagctcatcttgctgcacttaacgttttgggaacaagcaacgaccttgcacaatttccaggactaaaagttgagctcagcatgagacaaccgctgtgcattcttggagattgacctgtgatctttactgagcagacagtgcagtgagagtgtgacactgaacagcgttgtagtgctcattgggcaaagcttttgcattctggcttgtgcggtgcaggtgaacaatcctttttcagatgctggcaagattgcaagttactactagtagtattttatcaaacactttttttagcaatacctgaccagtgatagatgaaaaaaaaatcagtaacataatttcattatcatccc

SEQ ID NO: 185 - DNA, 640 bp, Oryza sativa
  ref <308>: DATABASE ACCESSION NUMBER: AK058347
  ref <309>: DATABASE ENTRY DATE: 2001-12-06
ctcgagacctagggcttcctccttcccctccgagcaccgccgccgccgccgccaccgccaccgcagcctgaccgctcggtctccggcaaccagacaaaatggtgagagtcagtgtcctcaacgatgctctgaaaacaatgtacaatgctgagaagcgtgggaagcggcaagtgatgatccgaccctcatcaaaggttatcatcaagtttctcatcgtgatgcagaagcacggctacattggtgaatttgagtttgttgatgaccaccgctctggcaaaattgttgttgagctgaacggacgcctcaacaagtgtggtgtcatcagccctcgcttcgatgttggtgtcaaggaaatcgaatcatggactgcgaggctgcttccctccggacagtttgggtacattgtccttactacttcagctggcattatggaccatgaggaggctcgcagaaagaacgttggtgggaaggtcctcggtttcttctactagaaagatatatcttgttgacactctacggggatttcttatacagtagatggattctcccagtaggtgttagtggaagagcattttattagcagttgagtcaaaaaccttgttaagatgatcctcgaatgtctgaattgccccttaatgtc

SEQ ID NO: 186 - DNA, 1114 bp, Oryza sativa
  ref <308>: DATABASE ACCESSION NUMBER: AK058348
  ref <309>: DATABASE ENTRY DATE: 2001-12-06
aaaaaaagcaatgcagatgggttctgagacatatcatcatctgaaggatatcatcttggagaaatatggttcaaacagctgcaacataggtgatgatggtggatttgctccaaatatttccagcataaccgaaggcttggatcttgtcattgaggcaataaatagagctggatataatggaaggatcaagctagcaattgatgtcgccgctaccgatttttgcatgggaaataagtatgacatggagttcaagtttgcagagaaatcagggcagggcttcaaaactgcagatgatttgattgagatttatagccagctttgttcagagtacccacttgtctcaatcgaacagccctttgataaagatgactgggagcattcgaagaagtttaccaccctagagctgtgccaggttgtaggtgatgacttattgatgtcagatcccgaacgcattaagcgggcagtaaatgagtatacctgcaatgctcttgttctcaaggctaatcaagtaggcactgtcacggaagccatagaggttgtgagacaggcaaaggatgctcattggggcgtaatggtgtcacataggtccggggacactgatgattctttcattgctgacttggctgttggtgctgctgctggacagatcaaagcgggtgctccttgccgtggagaatgtctcagtaaatacaatcagctgcttagaatagaggaagaacttggaagtgacggtgtttatgcaggggaaaattggagaaccaccgcaagcacaagctgacttacagcgtaggtacatgaggtgcaggttccatcttgacctgccttaatgtgctgagctttccatggttggcttgctcaattgtgttttgttctggctcggcaaagagcatggaacaggacagccaaagaaacgggaggggaacagtttgtattattgggcatttgggcaccacattttttttttccgtaggtgtagtggatgaacttgcggagcattacctattttagtgatgtttgactgcgaattcatttctttgtggtgagcatggacgtgagtaaaatgagttgagaaagggattttaagaaatagaggttttctccgttttttcttctc

SEQ ID NO: 187 - DNA, 527 bp, Oryza sativa
  ref <308>: DATABASE ACCESSION NUMBER: AK058349
  ref <309>: DATABASE ENTRY DATE: 2001-12-06
aaatcacaagctcacaagttcacaacccaacacccaaaagcaaaagaaaagcagcaaccaaagatgtgcggcggagcgatccttgcggagctcataccgagcgcgccggcggcgaggcgcgtcacggcgggccacgtctggccgggcgacgccaacaaggccaagaagaagggcgcgcgcgccgacgacttcgaggccgcgttccgcgacttcgacaacgactccgatgacgaggagatgatggtggaggaggcggaggaggaggaggcgacctccgagcacaagccgttcgtcttccgccgccgccgccgaccagggcatggggctctggagcttcgacgacggctgctgcctcgtcgacgtcgaggccagcttgtccttctaggctctagccgtcgtctccggcgaccctgtgactcgatcttgtaccatgtcatgtacatagaagagtggttttgccaagcaagcatgtgttcgtcctggttcctttcggtaatgaaaaattatgtgaggcttctcgttctcgt

SEQ ID NO: 188 - DNA, 1383 bp, Oryza sativa
  ref <308>: DATABASE ACCESSION NUMBER: AK058350
  ref <309>: DATABASE ENTRY DATE: 2001-12-06
gtcgcgcactcgcactcgcaccgcaccaacacggactacggcgccgccgcctctcacgccgccgccgcggggccgccgccggcggcggatccccaccacccgcactaccctcacccctacgccggctacccttacccctacgcggcgtacaacccggccgcccccgcctcggagcccgccaccgccgcctcatcctcctactactaccccaccgcggtctccgccgccgcctctgccggccagtacgacccctacgcggcgtaccagtactacgctgaccccgccgcggccgggccaggcagcggcggcgccgggggcctgccggggtactacttcggcgccggtgaggcgtttcaggccccggcatcgtcggcgtcgcagggtgctccggcggctaccgcggcggctggcaaggaggccgggaagcactttgggttcgatcctcagcgctacgcgcaggcagcagccgccagatcttcgaatggagtggcaccagcaattgcagccccaggcatgcaccctgctcagtggaatgcccatttcgggcatcctgtgccgaaaattgtttcaggaaagcatataaagaaaaagccaaaggttgtgcaaccattgacttgtgaagtttgcaagattcagtgcgatactccagaagttctaaggatccataagacgggaaagaagcacaagaaaaacttagagaggctacaagactctatcacacctaaaccagtaaagcctccaagtactccaaacactgttgctcttgcagcaaatatggcacctgatcctgtcactactagtgtcactaccagtgtgattcctgctgcacaaacgaagaagaagaagagtgctgcagcaaccccagaggaactggaggtgaagaggaggcgtgtacttgacgctggagcagctcaaggagaagtgaaaatatgtaccgtgtgcaatgtggtcgtcaacagccagaaagtttatgagtttcacataattggtcagaagcataaggccatggtacagaaacagcaagcgcagccacctatagcctgaggtggaaagcaactatgcttgctcatttttctccggttctattttgttgcaacagagaacagaatgcacaagctcctgtactcctaatgaatgtaacttagctaaactgcttgaagattatttgggctctttgtgcctgccgcagataagtagtcggagtttggagcgaaggttgtcttgtgcctgtcttccagttgtttattgaccaatccaagattgcagaatgttgccctcgctatgtgaatttagccctgttgtttaatgacaaaacgtcaattcgaaattgtatatttcaccgtcggatgatactccctttgttcaagaatgtgtttagcaatg

SEQ ID NO: 189 - DNA, 722 bp, Oryza sativa
  ref <308>: DATABASE ACCESSION NUMBER: AK058351
  ref <309>: DATABASE ENTRY DATE: 2001-12-06
gatgttataatagagcaaggttgtctgcaatctgtttatagcttatatacatttaaagtagaaagcatagcctcggggaaacctgctccattggatgaactacaatttcatggtgttcacaatccagatcttctaaagacggttataatcagagaagcttccaagagaatccaagaacaccaaagttggaagtacagaatatactctggagaaggcccttctgatgttacaccaatcgatagacttgactctcctaatgcgaaggtgacagcctcctccaggcataatttccaggaatccaagggcagaattcctaaaagtgacagtatcttgctccataagcttgaagaagtttgtcaatcagttaagaatcttgaatctctcctcttgggatcacattcaagggcatgatgagcagctgaaatgtatgttttctttcatcttccatcatacaaatgtgtattgtatgacctttgttactgtctgtagcattgcatgcaatgtaccaatgcgggtaattaggaaacaattgttgatacttaggaaaaacttgtcagcgcttgcaagttctctcattggcaatgtacataggtcatcctgatacctctagtttcgtaaatcctagtacagaaacaaacctgtgaatccaaaagtagatcagtcacacgtgtaagttgatacttaagcatgtttgctatccgaaacatttttttttctttgcc

SEQ ID NO: 190 - DNA, 1336 bp, Oryza sativa
  ref <308>: DATABASE ACCESSION NUMBER: AK058352
  ref <309>: DATABASE ENTRY DATE: 2001-12-06
tattagcgggagccccctgtctcatcatgatagccactcagaccacacgtacaattcccctccaagtgcatcctgtgtcacagagattacagatctccagattaaactgagggagctggagaatgcaattcttgggcctgagctagacatagcttatgacagccctgagagcgccttgcaaccaaacataatggcaacaccagaaaattggagacagcttctgggaattaatacaggagatttgaagcaagtaatcatagcatgtggcaaggctgttgccgagaatgatgttcggctgacagaactactgatatctgagttagccatgaggtttatcttgagcatcttgatataagagttggtgaagttattgttgtgaattttgcctatcagctgcatcacactccagatgaaagtgtaagcacagaaaaccatcgggataggattttaagaatggtcaagagcctctcccctaggttggtgactcttgttgagcaggagtcaaatacaaacacacggccattcttcccaagatacttggagactctcgactactacacagccatgtttgagtcgatagatgtcgctctcccaagggatgataagaggcggatgagcgcagagcaacactgtgtggcgcgggacattgtcaatttaatcgcatgtgagggtgctgagagggtagagaggcatgaggtctttggaaaatggaaggcaagattaacgatggcagggtttcggccatacccgctgagttcagtggtgaacagtaccatcaaaacgctgttgcatacttacaatagcttctacaggcttgaggagcgagatggtgttctttaccttggatggaagaacagagtattggttgtatcttctgcatggtgttgacatgtctttggaagaagaagctcatgtcccatcacatctccatctccagcttgcaggtgcaagatgtaacacgagctttgctttgcagtggtgtagaataatgcaaactataactgtggatatctctagtcctcaattctccccatgctcaccatccatctaattcaacgcttatctgatcatctgagatactcaacatcagctggtgcgacaatcgtagcatagaagtcgtaaccttgttctatccatgctaaatatgtataatataggaatctggtattgcatccaaggctggatgctcttgctcttaggtttgacatgttgtaatgttcagtgatcaagctagacaggcccaagttggctgctagttttctatgtcagttgtgtacctgtgtagttgcttgtaaatttgggtgaatgctatataacatcagtattattgtctgtt

SEQ ID NO: 191 - DNA, 1658 bp, Oryza sativa
  ref <308>: DATABASE ACCESSION NUMBER: AK058353
  ref <309>: DATABASE ENTRY DATE: 2001-12-06
atttttttaatgagttgtatgggtgatgattgatttcaggtgaatgtggagcttgtggacgcgaacacgccttctgagaacatcggaaggactgtttcattcagggagagcagggcgaggacgacgactccggcaccgacaatgcgggacaataggaagagcttggaggcagggacgtaccatgaggtccttgacctgaagcagctgcttgatctggctgacagggagcacaaggtggctgtgtacagcaggagcaagaggaattcggacagcagcagcgtcagcagcatgagcagtgtcagcagcagcagcaccatcagcatcagcagcgccagctcgagcggcggcgccagcccggagcccggcctgtcgtcgaaacgccggcttctaccgtggaggaggaagagccgggacttcgacaagaggagcagcgagtcgctctcccaagaattgcccatgaaatacatggatgatgatctggcgggaagctgggagactcgggagttcacgagcagggactcggagacgaagctgaggacgccggtgttcttcgcgtccatcgaccagcgcgacgacagcgccggcggggagagcgcgtgcacggcgctggtggccgtgctggcggcggcgctgcacgccaaccacccgacgatgccgacgcggccggagctggacgcgctcatcagggacggctcgtcggagtggaggcggctctgcgacgacgaggcgcacatggcggcgttcccgaacaggcacttcgacctggagacggtgctcgcggcgagggcgaggcccatcgccgtgcagcacgacagggccttcgtcggcttcttccagcccgagagcttcgcctccctctccggcgccatgtcgttcgacgacatctggcgagagatcgccgccgccgccggcggcgagccggggcgcgccgacgtgtacatcgtgagctggaacgaccacttcttcgtgctcaaggtggaaggcgactgctaccacgtcgtggacacgctcggcgagaggctcttcgagggctgcgacaaggcgtacatgctccggttcgacgccacgtcggagatgcgctcggtgtcgccgccgccgtcgtcgccgtcgccggaggaggaggtgatcgtcaccgggaaggagtgctgcagggagttcatcaagaggttcttggcggccatcccgctgagggaggagctggagatggagaggaagggctgcgccgacgcgccgcaccgccggctgcagatcgagttccacttcaccgtcctgaaagaagaagaacaagaccaagcaagaagatgatgatgatcagtggttgtagctctgcaagctgactcaaagctgtagtctgtactaacaaacattcatgtacatttctatacatatacagtacaagaggaacaggaaatcacagcattgatacatacggatactacagggatttttggatagtaaatattattgtaggcagacacaggaaatttttacagaaaaaaaaaacagagttcatggtttgtcttacctttttttgtttggaggcaggaatagggtccatttcatctcacctgtcaaagccattttgtaagcatgcccaggactcactgcacattatttacatatagtaaaatctaggggcttatttgaccccgtttatc

SEQ ID NO: 192 - DNA, 897 bp, Oryza sativa
  ref <308>: DATABASE ACCESSION NUMBER: AK058354
  ref <309>: DATABASE ENTRY DATE: 2001-12-06
gatggtgctcatcggcgtgctccgctacttcgtcgccaagctgatgcgctccccgtcggcgtcgccctcccccgaccccaagctcgtcaaggaggggcaagtggtaattagggcgaggaacctgaggatcaattcgcagtacatcccggccaaggccttcaaatcacgcaaggtttattacactaacgaggaaaacggattgcttcatgtcccgaaagaggaagcacagaaagctcaggctgccatgttttcagatccaaacatggccatggacatgatgaaggagaacctctctatgatagttcctcagacacttacatttgcatgggtgaacttcttcttttcgggttttgttgcagctaagattccctttccattgactccgcgattcaggggaatgctgcaaaacgggatagacctgagtactgttgatgtgagctatgttagcagccgttcatggtactttctcaatttgtttggtttgaggggtctcttcagtctgatcctcggtgaagaaaatgctaatgatgatgcacaaaagatgatgcagatgggtgggggatttggcggtaatcccacaatgggtttggccgcagagaaagacaacctggatataatccagcatgactgggctttaccaaagatggagcatcatgctgaggaagtgctgaggaagcttctgaagaaatgataggaaactaggctgctccaatgcattactacatcttgcaaaatttttgttttaacctgtttattgaccagacagttaaaactttgtatctgtataacttatggccaagaatttccttcagaaagtttatgtatcatttttctgttataaaaaaacggaccacagccaggctcaatgcagaatgaacaaaaatcttttttcttggc

SEQ ID NO: 193 - DNA, 1519 bp, Oryza sativa
  ref <308>: DATABASE ACCESSION NUMBER: AK058355
  ref <309>: DATABASE ENTRY DATE: 2001-12-06
ttatatatgctggtcccttgggctcgaaatcacgcaatctggtcgagttttttgaggcaattccaggagttcctaaaatcagggatggctataatcctgctgcatggatgttggaagtcacaagtactcaaatggagcaaattcttggagtggattttgctgaatactaccggcagtcaaaattatttcagtaaacacaacgacccttttcacctctataaatcttggtctctttttccttaaacatgtttatgttatggcattccaggcagacccaagaaatggttgatatcctgagcagaccaagaagagaatcaaaagaacttacttttgccaccaagtattcccaaccattctttgctcaatatgctgcttgcttatggaagcagaacctgtcgtactggagaaatcctcaatacactgcggtccgattcttctacaccgtcatcatttccttgatgttcgggacaatctgctggaaatttgggtctcgaagggagacccaacatgacatattcaatgccatgggtgccatgtacgcagcagtactcttcataggaatcactaacgccacctctgttcaacctgtgatttccatcgaaagatttgtctcgtacagagagagggcagctgggatgtactcggcactgccttttgcattctccctggttacagtggagttcccttacattcttgtgcagtcacttatctacggcacgattttctacagcttgggctcgttcgagtggacagcagtgaagttcttgtggtacctgttcttcatgtacttcaccttgctgtacttcactttctatggcatgatgacaacggcgatcactcccaaccacactgttgcgcctattattgctgctccattctacacgctgtggaatctcttctgtgggttcatgatcccaagaaagaggattcctgcgtggtggaggtggtattactgggccaacccggtgtcatggaccctgtacggcctgctaacctcccagttcggcgacctggatcagccgctgctgctcgccgacggcatcaccaccaccaccgccgtcgacttcctccgggaccacttcggcttccgccacgacttcctcggcgtcgtcgccggcatggtcgccggcttctgcgtgctcttcgccgtcgtcttcgccctggccatcaagtacctcaacttccagagaagatgagacgacgacgagcgagaagcgagctatagggagcacgacgtacaccaccattaattctctggccagctatagcgctcaaatgtgtactgcaactactatgcatgcatcaatccatttcgtttcttcagaactgcacgcgtctcttctctctgtcgtcacgatgaattcctcccggtcacgggagatgctggagctagcagagatcagagaccagcagaaaaaaggagacaagtgtatagctaagctacctgttgcaagcctgtttggcagatctccaacaactagatctaactcggagctaaagtgaagctgtggaacagccg

SEQ ID NO: 194 - DNA, 1366 bp, Oryza sativa
  ref <308>: DATABASE ACCESSION NUMBER: AK058356
  ref <309>: DATABASE ENTRY DATE: 2001-12-06
gagctgcagtgtgtccgaagcttttcttctctaccagcggcagcggcggctggtagggaggaggagatcgccaccagatcgccatggagacgctggcgagcgccatgcggcgggagaaccgccgcttcaagcccccctcctcctcctccgcctccgcctccgccgccctctcctcggggagggtccccctcgtcatggccttcctctcctgcctcgcgtggctctacgtcgccggccggctgtggcaggacgcgcagacgcggatgatcctgtctggtctcctcgagaagagctccggcaatcttccgaaggtgctgtcggtggaggacaagctgaggaatctaggatgcattggaattgggaggaagattgcggaggcagaaatggaccttacaaaggcgaagagcgaggggtatctgtgggggaatggaactgctactggtagttctgacaagaagaagctccttgctgttattggagtttacactggttttggttcccggctcaagaggaacaccttccgtggctcatggatgccgagaggtgatgctctgaagaagcttgaggagaagggtgtggtcattcgttttgtcattggtcggagtgcaaatcgaggtgatagcttggaccgcaacatcgatgatgaaaatcgtcggacgaaagatttcttgattcttgaaagtcatgaggaagctgcagaggagttaccaagcaaagttaagtttttcttcagtgcagcaattgaagcttgggacgcagagttctatgtgaaagtcgatgacaacattaaccttgacctggctggattaattgagatgcttgaagcccgtcgaggtagccaaggactgtacatgggttgcatgaaatcaggaggtgttgtaagtgaagagggtcaacaatggtatgaacctgaatggtggaagtttggagattcaaaaacgtattttcgccatgcttccggtgctttgtttatcctctctaacaatttggcacgctacattaacataaacagtgcatcgctacagagctatgcccatgatgacatatcagtaggttcatggatgatggggctgaatactacttatgttgatgacgaccgtttgtgctgcggcagttctagacaagagaaagtatgttcccacgcatgagttagcagcacgcatggttatgacggtggtgtcctgatgaagaggtgacgctgtatattttgccattttgtatacaccaagcggcttctggaatgaaaagtagatacatcatttcaaacgctgctttatccgatcagtatacttaaatacaagtgtaggggaactagttgacaaaaactataaaagcgctgagcttatttttggtggagcttcctgtt

SEQ ID NO: 195 - DNA, 349 bp, Oryza sativa
  ref <308>: DATABASE ACCESSION NUMBER: AK058357
  ref <309>: DATABASE ENTRY DATE: 2001-12-06
tttgggatgtagtcgccaatatcatctactatgcatttagctgatctagttgggaatttcgattttggatctagtcgctgtgaagttgagtggacctaatcgtgaatttgtagaaaatcttggagaattcttactgattttgttctatatccatcgaagaactatcttttcgttgcgaattttaggagagatacatggcctactggtcctggcttgtaacgctgtacatgtgagtttgggcactaatcctcttttgctcgatgagtttttttgtttgatttttaacccaaaaatttggaccatatgaaactgtcagagtagataatggttgcctggttggtattggatt

SEQ ID NO: 196 - DNA, 3066 bp, Oryza sativa
  ref <308>: DATABASE ACCESSION NUMBER: AK058358
  ref <309>: DATABASE ENTRY DATE: 2001-12-06
actcattgctacaagaatttgcttctgtttttgaggaacctcaaggtctgccaccacagcgtgattttgatcattctataccactgttgcctggtgcaagacctgtcaatcttcgtccttatcgttataatccagcacaaaaggatgagattgagcgtcaagtgactgaaatgttgcgtcagggtgttatccaacccagctccagcccgttctcatctccagtattgttggtcctcaagaaggacttgacatggaggttctgtatcgactatcgccaccttaatgctataacagtcaagaatcgatatcctcttccagtgattgatgagttacttgatgatctggcaggagcaactatattcactagtttggatttaagggcgggttatcataaaatccgtatgcgaccagaagatgaacataaaactgcgttcaaaacgcatcatggacattacgagtttcgggttatgtcttatggattaactggtgcacccgctactttccaaggtgtcatgaatacagtgttatcccctttgctccggaagggagtgcttgttttcatagatgacattctgatttacagtgcaaccttgacagaacgtgtgcaattattacgtcaggttttccaattgttgactgaacatcaacttaaggtgaagcgctctaagtgttcatttgctcaatcaagtttgatttacttgggccatgttattagccatgctggtgtcagtactgatccaaaaaatattcttgctgtgcaacgatggccagttccaactaatgtaaaggaggtacggggatttcttggcctggcaggttattatcgcaaatttgttcggcactttggtgtaatcagtcgtccgttgacagatctgcttaagaagaatgttgtttttgtctggactatatctcatcagcaagcatttgaagctttgaaatcagccttaacttctgcaccagtgctggcgattcctgatttcagtaagccttttgagattgaaactgacgcgtctgacaaaggtgttggggcagtcttgatgcaggcaggccatccattggcgttcttgagtaaggccttgggacctcgcaatcgcggtttatcaatatatgaaaaggagtgtctagctattcttttggcagtggatcgctggcgctcttatcttcaatttggggagtttgtcatccgtactgatcagcgtagtctgattcatctcggtgatcaaaagttggctacgccttggcagcagaaggcaatgacgaaattattgggactgaattatcggttagtctacaagcgtgggttagataatagagctgcagatgctttgtctcgttgctcaactgatgatcacattcaagcatgtgctttgtcagtatgtatacctgactggttaactgaagtccaagaaggatatctgtctgatccctactctgctgatttgttatctaaggtgactttacaagcttctgctgtacctaatttttccttgcgggatggcattttgcattataagaacaaaatttggattggcaacaatactacactgcaacatcgcattttatcagccttgcattctggagctattggtggtcattctggggtgcaggtgacttatagcagaataaagaaactctttgcttggcaaggattgaagaagtctgtgctggaatttattgatcaatgttcagtctgtaagcaggccaaagctgaaagagttcattagccggggttgttgcagcctcttccggttcccaatcatgcttggcaaactgtttcccttgatttcataggactaccaaagtcgacggggtttgattgtgttttagtggtggttgacaagttttctcgctatgctcattttgtggcattgtcccaccctttcatagctttagatgtggccctggcttatctcaacaacatatacaaactgcatggtatgccatagtcaattatctcggatcgtgatcgcattttcaccagtgccctttggtctgagttatttcgactgacagatactcaactcaagatgagttctgcataccatcctcaaactgatggccaaaccgagcgtgtcaatcagtgtcttgaaacttttcttcgctgctttgtccatgcctgtcctactaagtggtaccgatggttggctctagcggagttttggtataatacagcttatcactctgctcttggcacatctccttttgaagtgctctatggtcacactcctcgtcactttggtgtattggacatttctgctgctgctgttcctgatcttgctgagtggttgaaagaacgagcaatggtttcaggtttgctgcttcaacacttattgcgtgctcagcagcgtatgaaggttcaggcagataagaaacgttctgagcgagagtttgcggtgggagattgggtttttctcaaagctcaaccatatgcgcagacttctttggcagttcgttctaatcacaagttagcttttcgctactttggaccgtttcaagtaactgctcgagtgggtgcagtggcttaccgattgcaattacccccaggttgttctattcaccctgttatccatgtatctcagcttcgtcaggcgcctccaccggattctgcgacggttgtcaagttacctgctgcactggctccggattcttcagttccgatgcagatattggtgcgtcatctgtacaagcttggagctgccgtgcgtcctcaattcaaggtgcgttggtttggccatggtgtggatgaggcgacttgggaggatgctgaatctcttcgggtccgttttcctgctgcaccggcttggggacaagccgagtctgaagggggggagaatgttacgctgcctgtagcagatatcgacaaaggcaatccgctgagaagctatcggcgtcctacgcgggctaagaaacctaacgtccgtgtgagtgggccagaatgggtcacagtccaatgatgttctggtatggtgtataaataccagagggctaagagagaagagggtgtcgaaagtgtaaacacaaaacacaaaactattccccaaatcaaaccttcttctctattttgac

SEQ ID NO: 197 - DNA, 918 bp, Oryza sativa
  ref <308>: DATABASE ACCESSION NUMBER: AK058359
  ref <309>: DATABASE ENTRY DATE: 2001-12-06
aatcaaaactccaagtttgatatttgaatatgtaaacagcacagatttcaaagttctgtatccaacattgacagactatgatattcgattctacatttatgaacttcttaaggcattggattactgtcattctcaaggaattatgcaccgcgatgtcaagcctcacaatgttatgattgaccatgaactccgcaagcttcgcttaattgattggggacttgctgagttttattttccagagaaagagtacaatgttcgggttgcctcaagatacttcaaagggcctgaattgctggttgacttccaaagttatgactactctttagacatgtggagccttggctgtatgtttgctggaatgatatttcgcaaggaaccattcttctatggccacgataaccatgaccagcttgtcaaaatagccaaggttctaggtacagaccagcttaatgcttacctgaataaatacaggattgcacttgatccccagcttgaggctctgattgggaggcataccaggaaaccttggtctaagtttataaatccagaaaataggcatcttgtctctccagaggctattgattttcttgataaacttattcgcttcgaccaccatgacaggctgaccgctcgtgaagctatggcgcatccctactttgaacaagtgagggcagcagaagactgcagaatgagaacgtaacatgaacggaacgccatctgctgctgttggattgcactggaaatctgttgcagatttgctcctttgttttattctattctactgaggcaacgcaaaagttgtagcatgttgcgccttaggtccgcttgctgctgagcggtgcctaacatccttaaattttgaaacacatcataaagtgccgagtctataaatcagattatcagagataatctcttttc

SEQ ID NO: 198 - DNA, 355 bp, Oryza sativa
  ref <308>: DATABASE ACCESSION NUMBER: AK058360
  ref <309>: DATABASE ENTRY DATE: 2001-12-06
aaggtgttgctttcgatctgctcgctgctcactgaccccaacccggacgaccctcttgtccctgagattgcccacatgtacaagacggatcgtccaaagtatgagacgacagcccgcggctggacccagaagtatgccatgggatgatgaaacccacaagccctgaattcaaacctgctgcttaaatgcagacagtcgtggtaattgtcccaagaaactgtttatgggccattatttcctccgatttgttgctgccagtcgtgtgtgtcagatccatgtagcatcgtgtctcgtagccccaacatcaacatatgatcattgcccgtcgataatgagataacatatgcttgccgtg

SEQ ID NO: 199 - DNA, 1245 bp, Oryza sativa
  ref <308>: DATABASE ACCESSION NUMBER: AK058361
  ref <309>: DATABASE ENTRY DATE: 2001-12-06
tagtggccttctaccccttggcaggccgtctcagtgtagatggtgatggtaggcctgaaattgactgcaatgccgagggtgcgctctttgttgtggctcagtcaaaactcaccgttgatgccttcagcgaccttaagccatcaccagagttgaggaggttgtttgccccccgtattgagccagcatccatcatgcttggagtacaggtgactttcttgagttgtggtggtgtggcattagggacggtgttgcaccatgtcgccatcgatgcccttagcgcgttccatttcttccagacatggtcttcttcctgccgagatggtgaagccgccatgttggagctgccctgccatgaacgcaccctcctccgcacacgctccccacctatcgtccacccggatgtgcactcaatgttcagtctaaagctcaacttctgtgagccatcagaccctatatccaccaagatattcgtcatctccaagaaccagctcgatgcccttaaacaaatatgtggtggattgagcacattttgtgccatgagcgcccttgtatggcagtgcatgtgcattgctcggcaactccctctagacgccgagacacgcgtcatcttcccagtcaacattcggcgccgtgtgaagccacctctcccagatcgctacttcggcaatgcacttgtcgacttgaaagtagcctccacagttagggacattgtcttggggacactggatgtaactgctgcccagataaagaacgcattgggacgccttgacgatgagatgctgcagtcggcgatagactacaatgagatggcagggatgcccaacaagcataccaagggaaacctgccagatacagaattacgaatggtctcttggctaggcatgccagtttatgatgcggattttgggtgggggaagccggagatgatgtctcgtgcggagtctgtgcgtggcggatttgtttatatgatggatggcattgacaacgatgggggtggcgtgcgtgtgctcatgtgtatggaggcacgaaagatggaggagttcgagcgactgttttatgccaagtttgcacaatgaagaaactacctagctagaacatgatgcatgttttctgttctattatcaataatggatgtttcatgtaataatataaccaaatacctccatatattttggtggcatggttgtttcagacatgacagggtgtggttgatttacgcggacaccacaaaaatgtggttgattt

SEQ ID NO: 200 - DNA, 259 bp, Oryza sativa
  ref <308>: DATABASE ACCESSION NUMBER: AK058362
  ref <309>: DATABASE ENTRY DATE: 2001-12-06
gaaaaaaacgatgaaagataatgcagatatgttgcttgagttgagtccttactgacgggagtcgtcaaacataacatgcagagagagtttgtgaaggggagacactgcacttttctctaaatacatatctgtcaacattttggaaataggttgcctgctgctcacaattttcccttttcttgttagaacaaaagaaactagagtggaacttggaagtaacttatcgagttctcttgcattcagtatgcatatgttagtt

SEQ ID NO: 201 - DNA, 1280 bp, Oryza sativa
  ref <308>: DATABASE ACCESSION NUMBER: AK103952
  ref <309>: DATABASE ENTRY DATE: 2002-08-28
ctctcccgccgccgccgccgtcctcctccacctcctccgctctctcgcgcacggcgcacgcgcccgaagccctagaccccccggcggcgaagatggcggcggaaggcggtgccgccgctcgggcgctgtcccagcgggagcaggacatccagatgatgctcgccgcggacgtccacctcggcaccaagaactgcgacttccagatggagcgctacgtctacaagcgccgcactgacggtatctacattattaaccttggcaagacctgggagaagctccagttggctgcgagggtcattgttgcaattgaaaaccctcaggacatcattgtgcagtctgcgaggccctatggccagagggctgttctcaagtttgctcagtacactggtgctcacgccattgctggtaggcacactcctggtacatttaccaaccagctgcagacctcattcagtgagccacgccttcttatcctgactgaccccaggactgatcatcagccaattaaggagtctgcacttggaaacattcctaccattgccttctgtgacactgactctccaatgcgctatgttgatattggtattcctgctaacaacaaggggaagcagagcattggttgcctattctggcttcttgccaggatggttctccagatgcgtggtacaattctcccaggacacaagtgggatgtcatggttgatctgttcttctacagggacccagaggaagcgaaggagcaagaggaagaagaggcggctctggtggctcctgattatggtgcggttgcggaatatgctgccccagcggctgatacctggggtggagaatggggcactgacgctgcagctcaacctgctgccattccagcacaggctggcgctgactggactgctgctccagctcctgcagccggaggatgggacacggctgctgcccctgcccctggatgggaacaaggcagtgcaccagtcccagcggcagcacccacccctaactggggggagtgagtgaaagagtaactgatccagttcatgggtcagaggctgagtttgttgtcgggagcagctggtagacactatttaagtagctttaatctttttacagtactgagttatttagatgcaaatcaaattttgtgttcttgacaatgctgggactgcgaactagccagccttttttttgttacaatctcatggatagctttatttcaagagcaattctgctttgcgaacaaagtgtatgtgtttgcaacaacaaattgatggggttttctcctc

SEQ ID NO: 202 - DNA, 674 bp, Oryza sativa
  ref <308>: DATABASE ACCESSION NUMBER: AK058363
  ref <309>: DATABASE ENTRY DATE: 2001-12-06
tcttggtgttgatcgtgatgcagctgaagaagagatcaggagtgctagaaatttccttattcaacagtatgctgggcatgaaccaagtgaagaagctattgaaggtgcatacgagaagataataatgaagagctaccagcagcggaaaaagactaagattaatctgaaaactaagctaaaaaagcgagttgaggaatccccgtcatgggtaaaggcactgcttggatattttgaggtgccacaaatggatatcatttcaagaagattgttctttttcgctttcattgctggttggagcatagcgacttctgctgagaatggacctgcattccagcttgcaatatctctcttctcgtgcatatatttccttaatgataagatgaagaacctcatgagggcatcaacaactgggtttggagtgcttgttggtggctggataattggctctctattggtcccacttatcccaacattcatcatcccaccctcttggtcccttgagctacttacatcattagttgcatatgtcttcctgttcctgggttgcactctcctcaaatgaaaaccttgtaaatcttgtaaccgtaaattgtagaattgcttgcagaaattttgcaactactgacatctccactatgggtctcggaaaagttttgtagaatgacatcactttg

SEQ ID NO: 203 - DNA, 1363 bp, Oryza sativa
  ref <308>: DATABASE ACCESSION NUMBER: AK058364
  ref <309>: DATABASE ENTRY DATE: 2001-12-06
taaggcgcgcgatctcgatctctagcgttgagaacttgatccgcgatggagtccggccggctcatcttcagcacggcgggctccggcgccgggcagatgctcttcttggactgcggcgctggcggcggcggcgtcggcggcggggccacgttccatcgaggggcaagaccggtgctcggcatggaggaaggagggcgcggcgtcaagcggcccttcttcaccacccccgacgagctcctcgaagaggagtactacgacgagcagctcccggagaagaagcggcgcctcacgccggagcaggtgcatctgctggagaggagcttcgaggaggagaacaagctggagccggagcggaagacggagctggcgcggaagctagggctgcagccgcggcaggtcgccgtgtggttccagaaccgccgcgcgcgctggaagaccaagcagctcgagcgcgacttcgaccgcctcaaggcgtcgttcgacgccctccgcgccgaccacgacgccctcctccaggacaaccaccgcctccactctcaggtcatgtcgttgaccgagaagctgcaagagaaggagacgacgaccgagggcagcgccggcgcggccgttgacgtcccgggcctgcctgcggcggccgacgtgaaggtcgccgtcccggacgccgaggaaccggcgctggaggaggcggcggcggcgttcgaggagcagcaggagcagcaggtgaaggccgaggacaggctgagcacgggcagcggcgggagcgcggtggtggacacggacgcgcaactggtggtcgggtgcggccggcagcatctcgccgccgtggacagcagcgtggagtcgtacttcccgggcggcgacgagtaccacgactgcgtgatgggccccatggaccacgccgcggggggcatccagtcggaggaggacgacggcgccggcagcgacgagggctgcagctactacgccgacgacgccggcgtcctcttcgccgaccacggccaccaccaccaccaccaacacgcggacgacgacgaggaggacggccagcagatcagctgctggtggatgtggaactagatttctcgcgcgcgcgcgtcgtcgtgcattcaattctcgtgttaaaaaaatcgttctctttttcatttttccgcttctttgtctgtaatgttgagtttcgatcggctatgagaaggaaggaggtgtatgcatgtgcatggtatggtagggtaacacatcggtgaatcaaatctgtcatggtgatgtacgagaattgaagaacatgggggtagcaataagtgcatggaggcaagtactcttttcaatggcacataccaaatcatgtcgtcgaattgagatttttatt

SEQ ID NO: 204 - DNA, 1319 bp, Oryza sativa
  ref <308>: DATABASE ACCESSION NUMBER: AK058365
  ref <309>: DATABASE ENTRY DATE: 2001-12-06
ttgctctcccatggcgtcgcgtccgaggctttgaaccctagcgcaccaatggcgacggcgacggcgacggcggctgcggccgccccggcggcggtgcccgcgctggtgtcccccttgtcccgccgcgccttcttcccgctccctcgtcgcgccggccccaaatcgcttcgggtcttcgcgtcggcggcgaggcgacgtgggttggtcgtggcggcggcggatgcggcagcggcggcaggtggcgcggagttcagcgacgaggagaacccctacgagattctgggtattaccccgcttgatagcttcgaccacatgaagctggcctacaagaggaagcacaaggaagcggacgagaatggagatcagtactacctgtcaaagttggagaaggcatacgacactgtgatgatgcagcagctgcagtataggaagaaaggagtaacatatggttctgttcaggtgtcgaaggatatcaagtatgctgatgaccagccaattgttccttggggacctagatcctccaaatcaacagtaaaggacatgcgcatcaatttaggaatatcagcagccattgttgtttggatagctatcatgggcaatgcggactggaagccattgcagttcctatgttttgctttcttctacagaatacttcaaaagctaagggctactgaaccaccaataacgccaatatataatgagtatggtgaggttgaaggacgtggaatacgaatggcaaaacgagtagtccgtgctttgggtttgatatttggatgtgtatttgccgcgtcattgggttatacagcagctgttaacgtgattgagttttcatggcagtatactccacgcattgtttattactatcaggagttgattgttacagcagctaccgctgctctgctgtacatcacagcctcatactaccggtaaacagacagtggaattacagtctggctaagagaaccatgagatgttaggatatgagctgagattcggtgagtggcacacttgtggactggtgttacctcaggcattaatggagagtcaagagttcacaaattttgaagtataattgggccggcttttgagttagatactgttgaatatgcgcttgtattgcacagttgtgaacctcctcactgggcgtaaggcgtcggctgatgaaaaaaaaatagtgtgcatattttaacagaaatgtaatgtatgagattatatcagattctggtattttccttccctttttttttccttttgagggtgagagattctgattcttgttaaaaacttgacgagtagcccaacaaaataacttgacaagt

SEQ ID NO: 205 - DNA, 1435 bp, Oryza sativa
  ref <308>: DATABASE ACCESSION NUMBER: AK058366
  ref <309>: DATABASE ENTRY DATE: 2001-12-06
aagatgaattatgaagacttttgccatattgcaacagtatgcacagagcagatcggccagaagtgcaagcgtttcttcagcccttcaaattttatgaagtttgagaaggatgattctgggagaattgcaatcctaccattttatctttatgttatgcggacagtatctctcacacaagcgagaattgatatgagtgagcttgatgaggattctgatggtttccttcaacctcatgaaatggaagcatacataagagggcttatccccaatttggcacaactgcgtgatatgccatcagcatttgttcaaatgtactgccgcatagctgcacgcaagttctttttcttctgcgatccacacagacgagggaaagcatgcataaagaaagtattgctgagcaattgtcttcaggaacttatggaactacatcaggagagtgaggaagaggttactgatactgagcaggctgaaaattggttttccctgacgtcagctcagcgcatttgtgatatgtttcttgcacttgacaaagatacaaatggaacattgagcaaacaggagctcaaggaatatgcagatggcacattgactgatatcttcattgaaagagtttttgatgagcatgtacgccggagcaaagttggaggtggcaacagtcgtgaaatggactttgaaagctttcttgactttgttttggctctagaaaacaaagatactcctgaaggattgacatacctatttagatgccttgatcttaatggaaggggattcctgacaactgctgatatccatacattatttagggatgtacaccagaaatggattgaaggcggaaactatgaactttgcatcgaagacgtgagggatgaaatctgggacatggtaaagccggcagatcctctcaggatcgcactaacagatcttctatcttgcaagcaaggcgggactattgccagcatgcttatagatgtgcgcggcttctgggcccacgacaacagagagaacctcctccaggaagaggaagagcaagtggaagaggcctgagttctccagctgccgtgcaaccaacctggtaaactctcaaccgcaaggcactggcaattgctggtatctcgcaaccgcaaggcacgggcaattgcttgtaccactgtatgtgtgccattgtagcttacatagtgtattagaatcaagttcaacctgttcgctgggagacttgttgtaacctgtaagtgttccatttgtgtaaccggagtgaaatctgacatattttgagttgaacatggttttgtcgtgtcgaccagatgtattaccgcagggcttggttggatgcagaaaggaaagcctcagcctgtggaatttgtacgtctatgcgacaccacgcatgtaattcggtttgcaactgcaagtctatatacgcaaaaatacattgtatgcc

SEQ ID NO: 206 - DNA, 347 bp, Oryza sativa
  ref <308>: DATABASE ACCESSION NUMBER: AK058367
  ref <309>: DATABASE ENTRY DATE: 2001-12-06
atgtttgtggtgacccagctgtggttcctctcattcagcgaattctcgaacctactggtgatgtggttacggtccaatattatgagaggctatctccattggttcctctgaagactactctcgggtctttctctaacattaaggcaggggattgcgtaaatgtaacgttctcacgacgatctatctatatgcttaagagaagaattgaaatggggggtaagcatctttgttctgtagtctatggctcattgccaccagaaactcgaacaaaacaggcgacaatgttcaatgatcaagatagtaaccttaatgtgttagtggctagtgatgctattggaatgggtctt

SEQ ID NO: 207 - DNA, 1313 bp, Oryza sativa
  ref <308>: DATABASE ACCESSION NUMBER: AK103953
  ref <309>: DATABASE ENTRY DATE: 2002-08-28
aacaaaaggaaagcagggaaacctcgccgtcctctctctccatccatgccctagcacgcgccgcgcagcctacgagcgggagccacacctcgaggtcttcatctgttgcactcatgatttagcaccagctgaagtgacctctgagactgcgcggtgacgtagcctgttgctaggataaaaatctcagtagttaagcatggcggattctatggtgtcaagtttctgggggcctgttacttcaacaactgagctctgcgaggaaaattatgcacactcgtcatatattgcagaattctacaatactgtttctaatgttccatgtgttcttctggcacttgttggacttgtgaatgctcttcgccaaggttttgagaaacgattcagtgtcctgcacatatccaatatgatacttgctatcggcagtatgatcttccatgccaccttacagcacgttttacagcagagcgatgagactccaatggtgtgggagattctcctatatctttatgtactttattcaccagactggcattaccggagcactatgcctactttccttttcctatacggtgctgcttttgcagtagtccatttcctggtgcgattccaagtggtattcaagttgcattacgttggcctctgtctcctatgcatcccacggatgtacaagtactacatacaaactaaagacatggctgccaagcgtctagcaaagctgtgggttcttacgttgagcttggcgactctttgctggctatttgatcgaatgttctgtaagaagctttcacattggtacgtcaacccacaagggcacgcatggtggcatattctcatgggatttaactcatactttgcaaacacattcttaatgttttgccgagctcaacagcgtgggtgggagcccaaaattacccaccttttcgggttcttgccttatgtcaagattcagaaaccccaaaagagggaatgagttctctatttgtcagtgctgttctccaggaccttaaagccaacgccctcatgtgcttagacaagaagcagaggcattttttttgtatatgggcttccaagtgattacggactacagtgttatgatgcctcactagattttgttaacttttaactaacgcctgttttgtaccatacttaattgttgctcagagattagttggagtgttgtctcatagttttggtcattattttttgtttctctacatttgattttccgttctaataggactgaattttatttgttttttgtttgtcttgaatgttgtcgaacagttttagtcaagttactgcttcatatggcc

SEQ ID NO: 208 - DNA, 1475 bp, Oryza sativa
  ref <308>: DATABASE ACCESSION NUMBER: AK058368
  ref <309>: DATABASE ENTRY DATE: 2001-12-06
aacgaaacagagtagcacaagaagcagagtgcggctagttcacagtcaccatggggatgctgcggtggggagctcacctcctcctcctcctcctcgccgcggcgacgtggacgtgcgccggcgccggcgccggggtgacgagcgagtaccggcggaagctggaggcgacggtggacatgccgctcgacgccgacgtcttccgcgtgccgccgggctacaatgctccgcagcaggtgcacatcacgctgggggaccagacggggacggcgatgacggtgtcgtgggtgacggcgaacgagctggggagcaacacggtcaggtacgggagctcgccggagaagctggaccgcgcggcggaggggagccacacgaggtacgactacttcaactacacctccggcttcatccaccactgcaccctcaccggcctcacccacgccaccaagtactactacgccatgggcttcgatcacaccgtccgtaccttctccttcaccacgccgcccaagcccgctcccgacgcccccttcaagttcggcctcatcggtgacctcgggcagacgttcgactcgaacagcacgctggcgcactacgaggccaacggcggcgacgccgtcctcttcgtcggcgacctctcctacgccgacaactaccctctccacgacaacaaccgctgggacacgtgggcgcgcttcgtcgagcgcagcgtcgcgtaccagccatggatctggaccgccggcaaccacgagctggactacgcgccggagctgggcgagacggtccccttcaagcccttcacccaccggtacccgacgccgtaccgcgccgccggcagcacggagccgttctggtactccgtcaagatcgcctccgcgcacgtcatcgtgctggcctcctactccgcctacggcaagtacacgccgcagtggacatggctgcaggaggagctcgccacccgcgtcgaccgcaagctcaccccgtggctcatcgtgctcatgcactcgccgtggtacaacagcaacaactaccactacatggagggggagacgatgcgcgtccagttcgagcggtggctcgtcgacgccaaggtggacgtggtgctcgccggccacgtccactcgtacgagcgcagccggaggttcgcgaacatcgactacaacatcgtgaacggcaaggcgacgccggcggcgaacgtggacgcgccggtgtacatcacgatcggcgacggggggaacatcgaggggatcgccaacaacttcacggtgccgcagccggcctactcggcgttccgggaggccagcttcggccacgccacgctggagatcaagaaccggacgcacgcgcactacgcgtggcaccgcaaccacgacggcgccaaggccgtcgccgacgccgtctggctcaccaaccgctactggatgcccaccaacgacgatgtataattattaatcgactccaaccatctcaaacttctt

SEQ ID NO: 209 - DNA, 897 bp, Oryza sativa
  ref <308>: DATABASE ACCESSION NUMBER: AK058369
  ref <309>: DATABASE ENTRY DATE: 2001-12-06
aaatccatccccaacgccatggcctccacgctcgcctggagctccgccgcctcctcctccgccccctcctcccgcctcccgccgcgccgctccccgtcgctggtcgtcgtcgcccagggcaaggtcaagaagtatcgccaggtcatactgacagatgacatagcagaggtggggaagaaaggggacacgcttaaagtgagggccgggttctaccgcaacttccttctgccaaagggcaaggcaacgctgctcaccccagaagtactcaaggaaatgcaagtagaacaggagaggatagatgctgaaaagaagcgggtaaaagaagaggcacagcaacttgcccgtgtttttgaaactattggggcattcaaagtgccacgtaaaggtgggaaaggaaaacagatatttgggagcgtcacagcacaagatcttgttgacatcataaagtcacaacttaatagggatgtcgacaagcgtctcgtgacagtgccagaaattcgtgaaattggggaatacattgcagagattaagcttcaccctgaagtcacagctcaagtaaggctgaccgtatatgcgaaataagccctgaagctgcttgattgaatctttagtggatggtgggctttggatgaattctgatttcaccagagatttttgctgaaactccaaggtgcagtgtcacatcacggggcttggtctttacacattgccactgtccatcctacctgtaaagtcagtttcttgcacctttttttttttgacaaatttatttgtgttaatgttatggggttaaatgggcatgatgtaaacaacaaagggttcagagtctagagcaactgatacttgtcttgtaatcttgtttaaaggtgcacgttctttatagtcatatagtttgat

SEQ ID NO: 210 - DNA, 350 bp, Oryza sativa
  ref <308>: DATABASE ACCESSION NUMBER: AK058370
  ref <309>: DATABASE ENTRY DATE: 2001-12-06
aaatacttgaatgacttgttgggttagttcccagcctctagcctacttatcatgacagatttcagatttgtcactcggttccatacatttttagtatgcatgatgagagcagtgcatactaaattcagtagatgttgagttagtggcttagtgccccatttagctaaacgtgttaactctgaaagtggagcattgagttctccattgagtataggtcactttccctactttttgaaattttggattacagtattaagacatgaagaaaagtatcttgtgtatacacgattgacaaaattttcatggttttatctacaatttagccagttttgaatattggctgttccttc

SEQ ID NO: 211 - DNA, 361 bp, Oryza sativa
  ref <308>: DATABASE ACCESSION NUMBER: AK058371
  ref <309>: DATABASE ENTRY DATE: 2001-12-06
agcagagattatgtcatggctggctacacccctcacaaggacaatcaagtttgctgatgtcaggcctccagagaccaacagaccttttgtcacttttagggctgaagggaacttctattttgttgatgccgagcacttcccgaacaaggctttgttggcgaggcttactctcaagcaccctaatgagtctgcattcaagaacttgtgattgaaggttgcccaatgacctcatggctgcactcgcgttcatgatcatttgttggcagtttacatttttattgtgatacctccctgctaatacttccagaagaagtagtatactatgttattagcgttcctttaaatccatgtggaaatcagt

SEQ ID NO: 212 - DNA, 1385 bp, Oryza sativa
  ref <308>: DATABASE ACCESSION NUMBER: AK058372
  ref <309>: DATABASE ENTRY DATE: 2001-12-06
ataactcagctgcaatcaaaaggaggccttcgatgcaatgtgattgccaatgctgccaactggaggttaaaacctggaggtggaggggttaatgcagcaatatacaatgccgctggggaagatttacaacgtgcaaccaaagaatgcgcggacacattgagacctgggagctctgttgctgtcccacttccatcaacttctcctctgcatcaaagggaaggtgtgacccatatcatacatgtgcttgggccaaacatgaacccaatgcgaccggattgtctgaagaatgactatacaaaaggttctaagattctccatgaggcatatacatcactttttgagaactttgtagccattgtccagagctgcatggggaagcagaacaccgagcctgctttagaaaagccagcaactgcagtgacatcacctaatgattcaaaaacgaagcgagagtgcaaccatgattctgagaggaccaaaaaacacaagttggttcaacccaatacatcctcaaatcaggctagagagggagatagcaagaggagtggtgttaccactactaagacttggggatcctgggcccaagctctttatgagcttgcgatgcacccagaaaattacaagaactctgattctctcctagagatatctgatgacttcgttgttctgaacgacctctatcccaaggccaaaaggcatgttttggttgtatctaggaaggatggtcttgattctctagcagatgtcaagaaagaacacttacctttgctgaggagaatgcattctgctggagtgaaatgggcacagaagttcctagaggaagattcatctttggtattcagactcggataccattcggttccatccatgaggcaattgcacctgcacatcataagccaggacttcaactctgccagtttgaagaacaagaaacactggaactccttcaccacaacatttttccttgattctgttgatgtcattgaagaaatcgatcagcgtggatcaacaactatcagcagtgacgacagggtgctcgcaatggagcttcgttgccacagatgcaggagtgcccatccaaatatcccaaagctcaaatcccacattgcaagctgtaaatcgtccttcccctcccatcttctgcagaaagataggctgttgtcatcatcgacaatgcatatggattgcacttagaactctgcgaccaatggtccttccaagcacattttgtgtttcgtgcttccagaaggataggaaattaggaaggaatctagtttttccttgttatgcctgtcttgcagaatcctgccttgtgaacaaactgcagtgcatctgatcgttaaaaagaaaaacagagatctgaagtgttgcaagccctttcttac

SEQ ID NO: 213 - DNA, 682 bp, Oryza sativa
  ref <308>: DATABASE ACCESSION NUMBER: AK058373
  ref <309>: DATABASE ENTRY DATE: 2001-12-06
tcagtatctgggcactagcaaaggctcctcttttgatcggatgcgatgtgcgctcaatgagccagcagacgaagaacatactcagcaactcggaggtgatcgctgtcaaccaagatagtctaggtgtccaaggaaagaaagtacaatctgacaacggattggaggtttgggccgggccactcagcaacaacaggaaggctgtggtgctctggaacaggcagtcataccaggcaaccatcactgcacattggtcgaacatcgggctcgctggatcggtcgcggtcactgctcgtgatctatgggcgcactcttcgttcgcggctcagggacagatatcagcatcggtggcgcctcatgactgcaagatgtctgtcttgacaccaaactagtcagcaaagaaaagcagcacaggttagtacgtgtccggcgaatacagctaaattgatcaggattcaggaagaaggtttgcaatttgcaaggattggtagagctggaaatgggatgccatttggttatgtatgtagaaataagctgtaagcctgtaagcgtatatgtaatcagccgtcaaatgctggcgagtgtatttctgaagtttgcaacgaaagttgcagcaataaaaatacaaaaagaaggctttcctgccactatataagatatgaacatatgaattttttgcatcgcc

SEQ ID NO: 214 - DNA, 359 bp, Oryza sativa
  ref <308>: DATABASE ACCESSION NUMBER: AK058374
  ref <309>: DATABASE ENTRY DATE: 2001-12-06
gagaagcgccgtgagaggctccaacaggaggaggagctggcaaaacacatggctgaggaagatgacgatgatttttagactggctggccacttctttggcactttgggctgccaaattgcaatgttgagttggttgatctgagagaccgtaacacacctatacatgccactcacaaatgatatttgagtcatgcaaaaaccctttgcttcatctgccggaaatttatgtcgatgagaaatttatgactccaaatgtgtctagttggataacttacttttaccttcaccttgtatcatggattcgagaatttcttttgtaccatgcgaaattcggctgcttcattcatgtattgtggttc

SEQ ID NO: 215 - DNA, 824 bp, Oryza sativa
  ref <308>: DATABASE ACCESSION NUMBER: AK058375
  ref <309>: DATABASE ENTRY DATE: 2001-12-06
attgccattgccaaagctaagcttctcgccatggaagctctcctctcctcgccgcgcgctctcttctccgtcacgccaaccgcgtgctggccggcgtcagccaggaggaggagacgtgttgcttctcctgtcaaggcggccgccgccgccgccgagccggccggggaggagaaaaagcccgccaccggcggcgccgcggcggcggcgggagacggccaggcggctgcgccggcgccgaagaagatcctcaagaagaaacctgtctactcgatgaagaagggccagattgtgcgcgtcgacaaggagaagtacttgaacagcatcaactatctgtcagttggacacccgcctttcttcaaggggctagactacatatacgaggaccgtggcgaggttttggacatcagaatctttgaaacaggggagtatgccctgatcgcttgggttggaatcccaactccaccggcatggctgccaacttacatgctcatcaagtcggataaactcgactacgagagaatatgatatgcacaggatcgaaggttgcgttcaagctagctcagcaatcgggtgggagatcggtccttggcctgccagactagcgttttttcagttgttttcttccctgcattgcagattcttcccctatttcggttcttccgacgattaatctgcagatgttttcagtcggttcgtgatatatgacaatgtgttgtatatagatgtcaatatgaggcgatttgctgttgcctgttgctccgcatctaaattaattatactgaactgaaaaatttaacaaaagttaagtgatgatattcagagct

SEQ ID NO: 216 - DNA, 1243 bp, Oryza sativa
  ref <308>: DATABASE ACCESSION NUMBER: AK058376
  ref <309>: DATABASE ENTRY DATE: 2001-12-06
atttgatttccatctcatcacataaaaccggaataatgtctactgctggcaagactattacctgtaaggccgccgtcgcctgggaggccggcaagcctctgtccattgaggatatcgaggttgctcctcccaaggccaacgaggtccgaatccagatctactacactggtgtttgccacacagatgcctacacactctctggcaaggaccccgagggtgctttccccattgtccttggacacgagggtgccggtattgtcgagtccattggtgagggcgtcaccaacgtcaaggttggtgaccacgtcgtcgctctctacacccccgaatgcaaggagtgcaagttctgcaagtccggaaagaccaacctttgcggtaagatccgagccacccagggcaagggtctgatgcccgacggcacctctcgattcaagtgcaagggcaaggatctgcttcacttcatgggcacttccaccttctcccagtacaccgtcgtcgccgatatctccgtcgttgccattgagcacgacgctcccatggaccgaacctgtctgctcggctgcggtatcaccaccggttacggtgctgccaccatcaccgccaacgtccaggctggcgacaacgttgccatcttcggtgccggttgtgtcggtctctcagttgtccagggtgctgccgctcgcaaggctggcaagatcatcgttgttgacgtcaacccttccaagaaggagtggggtgagaagttcggtgctactgacttcgtgaacccccccgagctcggtgaccagtccatccaggacaagcttatcgagatgaccgacggtggttgtgactacacctttgactgcactggcaatgttggtgtcatgcgcgctgccctcgaggcctgccacaagggttggggtgagtccatcgttatcggtgttgccgctgctggccaagagatttccacacgaccattccagcttgttactggccgagtgtggcgaggatgtgctttcggcggtgtcaagggccgttctcagctgaacgatctcgttgccgactacaagaagggtgacctcaaggttgacgagttcatcacccaccgcaagaccctcggcgagattaacaacgctttcgacacaatgaagcagggtgactgcatccgtgctgtcgtcgacatgcaaaagctcgagcctaagatttaatgacccaaaatgtagtataaacaaatgataatcaaaatttcatgttgaatgac

SEQ ID NO: 217 - DNA, 362 bp, Oryza sativa
  ref <308>: DATABASE ACCESSION NUMBER: AK058377
  ref <309>: DATABASE ENTRY DATE: 2001-12-06
catccatcaatcgatcgatcgagcgatccaaccgaggtacgcgagcaaccatccccgcttccccttttcctcctccgattcgagatccatggcggggcctctgccgtgcggcacctcaaaccctctccggtcgtactctttgtctgcagccggcgagcagatctgaaggcgcggccggccgacctcctcccgcctacctcaagtctcgtctcgactcgaattgaaggtcttgcgattacttccctcgcgtagattgcgaattcatcagggctttgattgattggtctccgtccaatcaaaccgtcgagtttgttgtgaatttatttgatgcgtggtgtagtgctaatagcagcttgtgtttc

SEQ ID NO: 218 - DNA, 1704 bp, Oryza sativa
  ref <308>: DATABASE ACCESSION NUMBER: AK058378
  ref <309>: DATABASE ENTRY DATE: 2001-12-06
ctcgagccattccacaaaattcggcaaaatccagtgctccagtcagtggcagtggcagtggccatggactccgccatctccacctcctcgtccttctcgcctctcaggttgtctcagaatcatgggagcatcatgagcggtagcaccagggctcaggtgctcccggtgggcaggcagcagcagcagccacccgccggcggcgccacccgcctccgcgccgtctcgccgtcgccgtcgccgacaccgcccgcgccgcagccggcggagacgttcgggttcgatgccctcaaggaggccttctccgtcgacgtggtggcggccgaggcgcggccgctcaacgtgcccctggccgcgcccttcaccatcgcgtcgtcgcggctggacgccgtgtccaacgttgccgtccgggtggagctccggggcggcgcggtcgggtggggggaggcgcccgtgctcccctccgtcaccgccgaggaccagcccggcgcgctcgccgcggccacccgggcgtgcggcgctctggccggcgcgcccgccgcgcccctcggcgccgtgctccagaacgtcgccagtgccctcccgggacacgacttcgcctcggctagagcaggagtggagatggctttgattgatgcaattgctaacagtatccgcatccctttgtggagattatttggaggggcgtcagacagtgtcacaacagatatcacgattccaatcgtgacaccaaatgaagctgctcagttagccgcaaaatatcgaggacagggatttcagactctgaagctcaaagtcgggaagaacttaaactcagatatagaagttttgaaggctatacggcttgcccatccagattgttcatttatcttggatgcaaatgaaggatacacagctaatcaagcaattgaagctcttgatagactaaacgaaatgggagtgactccagtattgtttgagcaaccagttcatcgagatgactgggaaggtctccgcgatgttagcattgttgccaaggagaaatacagagttgctgttgcagctgatgaaagttgtcgtagtttgcttgatgctcagaaaataatggatggaaatcttgctcatgttattaacatcaagctagcaaagctagggattcttggagcccttgaagtaattgatgctgcaagaaaagcccgcattgcgctgatgataggcggtatggttgagactaggatcgctatgggctttgctggtcatcttgcagctggtcttggttgtttcagttttgttgacctggacacacctcttttactgtctgaagatccagtgttcggtggctatgaagtttctggacctgtatacaagtttacaaatgctcgaggccatggtggtttccttcacttagacaacaacggcttgaaataaggaatgccctagccctttgggagcttcacagacaacggtgacacgttcaatgaacaattaattgttcattatttaccttcaacaataatcaattggagttgaaaccaaaggagcagttgtaaacttgtaatcctatatgaccttgaagaggctaattattgttgccagtccagttaggcctgaaatatttgatcagtctgtagatggataaaataatgaggcattttcagctggccttgttgttctgttcgataaataaattactaaatatggtataaaagaccttatgtatgcagcctc

SEQ ID NO: 219 - DNA, 1235 bp, Oryza sativa
  ref <308>: DATABASE ACCESSION NUMBER: AK058379
  ref <309>: DATABASE ENTRY DATE: 2001-12-06
gtcacgctcggccttgcggtctcgcttctcccccaattccagccgcgaaaaatccgaaaaccctcgcccccaccctagcgatggccggagaagacgccgccgccgccgcttccgctggcgccgcagcggtccagaggcgcccgaaggtggtggaagaagacgacgatgaagacgatttcgtgccgctctcgcatgcccggggaaggaagaaagcgagcggtgcggccgcccccaagtataaagaggaggaggaggaagacgaggatgacgatgaagaggacaacgtgccgctcgcggtttctcgggccaagaaggcgggcaatgcgggtgcctccaaggccaagaaggacgaggacgacagcggcgacgatgacgacgactaccacgtgccgctctcgcggtccaataagggaaaagagaagcagaaaagcaccgttaaggctaaggttaagaaggaagaaaccgattccgatgatgaacgcaagccaaaggcgcagaagaaaagttcagctgtgaccaagacctccaaggttaagaaaataaaagatgaggatctggaaatcgataccaagaaaataaagaagggtgctgccactagaaagggagatgcagagaaggtgaagaaagagaaaaaggtgtatgatttgccagggcagaagcatgatcctcctcaagaaagggatccactgaggatattctatgaatcgctctatgagcaggtgcccactagtgaaatggctgcaatctggttgatggaatggggtttactcccagtggatgtggctcaaaaggtctttgagaagaaacagggccagaaactgaagtcgccagtgaaaacaacctctgcaaagagaaggccagacactccaaccaaaaagccacagttgtcatctgctacaaaaaccaactcagccgtaaaggattctggaaaaactaccgcgcagaagaagaggagggcaagcagtgacacagatgatgacgatgatgacttcattgtttctaagacgaagaccaaaatgcaaaagatgaatagctaggggtatcatccttggcataattgctgaatcagggtaaccttaggaaaagatgagagattttccctttccatgtactgacatgcatgagcatctggatactgaagtgaaggaatgcactgcttagaagttccacctgttgcttagttctggaatgacaatggttttcctgaccagaatgaagggaaaatgtttcaaatt

SEQ ID NO: 220 - DNA, 1600 bp, Oryza sativa
  ref <308>: DATABASE ACCESSION NUMBER: AK103954
  ref <309>: DATABASE ENTRY DATE: 2002-08-28
gaagaaaccaggggagagcaaaggctccgtgccaacgtgcccgcggggaaatgcctcagccctcagccatagaccttacctcatggccgtcgtagcccctccttcccttgcccttccccaacctcctcagaacccaacccctaaacctcgccgccggccgccgcgagacgtcgcctcatggacgtccgccatcgcgcgcccggcgaagcagggcgacctccccgcggcggccgctgcgctctccgccatgctctcctcccccgcggcgcccgtccccaacgacgtcacccttctcaccgtcctctccgcctgcgccgactccccgtcctccccgctcgcccgccgcctcgcgctctccgtccacgcccgcgtgctcaagctcttcccctcccacctcctcctctccacctgcctcgtgcgcttctacttcgcgtcccgcttgccccacctcgccctccagctgttcgacgccatgcccgtgaggtccgccgtcacctacaacacggtgatctccggcctcatgcggaacggcctcgtcgccgccgcgttcgaggtgttcgacggaatgccggcgccggataaggtctcctggacggctctcatcgacgggtgcgtcaagaacgggcgccacgacgaggccatcgactgcttccgcgccatgcttctggacggtgtcgagccggactacgtcacgctgatagccgtcatctccgcgtgcgccgaggtcggcgcgctggggctcgggatgtgggtgcaccggctcgtggtccggcaggggctggagcgcaacgtcaggatagccaactcgctcatcgacatgtacgcgcggtgcgggcaggtggagctcgcgcggcaggtgttcagcggaatgaggaagcggacggtggtctcctggaactcgatgatcgttgggttcgccgccaacggccggtgcgcggacgccgtcgagcacttcgaggcgatgcggagggaggggttcaagccggacgccgtgacgttcaccggcgtgctcacggcgtgcagccacggcggcctcaccgacgaggggctaagatactacgacctgatgagggcggagtacggcatcgcggcgcggatggagcactacggctgcgtggtcgacctgctcggccggtcggggcagctcgaggaggcgatgcgggtggtgaccaccatgccgatgcggccaaacgaggtggtgctcggcgccctcctcgccggctgccggatgcacggggacgtcggcatggccgagcagctgatgcagcacctgctcgagctggaccccggcggcgacgccaactacgtgctgctgtcgaacatctacgccgccgtcggcaagtgggacggcgccgggaaggtccggagcctgatgaaggcgcgggggctgaggaagaggccgggctacagcgccgtggagatcgacggcgacgtgcacgagttcgtctccggcgatcggtcgcatccacaggcggaggagatatctcagatgcttgggttgctcatgcatgagatggcagggcatgattatgaccatgtaatcgattgcttggatgggggatgaattcagaccctggagactggagaatgcagaagactg

SEQ ID NO: 221 - DNA, 1452 bp, Oryza sativa
  ref <308>: DATABASE ACCESSION NUMBER: AK058380
  ref <309>: DATABASE ENTRY DATE: 2001-12-06
aaaaatcattgcgcctcgactcgagtttctctcccccgccgccttccgctcgtcgcgcatctggcgagcagagcaggggagggggcgccgccgccgccgccgtccttgtgcatcctcatcccggttttgggggtggttctgtcccaggttggatccgcgccccctggctgtcaccgtaatctttcagggttttcgcgaggatgtcgtggtgcacgattgagtctgatcccggtgttttcaccgaattgatccaggagatgcaagtaaaaggtgttcaggtggaagaactttactctcttgatgtggactctattagtgaactgcggccagtttatgggctaatttttctcttcaagtggatggctggggaaaaggatgaacggcctgtcgtcaaagatccaaacccaaaccttttctttgctagccaggtcatccctaatgcatgtgctactcaagctattctgtcaatcctcatgaatcgcccagaaattgacataggtccagaactatccaacttgaaggaattcacaggagcttttgcacctgacatgaagggccttgctattaacaacagtgattctattcgcacagcccataacagttttgccaggcctgagccatttgtctcagatgagcaaagagctgcgggtaaggatgatgaagtgtaccatttcataagctatttaccttttgaaggagtcctctatgagcttgatggattgaaggaaggacccataagccttgggcagtgttctggtgggcctgatgatcttgattggctaaggatggtgcagccagttatacaaaaaagaattgaacgctattcccagagcgagattaggtttaaccttatggccatcattaagaataggaaggatgtatatactgctgagctgaaggagctggagaagagaagggaccagcttttgcaggagatgaatgagtcctcagcagcagagtccttaaacagcgaacttgcagaggtgacatcagccattgagactgtcagcgagaagattatcatggaagaagagaagttcaagaagtggaggacggagaacatcaggaggaagcacaactacattccctttctattcaactttctcaagatgctggcggaaaagaagcagctaaagccattggttgagaaggccaaacaacagaaggcttccagcacaagcacgagtgcaagatgaagccaagtgccaccaatggctgtaccgaattcgttggttctcattttgaggaaagcatacgttcatgggttactggggttagttgttgcattttccctttttgagaatgcgttatgctatcagatacggcaccttgttggcagcttagagatatcactaagttaatgaaccagagtacattctctttaatctttttctccgtgttgtattattatctgttatgactttctgcccttgtgtgatggatagaaactgt

SEQ ID NO: 222 - DNA, 962 bp, Oryza sativa
  ref <308>: DATABASE ACCESSION NUMBER: AK058381
  ref <309>: DATABASE ENTRY DATE: 2001-12-06
gagccaacagcccgcaagaataagttcccagacccagaacgtttcgacggaactcgcgagaactacctaggctggaaatttgaatgcgaagggaaactagagtatgacggagctatgttcccgaccgaggattcgaaagtccgatacgtgctcagccgaacaaaggacaaggcaaaccaggtccttcttccctgggtgcttgagaacaaggagcggacgactgtcggcctatgggaacatatggatacccactttcaagacgtccaccagcagcagcgagctctgaacaagcttcgacacttaaagcaaggacgacggccaatacgcgactacgtctcggagtttaatcaactccgtgtagagtcccgacagacgttcagcccagtagtagcccgcgagatgtttagtgaaggactcggagaggagctccagaagctaatgctctatacccctaagaatggaagtttgaaggagtatatggacaaggcaatcgagctctcagacgacctgtatcggatccaactgcacgggaggaaccgacggaacgcagcctacagttacgcgcaagcccctccgaaagccactcagcgagagactagcctagaagcgatggactgggaaccctcgagagttaatcgagcacgagaaaagatgaataggccaagacgacctccgcgagactgctatagctgtggagagctgggtcatctagctaggaactgtccaaacaacattcgggtcaagagagctagagcccttcctaagaatgaggaacggaagcagctagaggaagctgaggacctagccgacagcgactcgggaaaagacgagctctgagccagagtctccgctcagagcctctaaagatggatcggcagacaagcagcgaatggagtcaatttcagcgaaagcatatgcgtcccccgccaattactatagatctaatcgtgaataacgtagtg

SEQ ID NO: 223 - DNA, 719 bp, Oryza sativa
  ref <308>: DATABASE ACCESSION NUMBER: AK058382
  ref <309>: DATABASE ENTRY DATE: 2001-12-06
gagctgagaagctgagcacccaaaaagcagcgcgcgcgcgccggccctagccacgacgcaccgcgcgcgccggccgccggcgaggcccacgaccgccgccgcacgcctttggccagatcgcgcaggcgagatcctcctatggccgcctccgtagcgccagcgtcgtcgtccggctgggacttcacctgtgactttgaaattgattatggatccgaggaacgcgcatccatagtttacaaaacgctagctgttgataaggagcttgttgagaaaagaactcgaatcctgtggtatttatcttgcagttgcaacctgacaaggtaaagagggagatgtctgtttctggtggcaagctcgtcgtgcactttgaagctgtagaggctcggttcctgcgagcatcgttcagcgcgttcgtcgatcttacagtactggttaccaagcttgttgaagaatatggcatcagcaaggaaggagaaggcagtatctagctagttttactcccctgtatcttagaaaaatgttttacaacacctttgagcattcataccttcttttatatcatattatgtgtgttcttcgtttcttaggccagaaatctacaagatagaagcagctgttgtaattccagatttcttgaatcttggtatgggatttgcctctcaagagtaactctgaacatacttggttgggatagtagtcagttcttgtcgccttaaatg

SEQ ID NO: 224 - DNA, 514 bp, Oryza sativa
  ref <308>: DATABASE ACCESSION NUMBER: AK103955
  ref <309>: DATABASE ENTRY DATE: 2002-08-28
tccatctgggtctaggaagataaatggaaaatatatccagtcacatcttctcaccagattagaagctgttcatgataaggttatggaacaaattaaggatgtagactctttaaagcaccaagaaatttctgtcttctgggttggcattgctgagaatgtacaaattatgggccccttcgatggctggtcccagggagaggcaatgtccatggagtattcaggttaccaagcaagattctctgcaactctgaatcttagacctgggaggtatgagatcaaattcttggttgatggagagtggaggctgtcactggagtacccaattgatggcgaaggttcaatgcagaacaatatacttgttgtaaattaatgtagatatctgttggctcctagtttgccatagttgtaacttgcagctataaaacctagcgcaagattgaactgtactcgattgctatcatgcatccgatttgcaaaatttcactttaccatgaaatgcaaggccttttcttcc

SEQ ID NO: 225 - DNA, 1655 bp, Oryza sativa
  ref <308>: DATABASE ACCESSION NUMBER: AK058383
  ref <309>: DATABASE ENTRY DATE: 2001-12-06
tcagaatttgcaatgtgagacacagagattaacctcaacacaggatgctccatttgaaaggactgatctgtctggtattcctgtgccacgaagtattactactgcccatcaaagtgtagtgccttcatgggatctgcagacaggagtagaaccaacgggtgctttgtgcatggaaacaacacatgaaaggcagtctgaactaccatcaggttcaatgcaagagcgatctgcagaaacaagagcaaacttagtgcagcgatcttgcacgacagaaacttgtgatttgcagccccaactggatctatcatccacaatacagactgtccaacttgaaggaatacgctctgaagacatgaatcagataggtgttcagtccaactctgcactaagttctgaacagcccacccagcctcttccagtggcaccattagtgtttaattatcaaagatttagtgacgaacctctcaaaaatgagctggaaagattaaaacataccagcaatgttcttagtaaagttcatgaacaaaagagaaaacaactcctagtggagtataaccaagaaatggagaagctaaaacagaaatatgactcattacttcaaaaggaagattctttttacgctcagaaggaggcagaacttgatactatctacaggaaagtctttataaaccaatcactggctgagaattttcgaaggaaattcctaccattatctgcagctcaagggggatccacgagacccacaattgggcagctggttcagtcttctcaggaaccatctgcaaggattgtagcagagcaagtcacagcatcaccagttaccttgtcatcagcagttcgaccacaggtgcttcattcatcaggaccatatgtgcaaccttcactggtggttcaaccatcatcacaggctacccaaccgcagtcaatcttacctggcaatatgtatagagcaatgtcatcatcaccttttagtagtacaccaatgcctatgccacatggcacctacagagctgctggggcacaaccgcatgctccctctcctcatctccagcagcttaggatgccgtcaccttatgccacgagtcatggaaatcagcaccaacgaccatctatcctagcatccctactgccatttgtgctcccatctagttcaaatcctagcctcacggcacccctgtcattgaacacggttgttcacaggacctcaggtccactgaatgcaggtgctggaagccagcacgctggatctcaaatttcaggtgtcaatccctcaggttcttctgcatcagcatcactgaatacatggctaacagctaggcttgcgctgactagtgaggccagagggacggtctccagcacagaggttgtgtgcctttctgacgatgaatcgtagtgaggaaggttcagtcaaattgtaggttactagtgcaatagttaactgatttgagttatagtcgatctaacccctttagtattctgatagcaagagacggacatcaatagaagtacagtgggtcggggtttcttttttgggggatgacgggtgctaacatcaatttgaatatccatcttgtataatcagtctacctttcctgcaaatatcaaaccttgttgatacgggtctggaaatgttgaggttaccccttttcctgctg

SEQ ID NO: 226 - DNA, 576 bp, Oryza sativa
  ref <308>: DATABASE ACCESSION NUMBER: AK058384
  ref <309>: DATABASE ENTRY DATE: 2001-12-06
aagcaaggaggcgactctttaatatgataaacaatttgccaacaatatttgaggtagtgacaggagccgctaagaagcaggcgaaagaaaagactcccaacagtagtagcaagagcaacaagcctagttcgaaagtgcagtcaaaagctgagtctcgttcgaaatctaagctgtcagcccccaaggatgaagagggaagtggtgatgatgagggagaggaagaggaggatgaccatgacaacactttgtgtgggacctgtggaaccaacgatggcaaggacgagttctggatctgttgcgataactgcgagaagtggtatcatgggaagtgcgtcaagatcacacccgctcgtgccgagcatatcaagcagtacaagtgcccggactgcaccaacaagagggcccgggcatgagtaacaagaagctgtgtcgaactgtgttagagtggagttgtcaatctccggatgtcatgatctcttagatattatcttgccctagcttttctagtttgtaagcttgtctctaatttaattttaaactgtaactgttgattaacctacctgtgtttaaagcttc

SEQ ID NO: 227 - DNA, 400 bp, Oryza sativa
  ref <308>: DATABASE ACCESSION NUMBER: AK058385
  ref <309>: DATABASE ENTRY DATE: 2001-12-06
tgaaatggaattcctgacactatgcaactttggtctatgaaggaagttaaaaaaaatactcccaataatgaggaaaccactgatatgctgttgttttactggccaggagaattttacgtgagcgttctttgttatctgtaacaaaattttcctttgtagcattttcttacaactgtgctgggcagaaacttgtagatttttcttgctggtttatgatagtattgtttcattagctaaactgtactggaccatcatggtgtagagtaatagagtatgtggcagtctattggaaggaaactatagctgaatgctcctgtattatttatagcaaacttatctcccaattgtatctatccaaaaaggagaaagagttatatatccagtgacattttattttgtc

SEQ ID NO: 228 - DNA, 1226 bp, Oryza sativa
  ref <308>: DATABASE ACCESSION NUMBER: AK058386
  ref <309>: DATABASE ENTRY DATE: 2001-12-06
accagaatgttcatgaagcacagtttgttttgcgtttgtatgagaatcttcagaagttcttgagagctaatggtggcaagaaagcttctgttggtataatcacaccatataagttgcagttgaaatgtcttcagcgggaattcgaggaggttatgagtactgaggatgggaaggacatttacataaacacagttgatgcttttcaaggacaggagcgtgatgtgattattatgtcatgtgtccgtgcctcaaatcatggtgtgggtttcgtggcagatatacgccgtatgaatgttgctcttactagagctaggagagctctatgggttgttggtaatgccggtgctcttatgcagtctgaggactgggctttactgatagcagatgcaaaggccaggaaatgttttatggatcttgataccattcccaaggacttccttgccatgaagatctctaactctgttccgagaaatggcagttacagaaatttggatgatctgggacgtcctggtgataggtctagagataatttgccttttggaatgcctaggaggccgaattcgtcgaatggttcaagaagagaagtgtaaagaatgcactgctgtaactgtacatttgcttggtctgtgcagccctggacagtcttggatggacaaggtggcgtctattcagaagatgtgcacttggctctaccggtggatgggatggtgatgggaaggtgttggtattcacaacaccagacgattgattatgaaaccaagcctctagtgacaatgggttgtaagcctcaggtgcctgtacctagagatggcattttgttggatgggtgcctcatggaacaaagttgcttcatgtcgtcagtgtttcgaaacatcacaggatttccatatctagtgaccagaattgagcaaggtgtcagctggacagattatgcctgacattgcaatgcttgctttttagcatgctttaacagaacctatcatctcatagatatacatgcatgggcattttcattttgaaaacatgccgggagaaaaacaactctcactggctctagagcaggttaggtttcaagcttttgttgcaagattgctgctgcagcgaacattcatgcttgatatgtcctgtaggattagtatgctaacataggcagggcttttgtaacatatgacataagctccctctgtatacaaaatccgcatctagaaaagttgattatttgattc

SEQ ID NO: 229 - DNA, 1535 bp, Oryza sativa
  ref <308>: DATABASE ACCESSION NUMBER: AK058387
  ref <309>: DATABASE ENTRY DATE: 2001-12-06
ggccaccagcccagcagcgaggtgttcgagctcttcgacatgctcttcctcctctccagcggcaaaaccgtctacttcggccaagcatcgcaggcatgcgagttcttcgcccagaccggcttcccgtgcccgccactgagaaatccatcggatcatttcctgagatgcgtcaactccgacttcgacaaggtgaaggccaccctgaaaggttccatgaaggcaaggatcgagaggtcggacgatcctctggacaggatgaccacatctgaagccatcagaaagttggttgcatcctacagcaggtcccagtactactacgctgcaagggagagagttaatgacatctcacgactgaaaggaactgtgctggattcaggaggaagccaggctagcttcttgatgcaggcaggcacactgaccaagcgctccttcatcaacatgtcaagggacttcgggtattactggctgaggctcctcatctatctcctcgtgaccgtctgcattggcaccatctactatgacgtcggcaccaagtacacatccatcctggctagggctgcctgtaccgcattcgtcttcggattcgtcactttcatgtcaattggagggttcccttcatttgttgaagaaatgaaggttttccaaagggagcggctgaatgggcattacggtgtcgcggcttttgtcatcagcaacacaatctcggcgctgccattcttggtcctgatatgcttcttgtcagggaccatatgctacttcatggtgcgccttcacccaggtttctcccactacatcttcttcgttctcaacctctacgccagcgtcactgtggttgagagcttgatgatggccattgcaagtgtcatccctaatttcctcatggggatcattataggagctgggattcagggaatatttatgcttgtctctggatactttagacttccttacgacattccgaagcctgtttggagataccccatgcagtacatcagcttccattactgggcgctgcaggggcaatgccagaatgacatggatggtctcgtatttgacaaccagtacccagaccaaccgaagatccctggagacttcattctgaagtacatattccagatcaacgtgcaccggtcaaagtggattgatctctcagtaattttcagcatgatcttcatctaccgcattctgttcttcctcatgatcaaggtaaatgaggatgcactgccatggattcgggggtacattgcaaggaaaaggcttcaaaagaaggaacctcttggcaagacaccctccctcagaggctacgttgtggatccagagcttggtcctaacgaaagctagaatataaactgttagcagatataggcccatttcttgccggttcttggtggaatatgtatctaagatcagagaaactggtatttatacgttttgaaactgaagctcaagctgatcggaatacaggtatatacagacatgtaatgtgtgaaaaatggcatcagagatgcagagttgacacatagctggtggttcag

SEQ ID NO: 230 - DNA, 626 bp, Oryza sativa
  ref <308>: DATABASE ACCESSION NUMBER: AK058388
  ref <309>: DATABASE ENTRY DATE: 2001-12-06
gcaatcctatattatgatcaagcctgatggtgttcagcgaggcctggttggcgagattatttcccgtttcgagaagaaaggctttgtgttgaagggcttaaagctttttcagtgccccaaggacttggcacaggagcactacaaggatttgaaggaaaaacctttctttcccggtctgatcgagtacataacttctggccctgttgtttgcatggcttgggaggggaatggtgttgttgcatcagctcgcaagttaataggagctactaatccccttcaagctgaaccagggaccatacggggcgatcttgcagttcaaacaggaaggaatgttgtccatggaagtgacagtcctgataacggcaagcgtgaaatcgctctatggttcaaagaaggcgaactctgcgaatgggaatctgttctgacaccatggcttgtagagtaatgctcccagatcagtgcaagaactggatgcagtgcttgttcttgatttgaggggttatgtatgagttcagatcagcagagtaaagtagcttataccaaagctcggccttctcatgactgtacaccctgacattccccttttttgtaatacccaacattcccttttttgcgtttgaccgatt

SEQ ID NO: 231 - DNA, 1401 bp, Oryza sativa
  ref <308>: DATABASE ACCESSION NUMBER: AK103956
  ref <309>: DATABASE ENTRY DATE: 2002-08-28
ggaaacctagccaagatccccatcgtcgccgccgccgccgtcgccgtcgccatcgccgccggcggccgccattggcagcagggaagaggatgatccggcgattcttgtacattgctgaccactgctttacaggcccctccctctcccacaggctacggcgagtcaacccatcacatctctcctaccccgatggccatccactagcaacgaaaccggagcgagcgacggtggaggtggaggacgctcgcctgcctccacccgccatggccttctgctccccgggcaccacggcgacggccatgggcatggagttcatgcgcaggaacgacggcagcatcgtcggcatcgaccacaccggccgcgccgtcctctacgaccccgccgcgcgcgccgtccgcacgctgcccgccctcgcggcgcccaagctcatgcccgtctcggccgccgtcggcgacgacctgtacgtcatggagacgacgcccctccccgacggcgccggctgcttcgaggcgctcgtacgcctcgaggataatcccgccgagtccgactccgacaagtgggaggtaggggacaactacctctggcaacccctgccgccgccgccgccgccgccgtccccgtgcgtgaacgcctacgccgccggcttcgaaggctcctcccgcggcatgatctgcgggtacgcggtggccggcgacggcgacggcggcacgcgcatcctggtatccaccacgaccaacggcacctactccttcgacaccgcgagctccgcgtggagcaaggccggcgactgggagctgcccttccgcggccaagccgagcacgtccccgagcacggcctctggttcggcatctccgacatggatcacaccattctcggcgcgtggaatctgtcctccacgatccagcagccgcagccgccggtggcgagcctccagttgaaggggttctccgtggagagccacagcgacgaccggaggagggagttggaggtgtacacatcgcaagtcgtccacctgggcggcggcaagctgtgcgtcgccaagatgttcagtgttaatcgcagagaaaggggtaaaataaatttcgctatgctcactggcgtggaggtggtacgctgccgtggcggaaagctccgcatcgtcaagcacaagtcgtgccgttataacttcggcgaagactacacccctgattatctactctaactagtagagtactcctacttagtactgtcctaataaaaacccttatttgattaatcctactcttatgcaggatacatattcatcggttagttttaaaactctgcattgcatagctctgtaaactctgttagtagagatgaatgatttcaaggaagcaattctattgttaaggacctgaaaaaaaaacatttataacctg

SEQ ID NO: 232 - DNA, 1475 bp, Oryza sativa
  ref <308>: DATABASE ACCESSION NUMBER: AK058389
  ref <309>: DATABASE ENTRY DATE: 2001-12-06
accatcaccgacgacggcgacctcaccgccgccggggatgaagcgccgccacctcccgcccgtcctcgtcctcctcctcctctcaatcctctccctctccttccgccgccgcctcctcgtgctgcagggccccccgtcgtcgtcgtcgtcgtcccgccaccccgtcggtgaccccctcctccgccgcctcgcggccgacgatggcgccggatccagccagatcctcgccgaggccgccgcgctgttcgccaacgcgtcgatctcgacgttccccagcctcggcaaccaccaccggctgctctacctccgcatgccgtacgccttctccccgcgcgccccgccgcggcccaagaccgtcgcccgcctccgcgtcccggtcgacgcgctcccccccgacgggaagctcctcgcctcgttcagggcatcgctcgggtcgttcctcgccggccgccgccgccgcggccgcggggggaatgtggccggcgtgatgcgcgacctcgcgggggtcctcggccgccggtaccggacctgcgccgtggtcgggaacagcggcgtgctcctcggctccggccgtggcccgcagatcgacgcgcacgacctcgtcatccgcctcaacaacgcgcgcgtcgccgggttcgccgcggacgtcggcgtcaagacctccctctccttcgtcaactccaacatcctccacatctgcgccgcccgcaacgccatcacccgcgccgcctgcggctgccacccgtacggcggcgaggtgcccatggcgatgtacgtctgccagcccgcccacctcctcgacgcgctcatctgcaacgccaccgccacgccgtcctccccgttcccgctcctcgtcaccgacgcgcgcctcgacgcgctgtgcgcgcgcatcgccaagtactactcgctgaggcggttcgtctccgccaccggcgagccggcggcgaactggacgcggaggcacgacgagaggtacttccactactcgtcggggatgcaggcggtggtgatggcgctcggcgtctgcgacgaggtgagcctcttcggcttcggcaagtcgcccggcgccaagcaccattaccacaccaaccagaagaaggagctggacctgcacgactacgaggcggagtacgacttctacggcgacctccaggcgcggccggcggcggtgcccttcctcgacgacgcccacggcttcaccgtgccgccggtgaggttgcactggtgacggtgaccccgacgtgggtgtatgtgtagctgctgctgaattttgttgtaaaattgaaactgatttcatattcgatacgtagaatcccattgtaatttgtaaatcagggggaatgggaggagatacggacacaagatgtgtgtcagatttgggagctttgtaaggagaaatgtagctcaattttgttgtgaatttattcgaaccattgcagtgaacttgttgatcatggaagcgcttattgattgtg

SEQ ID NO: 233 - DNA, 1431 bp, Oryza sativa
  ref <308>: DATABASE ACCESSION NUMBER: AK058390
  ref <309>: DATABASE ENTRY DATE: 2001-12-06
aaaaaaaagccaattgagggtctatgctctgcaactgatgcagtgcatcacaggaagaaacctcaaaagccttccaaatgagctggtttcccaggttgagccatgggaattgtggtatgagcctgggacaggttcttccgtagcagatgataataatagtccctccagcagcattacaggcaccctagtggccctcagatctactcagatgatcactacagttcttcctaatgctaatatcacacccaacaacctggggactcttgattctgcagtatcttgcttcttgcacttgtcagaaagtgcttcttctgttgagactattgctgttatggaagcagttttagaagagtgggagcaattgttctcttccaaagaagaatatgttccgccccaagaatcaccaaaagaaaccaatgattggagtgatgattgggatgatggctgggaggccctaccagaagagttagagagtccaacgaaaaagcacggtagaacctcattatctgttgatcccctccacacttgttggatggagattatcagaaaactagttgagcttggtgaaccacataaggtaattgaacttctggaccgagcatcatccagaaatagcatgttaatcgaggatgatgaagcaaaccggttacttgaactcatatctgcaatggaaccgttgatggctctcaaaatcatgctgcttctcccttatgaaactacaaggttgcggtgcctgcagatggttgaagcaaaaatgagggaaggaacagtgtccacctcatcaaatgctgacgatcatgagctgctggccttggttttgtcatctggagtcctgcagagaatcgtgaccgaagtggaatactcaaaattgttctctcacatatgccatcttgtcggacatcttgctaggtcatcgcagaacgatctccttgtaaagtggaatgatgaagcgaatgcaccagggacatccaagacaaataaatctctactgtttgctagggtcttgtttcctagtttcatatctgaactggtgctcaggggccaatatctactggctggctttgtcatctccagatggatgcatacccacccatcccttggcctgatggatgtcgcggaggccagcgtgcgacgatacctgaatggtcagattgttcaagctcagcaattgggaggaaccgatgtttttcttactgacaatgaactgtctgtaagccatgctctctccactctacgatcaaacttggtttctcttgtgcaagctgcattggcaacccttccgaaccaagatttgtagatgtgcatcgaggttttgtgaatattttaactcaacacaggcaggtggtgtactatcagtgtaactgtaacataagctgttagctaggacaatattgcaaagtttaaactttttagggggggaaattattgcag

SEQ ID NO: 234 - DNA, 1578 bp, Oryza sativa
  ref <308>: DATABASE ACCESSION NUMBER: AK058391
  ref <309>: DATABASE ENTRY DATE: 2001-12-06
aaaaatcacgttacatgcttgggatatctagcaacaatagcaaaattaccaatctaaactccagcatagatagtgacaaaagtaatggaggaagtagcatatgttctgcaaatcagaagtcagctccgacaaaattcaaacaagaatcaaaacctcaggaacggccaaatactccatctcgcagtcctgctaagatagtttctgcaaaacaagaaattaacaaggacacacgcaagactagcgcttcttcacccagtcagaatggctcagctgtagtgaagaagcaaatgtcaaaggacagcaaaaaggagtctgcatctgaaaaaaactcaccaccaaagctttataagacttcaccaccaacaccaacaccaacaccaccaccgcctgcaatgacttcaccaccaaagctcaatttggcagcaaagcctaatggtacttccggtacagttacttctacgccgactgttaaacgaagagttactgaaactgtctcctgggactctcttccaacaagtctaatcaagtcagtaaaggttgttgcaaggaggaagactattgctcttgtagtagcagctgaggctcaaagggaggctactgcagcggcctcacttcttaaaggccttggaatattcgctgagatcagaaagtccgctgaggaggatccacatgctgcaattaccaagttttttcagctaaaccggcttatcattcagcaaagtgttttttggaaagattactcatcagagcctgtcaaagaatctcggccagagaaggaaaagccatcaaggaaagcctctgcatctcagaacaaagctgttgcaggtagtacggcaaagaactctgacgatgcttacacaagtgaaaagattgactgggccagagaggatggtttcaaggagatctccagatcatggattattctaaagaaagaatcacagtcatggtttctcagtttcttggaagatgctcttgaagctggattcaagttcgagggccaaaacaagaacaccagagaacgagtaagagggcactccaagggcggagacgggcaaatcgcggttcggttgtcgcaactgaaggagacgagtaactggctcgaccagttgcatagtgaggttgataaatctcaagatgctttggttgaaaccattgagcagctgaagcagaaggtgtacacctgcttacttgggactgtcgagactgcggcatcagcacttgaagccaggtagatgctgtcacaggagctcagggctggttgtgtttattttttggcttggaaccagctgaagggagtactctgctgtaacagaactgcaacacacaatatgatcgatcctgatgccaaggagagtgaaggaatcgatcatctaagttatttattccacttgtacaagatgacgtagggagtgattgaggtgtaaatagccgctgtgtgtgtgtgtgtgtccattttaagttatgcattaatttattcattttgggcagtggtcatgttgctgttgcgtgttggcaaatctccgatactcttcatgtttgctcaatacgaagtacaaatctgaaagctttgcaattttc

SEQ ID NO: 235 - DNA, 1096 bp, Oryza sativa
  ref <308>: DATABASE ACCESSION NUMBER: AK058392
  ref <309>: DATABASE ENTRY DATE: 2001-12-06
gtacttccagcttttattcgaaatggacagttagatgatgccctaagcaccttctatgagatgcttcaaacgagcacacgccccaatctgcggacatggagtctgttaataagcggcttgtctcgaaatggtatgcatcctgaggttatgaatctatgttgcaagatgcaagaagtagagccagcacctagtccaacaatattttctgcagcacttcttgctgttaaatctgcagcttcagtacagtatggaaaagcaatgcacgcatgcattgttaagaagggcctattattgtcgaaatctgtggtgcagtcgctgctaaacatgtatggtagcttcaatgatagaggcacagtagagagtttgctaagatttcttgctgctgcacagtaaataatttcagggcgtcaagaatgtggtgctagtaaaataggacatacaggtttacaggttacagctgtacataaatacatggcgtttgcacatatgaattcacattcataatacaattcctattttgagtgatggagtatggactaaatcagagtggtcatgaaacaaagatacgtcataccagtttgatacgaaataacatctcttacatgattgtattaaccttgcagatacattacagagtatgcatctattgttgggaggcattattcctaaaatcagaaggttctgataaaagaaccaatcaccttaaagggctgaaaccagcgagtaaacagtgtttctgtggccacatgactctctttgagacctacagctagtcagctacaagtggttgaataatttcaagaaaagcataactgttttagtcactgtaacgatgaatatgataacatgctgacagatgtgctgcagttctgttgtcatccaattgttcggttttgaattaggatcgctactctgtgctggccctttttcggatactgtcaaagaacaatgtccagatgttatgggcaacttattatcattatataggtcattacttcttttcacactgcaaacaaaagtgtaactgtatattcctcctgtaaagtgtcaactcattgtacatatctttctgaacaactatacacagcacttttcc

SEQ ID NO: 236 - DNA, 1419 bp, Oryza sativa
  ref <308>: DATABASE ACCESSION NUMBER: AK058393
  ref <309>: DATABASE ENTRY DATE: 2001-12-06
agttaagccgcgatagaggagggagggatagcgtagagggagagggaacaggggagggtggcgagctcctgaccatctctctccgccctctccgtttcgccgctcctcgccggatccatctccaaaagaggacgtcggagaagatgatgggcggattcctctcccgggtcctcctgttggcctttggctacgcctatccagcatatgagtgctacaagactgtcgaactgaataaaccagagattgagcagctcatattttggtgtcagtattggattctagtagctctgatgacggttatggagagatttggagattttacaatatcatggctaccattttactcggaagcaaagctgatgttctttatatacttgtggtaccctaagacaaagggaactacctacatttatgggactttctttaggccatatatttcacagcatgagaatgaaattgaccgtaatttgcttgagttgagagctcgagccaccgatgtagttgtcctttattttcaaaaggctgctactgtaggacagaatacattctttggcgttttgaagtatgttgcttcgcaatcaccatctcagaggtcaagtcaacaaccttctcaggagccgcaacaaccaaaacaacagcaggcaccagtacagcagcagccgacacaaaaacaagcaccaactgttttgcgcagatcagcatctattgctgctcggcaagctgcaatggcacagcagtctcaggatgccaagacggttccatcttcccccaagatcaagcgccaagcatcaacaaaagctgcacctgtggcatcaacaaagttgaccggagctgcagctccgtcaacaccaaaatctgatgccgacgcaccaaagaaaaatgaggcggcgccagcttccttgcaagtggcaactccagcaacaaaggccgatgtaccagcatctgaacctagtgctccactccctgaagccgaagaagctgacaagatggccattgacgaggctgatgatgccgtagagggcacagaagagggtgatcctgttccaggtgagacagtagaggagagaccaatggaggagacgatccgtgtgactcgctccaagctaaggaggcgtactgcttctgaggatcctgcaggaaattaacagcaatccattctttttgttgcatgttgtgctgttcattttctttttaagttttagattgtcatgttgtttggtgcatgtgggaaatgtgttggtctaattgatcgttctgttgcccaagagtttgtcatctcgttttctgtgttgctagcatgtttgtgtgcttggaagttgtaaatagcaccgtgcatgtatgtatatatcaattggtggcatggcgaggaatgcctgtatcttgaaacattagacatttcaatcaggtcattacatgagc

SEQ ID NO: 237 - DNA, 508 bp, Oryza sativa
  ref <308>: DATABASE ACCESSION NUMBER: AK058394
  ref <309>: DATABASE ENTRY DATE: 2001-12-06
atagggagggagagacagacatgatgaacggaaggggaggctacgccggtaaggcctcaagggggcgtcgggtcagcgcctcagcggacggcaggcggtggtgccaacggagggcacgacgcggagaattctggtccaagtcaacgtagaggccgtggagattccatggccgacgacgtagccgagcagatgagagatggcatgaagaggtagcagtcgtcgtcggtgaggactttggggacggcggcggctgcggcctgtagatccaaccatcgacatggtggatgtaggtgccatgttgctcttggtggcaagacggcggcagcccatggatccggtcgtcggccagtgatgcggaggaaggaggagtcaggggctcgatcaatctctttggcatttgtttctctcctcaatctgtgatgtgtttgcttgtgtttttgcttggtgaagtcatgatttgttcagaggttggatgttttggagataattttaggatttgtttgtatgc

SEQ ID NO: 238 - DNA, 1566 bp, Oryza sativa
  ref <308>: DATABASE ACCESSION NUMBER: AK058395
  ref <309>: DATABASE ENTRY DATE: 2001-12-06
agaaaggcgttcctcaccatctcctgagcgtgattgatccctctgtggagttcacttgccgcgatttccgcgaccatgctgtgccgattatagaaggtatattggatcgtggcggcctccctgttattgttggtggtacaaacttctacatccaggctcttgttagcccattcctctttgatgatatggcacaggatattgagggtcttactttaaatgaccacctagatgggatagggcttgataatgatgatgaagccggtctgtatgaacatttgaagaagattgatcctgttgctgcacaaaggatacacccgaacaaccatcgaaaaataaaacgctaccttgagttgtatgaatccacaggtgccctacctagtgatcttttccaagggcaagccacagaggtctccatgatgataacctgaagggcttattggatgaagcagtctcacaactaaaagcaaacactcgcagacttgttcgacgtcaaagacgaaggctgcatcggttgaataaatattttgagtggaacttgcgtcatattgatgcaacagaagctttctatagtgccactgctgactcatgggacatgaaagttgtgaaaccttgcgtggatattgttagagatttcttgtctgatgatacaattttggcaagcagagatggttctagtgtaactggaagccctaggatgtcttcaagagagttgtggactcaatatgtttgtgaggcctgtgataaccgggtacttcggggaacgcatgagtgggagcaacacaagcaaggccgatgccaccgtaaaagagtacaacgtttgaaacagaaggctagtacagtgatatcattataggcaattagcactgtttgcactctcggtgttcatgaacctttcttcattctctgcaactgtccccatgcatcctgtttgtcaaattggctgaagactacaccattcagaaggtagcaagcagcagatatatttgttaatagtaccttgctagattcttgtgccagttccaaacatccaatgcagagaatacaaactctacagattggtcagcacaagcacgtccgattgagcagcatctacactgatgaccagttggagtttctccaatctgctgatcatttctagactagttttcccattaaggacaccataaattgggtaggcggtccagcttgttagcaaagtggtgatagtgattagcaattaagcatgacattgacccatcgaatatttgcatatcttggtcttccagattgcatgatttttccttcatatgtgactggaaacagtggggccatgctaggttacataaattcctgggcgtgatacactgcgaatagtagctatcatgtttactactgtcgtgttgagactactgtacagtagctcgtatgtatttctcgtatgtttgtgcataagtgaggggtcgatgagagtgacttactagacttttctcatcctaaattcctaataactagaaaagatgaccgaaattgggaaggcgacttgtgcctcttttggaatgatcgaaatatagaggaactttcatgttg

SEQ ID NO: 239 - DNA, 833 bp, Oryza sativa
  ref <308>: DATABASE ACCESSION NUMBER: AK058396
  ref <309>: DATABASE ENTRY DATE: 2001-12-06
atcccccgagcaagcaaagcggaggaacgcgatggcgtcggcgctgctgaggaaggcgacggtaggcggctccgcggcggcggcggcggcgaggtgggcttccagggggctcgcgtcggtgggctccggctccgacatcgtctcggcggcgcccggcgtgtcgctgcagaaggcccgctcctgggacgagggcgtcgccaccaacttctccaccacccctctcaaggacatcttccatgggaagaaagtggtcatcttcggcctgcctggtgcatacacaggagtctgttcacaggcacacgtccctagttataaaaataacattgacaagttgaaagcaaaaggggttgactctgttatctgtgtctctgtgaatgacccttatgccctgaatggatgggcagaaaagctacaggcaaaagatgctattgaattttatggtgattttgatgggagtttccacaaaagcttggatttggaagtagacctctctgctgctttgcttggccgccgttcccacaggtggtcagcctttgttgacgatgggaagatcaaggctttcaatgttgaggtagctccttctgacttcaaggtttctggtgccgaggtgatcttggaccaaatctgatccgagtaacgaaattctgtcgttgtttgttttctcatgcagcatgcatgcttttgctgtagtaaataaacgaaaactcgactactcgagtatccatgtaaagatgtttgtagtctgccttgctacgcccagaatatttgttttcctgttacaaatcagcttgccgggcaacatgtttgtcagcattgacgtgagctctaacttc

SEQ ID NO: 240 - DNA, 1772 bp, Oryza sativa
  ref <308>: DATABASE ACCESSION NUMBER: AK058397
  ref <309>: DATABASE ENTRY DATE: 2001-12-06
aagagaaggccctcgtgccgctcagccccagggcggcacgggcggcgaccagacgagcgcgccgccgccaacctcttcctcttctcccctccaccttgccgccgctcgagcgcccgccggcaaagccggggggacgcaatgacagcggcggcgaggctccctacctcctctcgcaggcgcggcggctggggcgatgccatgaccggagagaggtctcgcgggtgcagcggtcgccggcggccagatccggcgtcggtaggaccggatccggtccccacacggctggatcgggcgtctcagccggtggcgacaggaaggaggcgcacgctcaacgaggagcgcggaagaggcggcggaagtggcgacgtgcgaggaggacgacgttcgcgcgcaggccggtgacgctcccgtcaccggcggcccaggttcccgtccagatccgggccgggcgaggcgctgggaggtggcggctagcggcgggggagaggttaacgtcggggctggagagggtgcgaagaccggtggcaggcaggggtggcttcgcggtgggcagcagcggcttgcgccgaggtcgcggtgttgacgggaggtcagcaacggggctggagacgacgcggagatggtggcaggcaggggcggcgtcacggtgggcgggcagcggcggctcgctcgcgccggtcgcggcgtcggcgtcggcgtccgtccgcgcggggtcacagcggtggcgatagaggctgtggcggcgtggtggttgcgacgacgacggagctgcagcggcgcggatgtcgagccggcttgcgccgccctggctggatctggccgtccgcgaccagttccgtcgcctccgcgccggagggcctgtctttgccgttatggtcgaggtatgaatgcttgtgagacgtcatggactattctgtggccgtcattgtgggggtgcttgtgtgggtgatacgaagacgtcggcgaaagccttgccgtgcctttggccggttcgacgacgacggcgcccgtgggcgccgttttccttcttggaggcgttgtcatggcgtttctttcatatcccccacaaatctccaggtgaaaaccttgttccggcttcggacgagcggcggcggcggagttacgacgtcgtgtcctcctttggggcgtcgcttcggagaagttccaacacattgacgactgttgatggtccttttcggttcaaaagctctcatacattgtgttcggcgaggccttcgccttcttgggtccgctttgtttctcgtggtgggtgtcacgctctttggttgcttctgcagatgaagtcggagctactcgctgatggggtgcggtgacgcctggcaacgatgacatgttgcagtctcttcctaggagttgtggtgctggccgtgtaaaggaagtggctcctcggtggcttggctgatgtccattgttggatgtcggagctgctttttgctttggcgactttcatggctttagtgtcgctgtggttgtgaagtcggcgctgctgggtcgcttgggcggctagctcggcaacgataacacctcttctgcggtgtgggagctgttgggtggcttttgtgtttagcttggcgacgacgtcctgcatttgggctccgccatcatggttagtagtgtagcggtgggttttagccggttttcctgtaattaaccatgcggatgtatggttttcgggtccggttatccttataaactgggtcaattctcttcttctaaatataaaagtggaacgaagttccgccttatgtttc

SEQ ID NO: 241 - DNA, 1639 bp, Oryza sativa
  ref <308>: DATABASE ACCESSION NUMBER: AK103957
  ref <309>: DATABASE ENTRY DATE: 2002-08-28
ccgatcgagatcgagatgctcccctcaacggcaatggcgttccatgtcttcctcatcgctgcgctgctgttgctgcctctccccgccgccttctccaaggccgtgcgcacccaatcccttctcgccaacccgctctccccggatcctatcactcaggagcagcagctcagcctcgccgcgccccgcaccaacgcctccacgctccacttccgcctcgcccaccgcgagcacttcgcgctcaacgccaccgcctccgatctgctcgcgcacctcctcgcccgggacgccgcgcgcgccgccgccctgcttgctgcacccaacaatgccacgcgcccgcgccgccgcggcggcttcgcggcgcccctgctgtccggcctcccgcaggggagcggggagtacttcgcccaggtcggggtcggcacgcccgccaccaccgcgctcatggtgctcgacaccggcagcgacgtcgtctggctccagtgcgcgccctgccgccactgctacgcgcagtccggcagggtcttcgacccgcgccgctcccgctcctacgccgcggtggactgcgtcgcgcccatctgccgccgcctcgattccgccggctgcgacaggcgccgcaactcctgcctctaccaggtagcctacggcgacggctctgtcaccgccggggacttcgcctccgagacgctcaccttcgcgcggggcgcccgcgtgcagcgggtggccatcgggtgcggccacgacaacgaggggctcttcatcgccgcgtcgggactcctcggcctcggccgtggcaggctgtcgttcccctcccagatcgcccgcagcttcggccggagcttctcctactgcctcgtggaccggacctcgtcggtgaggccctcctccacccgctcctccaccgtaacgttcggcgccggcgcggtggcggcagcggcgggcgcgtccttcacgccgatggggaggaaccccaggatggcgacgttctactacgtgcacctcctgggcttcagcgtgggcggcgcgcgcgtgaagggcgtgtcccagtccgacctccggctgaacccgaccaccgggcgcggcggcgtcatcctggactccggcacgtcggtgacacggcttgccaggcccgtgtacgaggccgtgcgcgacgcgttccgcgcggcggcggtggggctccgtgtgtcgccgggcgggttctcgctgttcgacacgtgctacaacctgagcgggcggagggtggtgaaggtgccgacggtgtcgatgcacctggcgggcggcgcgtcggtggcgctgccgccggagaactacctgatcccggtgggcacgagcgggacgttctgcttcgcgatggcgggaacggacggcggcgtctccatcatcggcaacatacagcagcaggggttccgggtggtgttcgacggcgacgcccagcgcgtaggcttcgtgccaaagagctgttaattacagtactccactacggagtattagtattactaagcaagggtgttaaaatcgaactctctttttttttttcctttttgtgaatcgattcactgcttaatttgtactatcgggtatcgttaatttgttaatcaaagcctcctatgcctttggattttggcaggagggagctgcatgt

SEQ ID NO: 242 - DNA, 430 bp, Oryza sativa
  ref <308>: DATABASE ACCESSION NUMBER: AK058398
  ref <309>: DATABASE ENTRY DATE: 2001-12-06
gaatggatggtacaattttttttcatacatcgaattcgggccctatgtgagtcagcgaacttctttaactaaatcaaccatatcgaagtgaagtacctggcatgcaccgcgcgagacaggatggatgggtacttcaactttggagcgatgtgcaacgtcatggggtatgctgactcatggaaagacggggaaggaaggagaaactaaccaaaaaaaatactggactaacaagcttcttgtatatctatctcactatctgtatttagtactctgtataatgagacgggtatccgccatatagtcgtcggtgtatgtattgaccgacctagtttttgtttcgactctactttcattgtttcggctaacttcgcgaatctgttggtgtttgtaaatgccggtttttccataaagaagagctctgtttgtttcc

SEQ ID NO: 243 - DNA, 284 bp, Oryza sativa
  ref <308>: DATABASE ACCESSION NUMBER: AK058399
  ref <309>: DATABASE ENTRY DATE: 2001-12-06
aaaaaagcgcaatctagagcacctttgacgaccactatcattgataacaagaaattgtactcctgctgctagaatcttccaaccatcccccttttctttcaatcttgcctgatgaagagctgttgaaactttcatagtcaatagaatcataacaacataagcaattcggtgagttcggaagcgcatgtgaactgttgtccctttacctggggcttcgaagttcagagacgagatatggttattgtttcagatgggagtgtgcttgaatgcgattttcttttgcc

SEQ ID NO: 244 - DNA, 644 bp, Oryza sativa
  ref <308>: DATABASE ACCESSION NUMBER: AK058400
  ref <309>: DATABASE ENTRY DATE: 2001-12-06
taaatgacactgcaatgatgtggggtgtcaagtactacaacgacctgcttatggtggctgggccagatggaaatgtccaatccgagcttctattccggaaggaccggtcaaccttcacctttgacaagggttgggcttttccaaggcgcatatacttcaatggcgaaagttgtgtcatgccttcaccagatctgtacccatggttacccccctcttctactcctagatttaggactgtattccttctcatgtcattcctggtttgtggaacattagcattcttgcacaaccacctagttttagacaaaaactgtggaaagtgctgaccacattgggcattggctgttgacatactgagtcttttggaagtttagggtgtgctcttgcatgaaaagctaattcgcgtttgatttaggttgtaagtttaggttcctcgaaatcattaaagtttgggttgtacattctgatggtgtgtattcttggtctgaagtgtgaagactaattgagaaccccaagtcccaacattaattgtctagagaaatgtttgccatctcatctgattgcaagaaattgcattttgtagttggtcagtaaatgtggaaattgtttcttttttcctctcaattcaaggtcaatacctgcat

SEQ ID NO: 245 - DNA, 1686 bp, Oryza sativa
  ref <308>: DATABASE ACCESSION NUMBER: AK058401
  ref <309>: DATABASE ENTRY DATE: 2001-12-06
tgcgacttcaccgacgcggagccgattccgaaggaggtagcagtggaggaggcagcaggaagcgccgccaatccctcgcagaattctgatgggaatgtgcaacagaataaggacggctccatcaaacttgtccatgaagcaaatcccagtgaaaattgtgtcactgacggcgatcataagcaccaagaaagtgatgcaatgttggagtcgccaccagcagaggaggatgagaaggaatcgccaaaatccttcgagtttgtcccttccaatgcaaaatcagatgttgcttctagcacaccgaagattcagaggcctccacccgtcaaagctgtcactacggtgcctacctgtcccaagctgacagtgaagacagaagccttcactccgaaggtgcaggcaacgaactcctccagaggtcttgcacccttgactggctcaagggcacatccatctgctttgaagcagtcgatgagcgtcaagaggagtgtgatcaaatgccctcgtgagttgctggctgggaaggccgctactgctgcgaatgaaatcgcacaagaaaatcaagctgtcaagagacagaagcttgatgatgggaggacaagacagatactgaacgtgaagacaaggaccctgcctcacaaggggagaggaggtggtctagcaggaagcaccgagatgagcctgtcggccatgaggaagcaccgtgacgattcacactctctcaaggaagtgactcactatatatcggcagcagagatggtaaagaagttcgagtctgggactagagagttggccatccctcacaacagatcgctttctcatgaggatgcagcaaccgcattacaaagaagaacaaagctgatgctaacaaggccaaaggaacctgagttccagacctcccacagggtccgtgctgtcagagtgaaaagctctgctgagctagaggaggagatgctagccaaaattccgaagttcagagcacggccgtttaacaaaaaaattgcggaggccccttcatttcctcctcttccaaggaaagctccacagcttcctgaatttaatgagtttcatcttaaaacgatctgatgctttcaaggccgaagaatcaacaatgtgatgtgactactgatgttgtaggacttgatcagctggattgctgaaatcccaacttaccatcatgaaatcctctggattgctccttaatttcttcgtctacttccaaacattagcagaaacaaacgcagattactcaacatgttcttttactggcactcgacatttgagtaatcctctggatctctttagtgctgacatggtttggaattcacaccaccatataataggattgaaccatgctatctgtgagactctgaacagccttgttagattgcacgagagcacaagtgctgtggttgttcccacgagaatgcgatgttgcaaattcgatcggtttgtgtatgaatacgatgtaatgtaggtatgtagcacatgctcgtatggttctctgagtgtactatgttagtcatgagcgaagtgagggaattccttcagattggaacccttaggagagagagagagaaggtattatgaaatgtaatcagatctttgacgatccagtattagctagcaagtatatggactcagactttgatgattacctagtgtatgtattagcttcaccctttgaac

SEQ ID NO: 246 - DNA, 1736 bp, Oryza sativa
  ref <308>: DATABASE ACCESSION NUMBER: AK058402
  ref <309>: DATABASE ENTRY DATE: 2001-12-06
tgcttctgccaaagagattgatgacaaagatcactggtaccggttgggaatcgaggccctgaggcagggaaacgttggtattgtggaatatgcgtaccaacgtacaaagaattttgagaggcttgctttcctatatcttattactggttacatggacaaggtggggttcatgtgcaaaattgctggacagaacaataacctgatgggtcaattccacaatgctctgtatcttggtgatgctatgaagagagttgagatcctagagaatgctggacagctacctcttgcttatattactgctgccacccatggactcacagaaattgctgataggcttgctgctgaattgggtgaaaatattccttctctacctgaaggaaaaactcgctctcttttgatcccccctgcacctctcacagccagtggtgattggccattgcttagggtgatgcgtggtatctttgagggtggactggatgctactgggaaggctgaacttgaggaagacgatgaagctgctggtgctgactggggtgatgaggacctggatatggttgatgcaagcgaagcgatggcgaatggtggtgatggttttgatgctgaggagggtgaagcaaatgaggaggatggtgaggaaggtggctgggacctagaagacctggaacttccgcctgaagcagagacccctaaaaacgccggtaatgcactctcagtggtctttgttgctcctcctccaggcatgcctgtcagccagatttggactcagaaatcttctcttgctggggagcacgcagcagcaggaaactttgacactgcaatgagattgcttagccgtcaattgggcatcaaaaactttgctcctctcaagcccctatttctcgatctgcacatgggcagccactcatatcttcgtgcacttgcaactgcccccattattccggttgctgttgagaaaggttggagtgagtctgcaagtcctaatgtgagaggccctcctgcacttgttttcaccttctcacaaatggaagacagactcaaggctgcctacaaggccaccacagaaggtaagttcccagaagccctgaggcagttccttaacatcttgcataccatccctcttatcgtggtagactcgaggagggaagtggatgaagtgaaagagttgctatgggtttgtgctacaagcaaaagaactttgctactgcagagcactttgcaaggatgctgctggagaacaaccctaatgagagccaagcaaagagggcccgacaggtgcagcaacagtgcagtggaaagaaggatagctgtgagctgaactatgactacagaaatccatttgtcgtctgtggtgccacatatgttccaatttaccgtggccagaaggatgtttcctgcccgtactgtggatcccggtttgttccttccatcgaagggcagctttgtaccatatgtgagcttgctgtggttggtgcagatgcttcaggcctcctctgctcccctacgcagttgagataagtggcgctaggtaaaactcccttatattctttcttgtctctcaacactttgctatgatatattttaccatgatctgtactgattgtaaggaaataagtattatacatggttgagtttttatttcactttctccccatttcccttcttgatttttgtttactgttgttacacttgatatatgctacttgatatatgctcaaggactttttgatcagctcatg

SEQ ID NO: 247 - DNA, 1070 bp, Oryza sativa
  ref <308>: DATABASE ACCESSION NUMBER: AK058403
  ref <309>: DATABASE ENTRY DATE: 2001-12-06
gtaggatggtaaatgcaagaagccaaagcggaagtataaggctgtactattgggcttttcacagatcaagaggctagatctctttctcatctgtggccaaaaacattcaagatgaaacctccagaagggcaagatattggactgtgcttcattagttctcttcaaagaccaaacgggagttctgaccatctcctgaaaaatatttctttgcatattgggttacgaaccaaggctggtgctactaggaaaatgtaataagttttacttttggggtgttttcggagagctgcacagatactataatcaaacaggtaatgttaagattggcaataccgactcgtgagacaaatttgaagatattggcatgaacttggacttgacaaatggcaaagagttaaacagaggcaaatgtgggagttaaaagagaggcaaatgtggggttgaggtgtcatttgagaggcacaaatgtaaggaaactggcaagattttggagacacaagacaaagaaacatagaagggaaaatgtggggagattagtaataaattggatgtggcagttagcaggtaaagagataggatcaacaaatgtatgaaaatgctgaagactcctgatccaaatgctgcggcaagctctttaggatggtaacagcaaagaagctgaagggcaaggatgaggctgtactgttgagctcttggcaactcaagtaaaaggggtagaaggctcggatgattcaggtgctgctgttcattgtcggaataaacactgcgccaactggtcttcgggccttgtcttctggctctgatgcaaggatcgtacgccgttgttacactgagagtttccattatactggcctgccatccccgcaatgaagcaggtccttatgaggttgtgtgcagcctagatttacctgtgtattaagatagttgcatcctcatggcttcatgagtaactgtgcatcccattgctaaatcttgttgctagatggttgcatatttgattatatgtttttatatttattgatattctgatgtttaggaagttttttaccattggagtgggtttatgtatt

SEQ ID NO: 248 - DNA, 1709 bp, Oryza sativa
  ref <308>: DATABASE ACCESSION NUMBER: AK058404
  ref <309>: DATABASE ENTRY DATE: 2001-12-06
agcgtgggagtactacactgcactgcatcgcgcaaccaaccaaccacccaccacaacacaaccctcctctcctcatcatcactcgctcgctcgctctcgcgctttgcggcaactggcggtgtctcctagcccttgcctgccatggtgtcgctagccggctcccagatcccgtcgccggggcagagtccgtgcgcggcggcgcggtcgcagcgccgcggcgcggggtactccatgcggaccatccggtcggcgctgctgcagccggactcctgcccgggctcgccgcatgtggcggccgcgtacgacgcggcgggggcggactcggacatggagaacttgacggactccgtgattgatttccatctcagcgagctggcggccaccgcggggcccgcgcaccccgcggcggtggccaagtcgtcgtcggccaacgcggcggccacggagatgctcgagctctcgcgggacttcagtgactactcgagcttcaactcggatatctccggcgagctcgagcggctcgcggcggcggcggcggcggtggtgacgcccagatccgacgcgccgcaggtgggcgccgtggatctgaatgagcttgagtcgatggatctgtccgtcgaggcggcgccgctggagcgcgtggagccgttcgtgctggcgtgcgtgcgggcgctggggcccgacgccgcgccagacgcgcggcgcaccgcggcggcgaggataaggctgctggcgaagcacaggtcggacatccgcgagctgatcggcgtgtccggcgccatcccggcgctggtgccgctgctgcggagcaccgacccggtggcgcaggagagcgcggtgacggcgctgctcaacctctcgctcgaggagcggaaccggtcggccatcacggcggcgggggccatcaagccgctcgtgtacgcgctgcggacgggcaccgcgtcggccaagcagaacgccgcgtgcgcgctgctcagcctctcgggcatcgaggagaaccgcgccaccatcggcgcgtgcggcgccatccctcccctcgtcgcgctactctccgcgggctccacccgcggcaagaaggacgcgctcaccacgctctaccggctctgctcggcgcgccggaacaaggagcgcgcggtcagcgccggcgccgtcgtgccgctcatccacctcgtcggcgagcgtggcagcgggacgtcggagaaggcaatggtggttctcgccagcctcgcgggcatcgtcgagggccgcgacgccgtggtggaggctggcgggataccggcgcttgtcgagaccatcgaggacggcccggcgagggagagggagttcgccgtggtggcgctgctgcagctctgctccgagtgcccccgcaaccgcgcgcttcttgtccgtgagggcgccatcccaccgcttgtcgcgctctcgcagtccggctctgcccgtgccaagcacaaggctgaaactttgcttgggtatctccgcgagcaacggcaaggaggtggtggctgcagggttgaacccgtggcagcttcgagcttggccaggtaatgctgtaatcatgtggtcgcagtatgcttcgctcttatttaacctcgtgtgctctgttcttggagaatggagtagctgtgtaaggaggggtagagatgatcatctgtaaataacggttgatggctttggtttggtaatgtgaatacaaatgtggtttgcgagtg

SEQ ID NO: 249 - DNA, 1819 bp, Oryza sativa
  ref <308>: DATABASE ACCESSION NUMBER: AK058405
  ref <309>: DATABASE ENTRY DATE: 2001-12-06
tctctctctctctctctctctctctcccgtgtccgcaaccgcaaatccccatttggtctcacctaaaaccctagctcgctcacccatggctccgaagaagcgaaaggcggatccggcggagtccccggtagcctcgtcggaggccggcgccggcaccaaccaccaccaggagacgccctcctcggagctcaagccccgggggaccatctacttccccatcaccgacgaccccccggagccgagcgcagagggcggcgccgagggggaggacggcgccggaggggacgacgatgaggaggacatcgcgaagctgctcgagcccctgtcgcgggagcagctggtggcgctgctccgcacggccgcggagactacccccgcgacgatggcggccgtgcggcgcgcggcggaggccgaccccgcgagcaggaagctcttcgtccacggcctcggctggggcgccggagccgacgacctccgctccgcgttctcccgcttcggcgagctcgaggactgccgtgtcatctccgacaagcaatctggcagatctaagggctacggcttcgtcctcttccgctcccgccgctccgcgctccgcgccctccgccgcccccagctccaaatcggcggccgccttgctttctgccatctcgctgcctcgggtcctgcccctccgacctcccagtcccagaaccctagctccaacaccaacgccaactccggtgcggccaataacgctggttctgcgtcgtcttcacaacctgacaacatgcaacgcaaaatctttgttggtaacgtgcatgctgatgtcgatgttgaccgcctgtatgagtacttctcgcaatttggtgagattgaggaggggccattgggatttgacaagaccactggcaagcctaaggggtttgcgctgttcgtctacaagtcagtggagagcgcccgccgtgcgctggaggagccaacaaggaactttgatggcaaaatgctcaatgtgcagaaggctatagatggcaggaccaagaacacacctgggatgaatgcaaattctaaccctagtggtaccgctgcctcggcagcagctgctgctgcagctgcacagatgactgctcctgctactgctgcaattacaccgtatgatgcatcagcttatggtgctactgccgttcctgacttgggttatgcgcagcaagcggctatgttgggattgggtgcacagcagcaggcgtttgcacaacccaatgctgcaatgcttgccatgatggcagcagctatgcaaaacccagctatgctcgcaacgctgaaccctgcttttgctgctgctgcattgggtgctgggggccagcaggtgcacgcggctggtattccaggttttggagctcagggttttgggacacagggctttgcagcaggtgccgccgcttttccaaatgcagcgggtgttcaagctcctcctggttttcagggtccgcctgggttccagacttctgctgggtttcaggttggccaagcagcttcacaagcgggtactgctgcggctgctgccgccggtgctgctggttatcaggctgctgctgctgggcagggccaagtgcccggaacgcaaattgggggtgctggttttcagggtggattttgaaatcactaggtataacaattcacatcctgcttaatcgcttcaagtcctcatttaccactaatgatttgagttagcttatcctccaaatattattcgcaacttggtgatttgggctaaaaatttctgattgtttctctatatcttagtttggcatctgctggtcgtgattcgttcgtgtggttttgc

SEQ ID NO: 250 - DNA, 1207 bp, Oryza sativa
  ref <308>: DATABASE ACCESSION NUMBER: AK058406
  ref <309>: DATABASE ENTRY DATE: 2001-12-06
atcgggagctccaagtgggccatttttggtaagcagaactggcgatgcgggatgaaccggaagcctggttacggtgccgaactgcgcgctaacctagaacccacaaagggtgttggtcgattaagacagcaggacggtggtcatggaagtcgaaatccgctaaggagtgtgtaacaactcacctgccgaatcaactagccccgaaaatggatggcgctgaagcgcgcgacccacaccaggccatctgggcgagcgccatgccccgatgagtaggagggcgcggcggccgccgcaaaacccggggcgcgagcccgggcggagcggccgtcggtgcagatcttggtggtagtagcaaatattcaaatgagaactttgaaggccgaagaggagaaaggttccatgtgaacggcacttgcacatgggtaagccgatcctaagggacggggtaaccccggcagagagcgcgaccacgcgcgtgccccgaaagggaatcgggttaagatttcccgagccgggacgtggcggttgacggcgacgttaggaagtccggagacgccggcgggggcctcgggaagagttatcttttctgcttaacggcccgccaaccctggaaacggttcagccggaggtagggtccagcggccggaagagcaccgcacgtcgcgcggtgtccggtgcgcccccggcggcccttgaaaatccggaggaccgagtaccgtccacgcccggtcgtactcataaccgcatcaggtctccaaggtgaacagcctctggccaatggaacaatgtaggcaagggaagtcggcaaaacggatccgtaacttcgggaaaaggattggctctgagggctgggctcgggggtcccggccccgaacccgtcggctgccggcggactgctcgagctgctcgcgcggcgagagcgggccgccgcgtgccggccgggggacggaccgggaacggccccctcgggggccttccccgggcgtcgaacagccgactcagaactggtacggacaaggggaatccgactgtttaattaaaacaaagcattgcgatggtcctcgcggatgctgacgcaatgtgatttctgcccagtgctctgaatgtcaaagtgaagaaattcaaccaagcgcgggtaaacggcgggagtaactatgactctcttaaggtagccaaatgcctcgtcatctaattagtgacgcgcatg

SEQ ID NO: 251 - DNA, 1426 bp, Oryza sativa
  ref <308>: DATABASE ACCESSION NUMBER: AK058407
  ref <309>: DATABASE ENTRY DATE: 2001-12-06
ttgtatcaggaaatagactatacaaaggaagcatttaacgctgaaaaattttctgaaaacttcaaaaatatggattatgtgaaggttccagagattttgtgggagtatactacacctcaggtcttaacaatggaatacgtcccaggaatcaagataaataggataaagcagctagataagttaggagttgatcggaaaaggttaggtcggtatgctgttgagtcgtacctggagcagatcttatctcatggatttttccatgcagatccgcatccaggaaatattgctgttgatgatgtcaacggtgggaggcttatcttctacgactttggaatgatgggaagcattagtccaaatatccgggaagggttgctcgaagcattctatggagtttatgaaaaagatcctgataaagtgcttcaatcaatgattcaaatgggtgtccttgttcctactggagatatgacggctgtcagaagaacagctcaatttttccttgatagcttcgaagagcgtttagcagcacaaaggaaagaaagagagatggcgactgaggaacttggatttaagaagcaattaactaaggaggagaagtttgaaaagaagaagcaaaggcttgctgctatcggagaggatcttttgtcaattgctgctgatcaaccatttcgatttcctgccacctttacttttgtggtcagagcattctcagtactagatggtatcgggaagggccttgatcctagatttgatatcacagagattgctaaaccatatgctatggagttgcttagatttaatgaagctggagttgaagttattgtaaaggatgcgaggaagagatgggaaaggcagtcccgtgcattctacaatttatttcgccagcccgacagagttgaaaagcttgcgcaaatcattgagcgtttggagcaaggtgatctcaagcttcgtgtcagaacattggagtcagaaagagcattccaaagagttgcagctgtacagaaaacaattggatatggagttgccgcaggtagtttggtaaacctcgccaccgttctctacctcaattcaatccggttgccagcgaccatagcatactctctctgcgcgttcttcggcctacaagtccttgtcggccttttgaaggtcaagaagttggatcaacaggagagactgataaccggcactgcttgagtccgggcataaactggtgagagctgacccgtgatttttttggtgtcatccacagcggctatatatcttccccgttttttgtttctttctgtccaaattttagatcccctacacgttgtagcatagccatcggtgtacgataactgtatatgtagatgcggtgaatagatgaaaatgtacatagtgtacaatagacattcactgaggtgttaaggtgcttttgtggttgcaattc

SEQ ID NO: 252 - DNA, 1315 bp, Oryza sativa
  ref <308>: DATABASE ACCESSION NUMBER: AK103958
  ref <309>: DATABASE ENTRY DATE: 2002-08-28
aagcaaaccagcagctactaagcaaagcacaaccaaagcttaagcttcctccaaatcctcacacaagaactcgctcttcttaaccctcccggattttctccgacgagatcgatggctcctccccagcttgccggcaagatgaccgccaaggccgccgcggcggtgaagcccgcgacgagggcgtacgtgacgttcctcgcgggcgacggtgactactggaagggcgttgtcgggctggccaagggccttcgcaaggtgggctcggcctacccgctggtggtcgccgtcctccccgacgtgccggagtcccaccgccgcatcctcatctcccagggctgcatcgtccgggagatcgagccggtgtacccgccggagaaccagacgcagttcgccatggcctactacgtcatcaactactccaagctccgcatctgggagttcgtggagtacgagaggatggtgtaccttgacgccgacatccaggtgttcgacaacatcgacgagctgctcgagctgcccaaggggcacttctacgcggtgatggactgcttctgcgagaagacgtggagccacaccccgcagtaccagatcggctactgccagcagtgccccgacaaggtggcgtggccgaccgccgagctcggcccgccgccggcgctctacttcaacgccggcatgttcgtgcacgaacccagcatggccaccgccaagtccctgctcgacactctgcgcgtcaccacgcccactcccttcgcggagcaggatttcctgaacatgttcttcagggagcagtacaagccgatcccactgatctacaaccttgtcctggccatgctctggaggcatccagagaacgtccagctcgagaaggtcaaggtcgtgcactactgcgcagcgggatcgaagccgtggaggtacacgggcaaggaggcgaacatggacagggaggacatcaagatgctggtcaagaagtggtgggacgtctacaacgacggcagcctggacttcaagggcctcccgcccatcgcggccgccgacgacgccgacgaggtcgaggcggcggccaagaagccgctgcgcgccgcgctggcggaggcccgcaccgtcaagtacgtcacggcgccatcggccgcgtgatcgtacggccactgtcgcttccctccggtgcccgggcgtccggctccggcggcgtacctctgcatcccgtatcttggtatttttttaggacgtccaatttgggatcagtatgttccttctagtacacttcacaaatgtaacgaggcttgtttagaatacgtatgctgtggattttgtg

SEQ ID NO: 253 - DNA, 1396 bp, Oryza sativa
  ref <308>: DATABASE ACCESSION NUMBER: AK103959
  ref <309>: DATABASE ENTRY DATE: 2002-08-28
gctgctttgagctccatcaccagctgagctgcgaggaagagagagtgcgagagtgcgcggcagcggcagtgtagtgtcagtcactgggtgtgcgcttgcttgcttggattgaggatgacgtcatcgatgtcgccggcgccggcgccggcgtacgcgcaggtgatggaggacatggagaaggggaaggagctggcggcgcagctgcaggggctcctccgcgactcgccggaggccggccgcttcgtcgaccagattctccacaccttctcccgggcgatgcgggcgctcgacaaggcggcggtctccgccgccggaggagaagggtcggaggtgcagagcgaggtcacctgcgggggcggggccagcgccggcgggaagaggaaagcccccgccgccgaccggaaggccaactgccgcaggaggacgcagcaatcgtccgggaattcggtggtcgtcaagaacctcgacgacggccaggcatggcgcaagtacgggcagaaggagatccaaaactccaagcacccaaaggcctacttccggtgcacgcacaagtacgaccagctgtgcacggcgcagcggcaggtgcagcgctgcgacgacgacccggcgagctacagggtcacctacatcggcgagcacacctgccgggacccggccaccgcccccatcatcgcggcgcacgtcatccaccaggtcgccgccggcgacaacgacgacggctgcggcggcctccaagcggggtcccgcctcatcagcttcgtcgccgcgccggcggcgccagtagacgctgccgcggcgccgacgaccagcacgatcaccacggtcaccgcgccgggcccgctgctgcagccgctcaaggtggagggcggcgtcggctcgtccgaccaggaggaggtgctgagcagcctcacgcccggcagctccgcggcgcgcggcggcggcggcggcggcggagtcgcgggtcccttcgggccggaccagggcgatgtcacgtcctccctgcactggagctacgacgccgtcgccggcatggagttcttcaagaacgacgaggttgtcttcgatctggacgacattatgggtttgagcttttgatcaccgaagaatcatggatggacacgggccgggtaaaacgatcgaaagaagatggattccacgcgtgtgtacagaaataattagcggcagcgcggatcttaatttggaacttgcaaagatactcctaattagcctggctagattagtttgtaaattccttgttgatgtgtcgtctcagctttaagctgcagacatgctagcaagtaacaacacgattagtacgtagtaatgtggttcttgattatgagctgggggtcttaaccttttttgtgtgacaagcaagagaagaggatttgggtac

SEQ ID NO: 254 - DNA, 1683 bp, Oryza sativa
  ref <308>: DATABASE ACCESSION NUMBER: AK058408
  ref <309>: DATABASE ENTRY DATE: 2001-12-06
aaaaaaaaaaaaaattttggtactcctcctactagagtagtagtagtaccactaccactagtaaacacactctcaccttcatcttcttctccttcctccatctcccaatctccccaagaacacctaatctaatctctctccctcctctctctctattgtccatcaatggagatgatgatgccatgatcaaatgatgagagaagaagaggagtagagtgggagggggtggggaggagagagagacgaaggaggaggatcgatgtacaagaaccagctgcaggagctggcgcagaggagctgcttcagcctgccgtcgtacgtgtgcacgagggaagggcccgaccacgcgccgcggttcaaggccaccgtcaccttcaatggcgagaccttcgacgggccatccaactgcaccacgctccggcaggccgagcacgccgccgccgaggtcgccctcgcccgcctctccctccgcggcccctcctcctccctcaccgcccgcgtgctcgatgagacgggggtgtacaagaatttgctgcaggagacggcgcacagggcggggctgaagctgccggtgtacacgacggtgaggtcggggcccgggcactcgccggtgttctcgtcgacggtggagctcgccgggatgagcttcgccggtgaccctgcgaagaccaagaagcacgccgagaagaacgccgccatggccgcatggtcctcgctcaagcagatgccggaggcgcgcaaggagcccggcggcggcggcggcgaggagcaggagcatgtggtcgtcgccagggtgctcgccgcgctgaagccgcgggacgattgcggcggcggcggtggcgaagggaaggcggcggcggcgtctctaccgaagaagcatctcgccggcgcgtcttgttcgtccgccacgtcgctgtacagacatcaatgggggcgtccgtcgccgccgccgccggcggccggacccaagatactgcctcccctgcacctgctgcagcagcagcaagcggcggcgtccggctcccgagccgccgccgccgagctggagcaagagcggaggaaggccgccgagctggtgcacatgctgcacgccgtcatgctgcgcgacagggcggccgacgcaatgccgccgccgatgccgtgctactacgcgccgtactaccaccacggcggcggcgtcgccccgacgaggcccttcgccggcgccgccgggttccacgcgccgccggcggtgagcgtccgttcagtgatcccggtctgcgccgcgccaccgtcgccgcggccgccgccgcgcaaggaggacgatccagcgacctcatccaagagggcgtagtagtagtaaaaactagtatccaatcaatcgcgcagcctgctccgatctgaagacgacgacgaggaagacgatgagagatcgatgggtagccatgaactctgcttcttgcaggggaattttgatcacaagtctccctgtatatctaaatcgttgcaaagtgatcagcatttcttcttcttctcatctctttgctgctgaaatcttcagaaaagaagcagaccatgaaggattgaagatagttgaatatagctcgatcgatcgatctcctagggcttcattagaagccatccatccatgctttgtcgcatgaaaaattttaagctcatgagaatgcacattacatttctttc

SEQ ID NO: 255 - DNA, 845 bp, Oryza sativa
  ref <308>: DATABASE ACCESSION NUMBER: AK058409
  ref <309>: DATABASE ENTRY DATE: 2001-12-06
gcaagaatgactcagtgatggccctttacaacctctccacggttacagataacctccagacgatcctttctgttcaacctatcccctctttgatagagttactgaagggtggaaagagatcatccaaaacagctgacaagtgttgtgccctcttggagtcattgctttccttcgatcaaggacgagcagctttgatttctgaggaaggtggagtgctcaccattgtggaggtacttgaggaagggtcccttcaaggtagggagcatgcggtgggagctctactaactatgtgcgagagtgatcgcaataaatatagagatatcattctaaacgagggggcaattcctggtcttcttgaactcacagtccatggtacacccaagtccagagtgaaggctcatgttcttcttgacttgctgcgcaactcgccatattcaagatcaaagctgccggcagacacactcgagaacattgtaagcaacattgcttcacagatagatggcgaggaccgcggtgggaaagctaagaagatgcttgctgagatggtgaaggttagcatggagcaaagcttgaggcatttgcagcgtcgagcttcttttgcatgatcaggtgattggcacattttgcaatggaagtagacatagtggaaataatgagtttgctggtgatgccggtccaggccttgacaggaccgagtgactggtttgagcgctcatatacttaagctgttgaagtagtagttccttttccatttcaatcttgtgtgttctgaacaagaacatttttttcttctgtttctcatgtgcccttcctgcactttgtgcatgaaagaccccaaaaaaagc

SEQ ID NO: 256 - DNA, 852 bp, Oryza sativa
  ref <308>: DATABASE ACCESSION NUMBER: AK058410
  ref <309>: DATABASE ENTRY DATE: 2001-12-06
atgtcattgctcatcacaagtatctccatccattcatccagttaattaattagctaagctagctttgccggagactgaagagaatttgttggttaattagagtgaggatttcgttgggatcgatggaggggaggattagcagtgcaacgctggtggtggcagcggtgttggcgatgctggtgctggtgccggcggcggcgcgcgccgagcggttcgttgtcggcgacgcggcgcggtggacgtggggttacaactacaccgactgggtcatcaagaagggccccttcttccaaaacgacagccttgtgttcatgtacgacccgccgaacgcgacgacgcacgcgcacagcgtgtacatgatgcggaacgcggcggactaccagtcgtgcaacctcaaggcggcgaagctggtggccaacgtgatgcagggcgccgggtcgggctacgagttcgtcctccggaagcgcaagccccactacttcgtctgcggcgagcgcggcggcatccactgcaccatgggccagatgaagttcatcgtcaagcccaagagctccgcctgccgcgacgactgacccggcccccgcccacccctctccgccgccggccgccggccgccgccaccgagatgttgggttggtcgccgccggccatggtgcggctgctagcctacgtcgatcttcttcttcttctgcatgccaccttctgggagttctggttcgatatcagaacatcattgtgctttgataatattgtaagttattaattgcaatatatactatatgtctaattgtgttgcgttgcgtgtggtgtatttgtatgggtcattcggttgaaataaacgatcgagggatt

SEQ ID NO: 257 - DNA, 563 bp, Oryza sativa
  ref <308>: DATABASE ACCESSION NUMBER: AK058411
  ref <309>: DATABASE ENTRY DATE: 2001-12-06
atcctgaagcgccatagccatcccacggccaagcaggcatcaagggttaccgacccgctcgaccggaagcgccgccgcggcaggtgcacgggctaccgccggtggacgttgccgccgccgcagtaggggcacgtcgccaacgccgccccccgcgcccgtcgcggccgccgctgcaggtgctcgtcgcccctgccgccgactcctgtgatttcatcgctctcgtagaggcaaactctttatgggtgagaggagtatcgtacgattactgctatgagattcaagactgaggatgacggcttcaagttataggtattacattttgcaatcatgtctctaagttgttttgtcattcctacaatttcaggaaagtagaagaagatgtgtgagatggataagaagtagaagcagccctttgctatgcactttacatagttttgtcatgctcttggtcgtaatgaatacattggactgtaataaatcttgatgtgctttcctgtagtatgatggatgtactactattttgagttgtgctcgcatggttgaattttgatgtgttttactgt

SEQ ID NO: 258 - DNA, 1707 bp, Oryza sativa
  ref <308>: DATABASE ACCESSION NUMBER: AK058412
  ref <309>: DATABASE ENTRY DATE: 2001-12-06
agaaaccccatttcaaaccaaaaccctcctcggcgacgagctcgaagcggcaatggcggacggcggcggctacgacctcctcaccgcgctccccgacgacgtcctccgcctcctcctcgcccgcctcccctccaccgccgaggccgcgcggaccagcgtcctctcccgccgctggcgcagcctctggaccaacctcccgcagctgcggttcgcggacgtcaccgacctcgcccgcgtcgccgccgtcctccgccaccactccgccccggtcctcctcctgcgcatcgagagcagcgaccccgccccggagaagatcgccgccgtcctcgacctggtcgcgccccgcctccaaggcaagctccacttcgacatcatcacgccggggaaccaaaattcggcggcgggggcggcggggatcggggccgcgattcggatcccgtgcttcgagaaggccacggaggtcaccatccgcttactacgcggcatcggcatccggctgccaccaccatccggcgtcttcgcgaggctcaccgcgctgagcttgagccactgcaggttggacgaccagagccagcgcgatctcggaggcgccgtctcgtcggaggggtgcccgtcgctacgagagctccgtatccgcgatgccgatgtggtgtccaatctagccatccgctcggagtctctccgccttgttcagctgtctcgactggaagggattcgtcagctcaccatttctgctcctgcgcttacagaactagatttgtacgcttgcttattgtgggggatgccaatggttgacatctttgctccagcgctggggacacttcgttgggttgattttttccgttcgagttcagtccgattcagagcaatgccaaacgtccatacacttgctgtctttgtcatggtgtatggatacgtttcacactctctgccactcctgcagtattttacggaagcccgcgatgttcgtctctctctcgtctacagctctatcagcagtaacgataagctcttggtggaggcagtgaaagatgagctccctgccattgaaatcctatttctgcggttattaacagaaggacatacttttggaccttgagtattccatttgcttaggatgtctcccagtacaagggagctgaagctgcagttagaagatcacactgagggtagaaaagttccttgctcatctggctgcatttgttacaagccccgtgactgggaaaccatgaatttgagcttggtgtttctccagaaagttgaaatcaacaacttgagtggagcagagtgtcaaatatatttcgtcaaacgactgttgagatggacgccagtgctcaagacgattactctaagttttgatccttcagtaacagttagcgaggagctgtctaaggagctacttagcttctctaccccagagatttgcatggaaatttacttgcaccgcgatggagctagggtgaagtatagtgcagcaaactagacctagagatgattaactcacgatgaaatggagcacagtaatcaccgaaaccaggcaatttcaggccttcctttcagatcaactagagtcaaagatgttcgtctgtcatgatagaggattgtcgtatacttgggtattgttgactgcaccactaacaacttgggccccaacgtgtgtttacattctctgaggaacgtttccaacatgcatttggaagttttctt

SEQ ID NO: 259 - DNA, 312 bp, Oryza sativa
  ref <308>: DATABASE ACCESSION NUMBER: AK058413
  ref <309>: DATABASE ENTRY DATE: 2001-12-06
gatgtatatgaaagacaggaagaatcagaggctaatgaagaaccgagcaataaaaaccaggatgaggggccaagttcatcaacttctaatggcaaggaggtggaagagtccgatgatgaagatataaatattgatgatgacctggacattgatgagttaaacgagcttgaagcaagcctgtcaagaacttccattcagattcgagaacctggcgagggaacatcatcttgagcagtaacactctggactggaaggccattgagaagtagaacaccatttttgcgccttaaattgcctacttgctttagaaac

SEQ ID NO: 260 - DNA, 855 bp, Oryza sativa
  ref <308>: DATABASE ACCESSION NUMBER: AK058414
  ref <309>: DATABASE ENTRY DATE: 2001-12-06
atccatcaggaccatcactaccaccacttcaccaccaaacccaaccaaggacaagttttcaggggcaaattaagaagagcttggtgacgatatgagcacggcgaggttcatcaagtgcgtcaccgtcggcgacggcgccgtcggcaagacatgcatgctcatctcctacaccagcaacactttccccacggattatgtgccgacggttttcgacaacttcagcgccaacgtggtcgtcgacggcaacacggtgaaccttgggctctgggatactgctggacaagaggattacaataggctgaggcctctcagctacagaggagctgatgtctttttactagcattttccctcatcagcaaagcgagctatgagaatattcacaagaagtggataccagagctgaggcattatgctcctaatgtgccaatcgtattagttggaaccaagcttgacttgcgtgaggacaagcagttcttcctggaccaccctggtctagcacctatttccactgcacagggggaggagctgaagaggatgataggtgctgcggcgtacatcgaatgcagctccaagacgcagcagaatgtgaaatcagtattcgactcggcgatcaaagttgtactttgcccgccaaagccgaagaagaagaacaccaggaagcaggggagttgctggatcctatgagtgataaacagcaagattggcgtattccgcaggaaacctgtattatttttacagtgtgtgttgtgttatgtttgtgtgttgcagattagatgcagtttgggttacaaaatttgctgggtctgaaatattcagctcagtgcttcttgagtactacctctgatgattcttac

SEQ ID NO: 261 - DNA, 1245 bp, Oryza sativa
  ref <308>: DATABASE ACCESSION NUMBER: AK058415
  ref <309>: DATABASE ENTRY DATE: 2001-12-06
aatgctccgccaagaatgtgcaccagtggacttcacaattacagtcaccgatgaagttatttggtgtgatgatacagtttccctggttgtcaatactatacacaggcatattctcaactaccttttgtttatgggcagaggtggctgctatgcgtgatgtatcagctacggaaactgcaataatttatggtctggaacctgtatggggtgcagcttttgcatgggctatgcttggtgagagatggggcatgacaggatttgttggagctatcttcatcatagctggtagctttatggttcagatactgggatcatttcctgatgtatctagaggggacagttgacatgaaaattgaagaagcagatgaaccattttttcataaataattcagcgaactcttattagtgatgattgaagtgttgctacctaataagaaagtaaatagctagcatgacagaggaatcaaagttcgctgcctcaacgaaaagtaaatagctagcatgacagaggaatcaaagttcgctgcctcaacgaagataaaggtggcttagtagtgacagcagcaagaaggtgccttggattaactacctgttggctggagataagcaaaattttggtatgcatagcttgacttgaacatgccgaggcttcattcgactaatcgggtgggataagatataatgtattacccctgttctcaaaagaattaattcacttttatacacgaatctggacaagtgcctgtcagattcgtgttgaaaagtgaactctcttgtgacggatgtagtagggtgttttttttttatatcgacaacatttgttttgagtgtaaattcaaccacatgataatgaatgggcagtagcagtatcgagtgtctttccttcaggccctgtcgtctttcatcgtcatcgagcttgtctcgcagcagaggatcagaaaacatgtcaccgttcatcgtcaagcgtgtctcgcagcaatctgccagaaacatgtctatctttcatggacatcagagacacctccagagcctgcacaagtgtacgactctgtcctccagcaatggtgcccactgccctccaaggcttctcagcaacgtatccctgcaaacattatccattgctacaacgacagcatctaccatcacctgtgtgccatagtaaacctctcctctcacaaacttctcaatttttttttcagatatggacaatctgatttattttcatcgcctcattgctttgtcctc

SEQ ID NO: 262 - DNA, 375 bp, Oryza sativa
  ref <308>: DATABASE ACCESSION NUMBER: AK058416
  ref <309>: DATABASE ENTRY DATE: 2001-12-06
atcgtatgagcaggcggtggcgtggaaggttcttagcgacgacgacgcgccgcactgcctcgccttcatgctcgtcaactggaccttcatgtgatccaccatccatggtttccagcttccagctagtgcttttgcttttgtgccattgtggcaaactgaactaagacctgaataccaccaccgtattgtattaaacatatgcgtccatacatgcatggtgcttgctttatcctagctagtgctagcacctgtgtgtatggtctctccatgtttgaagcttaaaattttagaaccctggtttttttttttctgctgctgtgtggatgaacaagtttcaggacctatgtatctctatctatctatgctaatgctatg

SEQ ID NO: 263 - DNA, 725 bp, Oryza sativa
  ref <308>: DATABASE ACCESSION NUMBER: AK058417
  ref <309>: DATABASE ENTRY DATE: 2001-12-06
atgttaatcacacatattagtttgaagccaattactaatgtatgtcgtgtggaggaagcaccattggtgtggtgatggcgtcatgaaatgcatgactgaatgttttaattacttcatttgtcccaaaaagaaagatacatatatcttgtttattactgttgtacgtatctgttattgaatggaattctgaataacatgatccactttgttgtacatgtcttactacatcatctcttgatgtgtcgatggtgaatccggcaagtaaaataacctggtatttatgactttatgtttggtaagcatcatccattgtttcttctgtcatgtctgaatatgtagcttcatattttgtgctcacttatataccctggtgatgtctatccgatgtagggttgtttgcttatgtttatgcttttcgttcttttattttcgaggattatacttttagttcttgcctcggtgcctcattccctgcttgaactctcatgcagtttctcttgaagaattttgacacgttggtatacgtaccataaatgccaacaaattaagaattcttctctgggctgcccagaaatcattgccagttttattacgacaattcattctccagtctgtactctgttaattttacactgtggaatcatcaccatgtaaattttggacatggctgtatttatctttcaccttgtgaatcacttaatacaacctgatgatttgtgatctgt

SEQ ID NO: 264 - DNA, 1883 bp, Oryza sativa
  ref <308>: DATABASE ACCESSION NUMBER: AK058418
  ref <309>: DATABASE ENTRY DATE: 2001-12-06
aatcttctaagagtaagaataaataactcttttccgtgagtatctcgctaactatattgaatgtcaaacttgcattttatcacgtacagacatattctggtcaatgtaatgtgctctatttctcttgtctgcacaatttatgcaataaagtccgggagcagaaaaattaaaattcaatgttttcatttgtaaccaaataaccaggttttctattataacctaagtattcctgagtatcttgggcttttcgttgagtacttgagttatagcacagtaaatgctactgtagcatctgataagtataaatatgtggatactgccatgtgaccttgtttaaaatagttgcattgcatttcaattattgaaaatgttcattgctttcccttacctatcacatagtctctctctcccgtgttcacacgaaacatcgcactaaccattcctcacctatgtacaaggtagttaagtctggaacgctggatagcatggtcattttaacctctctttctcttgattttatactctccttaattcttgtgccggctaaaaattgcaggtggaagatctatctaaggagccacaggttgaaagagagctgatgcttataaaaattaatgttgaaccagatcagcgtcctgaggtcatggttttagttgatattttccgagcgaaagttgttgatatttcggagaacacccttaccatcgaggtaactggagatcctggcaaaattgttgctgtgcaaaggaacctcagcaaatttgggataaaagaaatttgtagaacgggaaaaattgctttgagacgtgaaaaaattggagcaactgcccgcttctggggattttctgctgcttcttacccagatctcatagaggcattgcccaaaaattctcttcttacttctgtaaataagacagtcaatggaagttttgatcaaccatccaatgctgggggcgatgtctatcctgtggaaccttatgagggttcatccatgaaccaagtacttgatgctcactggggcgtccttggtgatgaagattcaagtggacttcgatcacatactctatccatccttgtcaatgattgccctggtgttctcaacattgttacaggggtctttgctcgcagaggctacaatatacagagtcttgctgtaggcccagctgaaaagtcaggcctttcgcgtattacaacagttgctcctggaacagatgaatccattgagaagttagttcagcagcttaacaaacttgttgatgtgcatgaggttcaagatataactcacttgccttttgctgaaagagaacttatgcttatcaaggtttctgtgaacactgctgctcggagagacatactagatattgctgaaatcttccgggcaaaatctgttgatgtttctgatcacactgttacgttacagcttactggggatctcgacaagatggttgcattacaaaggctgttggagccttatggcatctgtgaggtcgccagaacagggcgagtggcgctggtccgcgaatccggtgtcgattccaagtaccttcgtggctactcctttccgttgtaatcccaggtcttgtgagaagaaaggacagtaataaaatgcttggtcggttggttgctacctgttacagcagagtgttgtagtagagtgttgtagtcagattccgttcgttcagttatgttgtttgttatgatgctgttcttttgttgttgtttaccttcctctctgtaatgtgccaatccgctggcttcttgtccagtaaagatcatgatgcaagagttgagcctatgttttctactgacaggcaaaccaaacgtgcactcagccacttaccatgttctggaataaaaattgaatccagcgctttgcaccgtgt

SEQ ID NO: 265 - DNA, 2054 bp, Oryza sativa
  ref <308>: DATABASE ACCESSION NUMBER: AK058419
  ref <309>: DATABASE ENTRY DATE: 2001-12-06
ctttacctggggcaatgggccctattcaagtcagatatgctgatggtgaaagggaacgccatggggctattgagcacaagctgtttgtcgcatcactcaataagcaagctactgcgaaggagattgaagagatttttgcgccgtatggtcatgtggaagatgtctacattatgaaagatggcatgaggcagagccgaggttgtggctttgtcaaattctcatcacgagaaccggcgctggcagccatgagtgctctgagtgggaattatgtaatgagggggtgcgagcaaccattaataattcggttcgctgatcctaagagacctagacctggagaatcaaggggtggtcctgcatttggaggtcctggtttcagtccacgatctgatgcagctcttgttatcaggccgaccgccaaccttgatgaaccaaggggtcggcatatgcctcctgactcttggcatccatcaagcccaaggtcagcacctcatcagtttaataactttggatctgacaatcctatggctccgaaagggagtactgttacatcaacaacagatacggccacttttcgacctcagatgttcagcggaaatggctctttgtcaagccaaacagctgtgccaagttcgtcacatatgggcatgaaccctcctcccatggcacaaggccatcatctgggaggccagcagatcccacctttgcaaaagctaccagggttgcctcagaatttccctgttcaattgcagaataatcagctgggacaacccttgcagggtcctgctcaacagattggtcagcttcaagttccacaatctatgggtcctggttcttttggccagaataggttatctggtcagcttcctgtgtcacagccgttgatgcaacaaaatgcttccgtcagcgctgtgcaggtgccttcagccgtgtccaattccatgcaagctattcccgggcaacagcatcttccctcaaatgttgcaccacaaatgcttcagcagccagtgcagcagatgccatcgcaagcaccacaattgctactccaacagcaagctgctttgcaatccagttatcaatcttcacagcaggcaatttatcagcttcaacaacagctgcaactaatgcagcagcagcagcaatcgaatctaaaccatcaacaacccacacagggtcagccagtgcaatctagtaaccctggtgccccaaatgccattattccatcaaacattaatacaattccccagcaggctacttcacctgcagttcctttaacctgcaattggactgaacatacgtctcctgaaggttttaaatactactacaatagcataactcgagagagtaagtgggataagcctgaagagtatgtgctgtatgagcaacagcaacagcagcagcaacagcagaaactacttttgcttcaacagcaccaacaaaaacttgccatgcagcaacttcagtcaccacctcaggctcagacacatccagcaatgcaacctgtccaacaaattcctcaggcacaacaaggacagcaacaaatgcagatgaaacagcaggaattgaattatactcagctacagactcctggtgctattgatcccagtaggatacaacagggcatccaatctgcacaagaacgtgcttggaaaagttgagactgaaggtgaatgataaattggtaagctgttactcggaaatgagctccactcaacctgctgcctccatcaaatgccttgacggtgcctgatgcctgagtggtggccaagcggccatgccgatcgttgtaactctggatatagcttagattgatgtctaaaaagttgtagctccaatccgtgtaaaatgtttgcagtctaggccttgtaccgctgtaacatttctgctgattagaatgttcgctttccttgcataggcaactgccagaggttcgtcgctagtatgattttgggcatttcatgacatgtccccagcaatcatcatttagattgtttcctcctttgaaagctgtttgctctcaagacatgctagataagaatagatttggccgcggcggg

SEQ ID NO: 266 - DNA, 739 bp, Oryza sativa
  ref <308>: DATABASE ACCESSION NUMBER: AK103960
  ref <309>: DATABASE ENTRY DATE: 2002-08-28
agacaatgcgatccctttggatgtcatcttgcaatgtcacgttaaaggggtgccaagtccttgcgtcaaagatgccgatgctcaatgttgaggtcataaatgagcgggatggtagcaatgaaatggaggaaaaccatggagatctgcctaaagtggagaaattatatgtgtaccgcacaactgctggggcgagggatgatgcaccaaatcttgttaaaatcctatagagctagctgagagtagcaaggaatcctcttattccataagatggtcggcggaatctgggaggaggccggggccgcggcaacagtggtaagctcttcaagtgtctcctcctctcctttgcagggacaggaaaaaccacgttggtgtgcctcccttatctcggagcatctggcctgggatcatcatccatcatccccccgtttcgccttttagcccgtttggtcataccgacgaggcccttatcctgttgtgcaattctgagcaagctcaggaccaccaccaatccatcatgttagctcgaccttttctctcttcttccctttattattttttcttctttttttaccttgtgtaatatgtagaacccacttccatttgcttttgacatttgccacagcggattgtgctgctgctggttgtaatgcttgttttcaagcctcctgaccgggacgtttcggggacgatgattagtttccttctctttgctcctgtgaatgcagtcagtgcctggaat

SEQ ID NO: 267 - DNA, 958 bp, Oryza sativa
  ref <308>: DATABASE ACCESSION NUMBER: AK058420
  ref <309>: DATABASE ENTRY DATE: 2001-12-06
atggccgtctcctctaccctacggcgagctcgatctcacccctcctgggcggccgccgcgcgcggcctcctcgccacctggggcgccggatccggcggccgcgttcgtcatccgcggcatggcgccgcgtccgcgtcgttgttctcatcgttgtccagttctcagacgagcgccgccgacgcacagctcctccgggtcataaacatggagatctcctacgcccagaaagattgcaagaatcgcaactggtcaaaggaattaggtgaaggctttccttttgaaatccaagataaggatggtaccaacatgatgacgcttaagaggagtgaccataaagaacaaattgaagtggaagtgttcttgccaagcgctgtcaatgaagctgaggaaaatggcgagccagaggatcagtgtgaagatggcaaacatagaactcacattggcaatggtgtcccggcccagtactgtatccctttgatagtgagggttcgcaaagaagcagcttcatatttgaaaatcagctgtagctcttaccctaacgaactcatcattgagagcttgtcgtttgaaccgaatgatgaatctggtgattcggccagtcttgaagctaagttgagtaatcttcctgaggaatttcagaaggcagtgtattcctacttgaagagtaggtgcatttcgactgatattaccgacttcttacatgcgtacatgataaacaaagagtgccatgaatacttgtcttggctgagaaaagtgaagggtctgattaaaagttgaataaaagtgaggaatgggagcgccatcttgtacttttcgtagtttggccatgtttcttttccttgaaattctgttttcaccgggtttagatgtgcccaaagagaaccaaaaaaaattcaagaacaagttcatcttgaccagttttgattagcagcaatgaccagtattgcagccttccgct

SEQ ID NO: 268 - DNA, 1508 bp, Oryza sativa
  ref <308>: DATABASE ACCESSION NUMBER: AK058421
  ref <309>: DATABASE ENTRY DATE: 2001-12-06
aaccctaccaccaccaccaccacctccacctcctcccccctcgctgccggacgacgagctcctcccccctccccctccgccgccgccgcgccggtagaagatggctgacgccgaggatatccagcccctcgtctgcgataatggaactggtatggtcaaggctgggttcgccggagatgatgcgcccagggctgtcttccccagcattgtcggccgccctcgccacaccggtgtcatggtcggaatgggccagaaggacgcctacgtcggcgacgaggcgcagtccaagaggggtatcttgaccctcaagtaccccatcgagcatggtatcgtcagcaactgggatgatatggagaagatctggcatcacaccttctacaacgagctccgtgtggccccggaggagcgccccgtcctcctcaccgaggctcctctcaaccccaaggccaatcgtgagaagatgacccagatcatgtttgagaccttcaacacccctgctatgtacgtcgccatccaggccgtcctctctctgtatgccagtggtcgtaccacaggtattgtgttggactctggtgatggtgtcagccacactgtccccatctatgaaggatatgctctcccccatgctatccttcgtctcgaccttgctgggcgtgatctcactgattacctcatgaagatcctgacggagcgtggttactcattcaccacaacggccgagcgggaaattgtgagggacatgaaggagaagctttcctacatcgccctggactatgaccaggaaatggagactgccaagaccagctcctccgtggagaagagctacgagcttcctgatggacaggttatcaccattggtgctgagcgtttccgctgccctgaggtcctcttccagccttccttcataggaatggaagctgcgggtatccatgagactacatacaactccatcatgaagtgcgacgtggatattaggaaggatctatatggcaacatcgttctcagtggtggtaccactatgttccctggcattgctgacaggatgagcaaggagatcactgccttggctcctagcagcatgaagatcaaggtggtcgcccctcctgaaaggaagtacagtgtctggattggaggatccatcttggcatctctcagcacattccagcagatgtggattgccaaggctgagtacgacgagtctggcccatccattgtgcacaggaaatgcttctaattcttcggacccaagaatgctaagccaagaggagctgttatcgccgtcctcctgcttgtttctctctttttgttgctgtttcttcattagcgtggacaaagttttcaaccggcctatctgttatcattttcttctattcaaagactgtaatacctattgctacctgtggttctcacttgtgattttggacacatatgttcggtttattcaaatttaatcagatgcctgatgagggtaccagaaaaaatacgtgttctggttgtttttgagttgc

SEQ ID NO: 269 - DNA, 682 bp, Oryza sativa
  ref <308>: DATABASE ACCESSION NUMBER: AK058422
  ref <309>: DATABASE ENTRY DATE: 2001-12-06
ccttgatatacatgtttccagagcagccacaaagaaggaggaagtctctgccaaattactggaatttttggagtccccttgcatcactagagatgttgttctcactgatgataagaaagggaagaaacgtggaaggagatctaaaggaaatggccaggcgactgctgaaggcgcttctgatgggaagaaaaggagaaagagtcgaaagcaatcaactgaagctgctaaagagaatgacgatgaagacgatgagggtcctgctgattctgaggatgcatcaatgggtgaggaagatgatgaggattctgaagcaaaagataatgctgggagtgatgaagaacctgatgagcctccagcaaagaaaaaggcaacagatgataaacaaacaaaaaaggcaaaagaaaaggatgcgactgccaagaaggcttctacaagacctgcaaaaggtgtgtctaagccttctcaagacactgaagaagatgatgagccagaagttgagttagaaagcaaaaaggttgtcaaaaaagtctcaaagagttcaaaggagagtgatgttactgtagataaaaccaccaagaaggcttctaaatccaaaaaggatgaaggaaaagatggccagaacaataattctggtgcattgaacaataaggcacgcaagaaggatgctgccaagacaaccaat

SEQ ID NO: 270 - DNA, 1944 bp, Oryza sativa
  ref <308>: DATABASE ACCESSION NUMBER: AK058423
  ref <309>: DATABASE ENTRY DATE: 2001-12-06
ccaccatcaatcaatggagacaaacctctgcacctcctccaaccaaactagcagctcctgatgctcctagaaatgttgggttggccaaaacagaaggtgttgacaagaggacacagccaagcacaacaaaggaaaccccaaggaatgatagaaatgttttagcaacagggcaaggagctgatcgtggagttggtaatgaacaatatgacaagaattccatcgatgaaagagcaccacaaatgacaccaaggcaggcagcaccttctgtcactcagcgtgcttcagcatcaatccaagaaagaattagtggtgcccgtggcgctagtgatgatatgtttggaaaaacatcaagtgctgatcaaagcaacactccagccataccaaagcaaacaacagttcaaggagcaacccctgatgttcgtggtactagttatgctgacagagagatgaaacttcctgctgatgaaaaggcaacagcaaacaagcagaagccagtttcaagttcccaacagacaattgaaccaattagaggaggaactcctacctcatatggcagtactgatgatgacttggccaagacatcaagagctaatgaaagacaaacgccaccttcaaaggcgcaagcaccagcatccaacagacagagtgcttctacagctctccaaggaggcacacctgatgctcgtggggaaaatacagcagtcaaaccatcagtcacttctccaacaggtatgcctacttcatcaagaagacaagaaccaactccatcagtcacttctccaacaggcgtgcctacttcaccaagaagacaagaaccaactcctgacactcaacgtcgtcgcgcagcagatcaaatgccatcccaagctccacttccgtcttccttcagtacaaggaacaaggagaatggtatttctgaagctggtcaaaccaacacagtagcacctgatgggctgccaggtccgggagttcccaaagatgctggaccacaggttgcaggaccttcagtcgtgaaatcacagaagaacatgaatgaagcatacaacgatggaccatccacacagcagttgccaaatgatcagtataggtctcagccaagagaagccaaggaagagcaaggagctgatgcagcactaatcaatgaaattggcaaggcccaaaaggatgatttgttggcaaatccaaatcaaagtagcactggaagagttcaaccaacatcaactgaagaaacatccaagcagcaactgcaatccgggctgaacaagcctatatcatctaaagatggcaaagaaacagtaagctatggcagctcagcaacgtccagagaaatgctaccttctattcctgataagagcatgagagtgcagcaaccgcaaggtgacaagtccagctactccagtatatcacaagaagacaatgtgaagcaagggtctcaagctgcactgcagggatctggaaatgagcagcctaagaaaagggacctccttgcaaatgctgatgagaaaatcagaggaactacaggagaagccttacaaaagtctgatgaagggcggatctcctctaatactgagcaaatgaaaagcaacagaaataacagcaaaccagatggctcaactgaacccacttcatttgatggcaatgaaggtaatcttcctgagtcacagaggcgtggctcatcaagcaacccgtaaaatgcttcatcagctcattttctttcaccatctctgccgtactgctatctacttccctattttcacataataaggtcacctatacaccagcggaccagccataccagtccatgttgtctactctgcatgtttattattccttcccagtggtgcagtattgttcattacttgaacaatgacttgttcagatgtcaaagttcttaatttaatcttgttttgaataatgtgaatgcaatatagcattctccatatg

SEQ ID NO: 271 - DNA, 1411 bp, Oryza sativa
  ref <308>: DATABASE ACCESSION NUMBER: AK058424
  ref <309>: DATABASE ENTRY DATE: 2001-12-06
actcacacaagttgcatcgatcgatccttggcgatcgatcgagctagctgctgcgaaaatggcggcctcctccttcctcgttgagtgcctgtcatggcttgtcgtcgtcctcttctccctgtacatcttccagcttctccgcgacgcccgccgccgcctccccccgggtccctggccgccgaagccgctcgtcggcgacctcctcgacctcggcgaggacggcaagcagcaccgcacgttcctccgcctcgccggccgctacggcggcctcatgtgcctccgcttcggcatggtgccccacgtgatcgtctccaccccggacgccctgcgcgcggtgttcgccgccgccggcgccggcggcggcggcggcggggaaggcaagaaggtggatggcatcgcgggcctcccgagcctcgacgtgctcagcgccatgggccaccgcgcgcacaccatcttcgcgctcccgagccaggacggcaagtggcgcgcgctccgcaagttcgccgccgccgagatgctcgcgccgcggcggatctcgtccgcggcggccggcgcgcagctgcagaccaagatcgtggaggcgctccgccgcgaggtgtccgggcacgcggcgcggggcgccgccgtggtgttcaggcacgcggtgctcgactccatcctgagcctcctcctcggcgtgctctactccaccgacctggagcgcgaggagcgcgccatgttcagggacctcattgaggagatcgtcgggatgctggggacggcgaacgtctccgacgtgttcccgccggtggccgcgctcgacctccagggcctccgccgcaggatgaccgacctcctcaccatcatgtaccgccacttcgacgaccaggtcgccctgcggcggcgcagccgggacgccggcgaggcgcgcaagaacgacgtgctcgacaccgtcctcgacaaggaggagagcgagtggaagcaggagggctccctgctaagccatgacgtcatgcgagttctcctctccgatttatacggcgctggagcaagcacgacagcagcgctaatcgagtggggaatggtggatctaatccagaacccagaggtgatgaccaaggtaagggaagagcttaccaatgttctcggggacaagctggtgatggacggatccgacattgcccgcctcccctaccttcaagctgtcgtcaaggagacccttcgtctccgaacggtggtacccttggtaccccgcaaggctgaggtcgacatcgaggtgaacggctataggatccccaaggggaccaacgtgatcctcaacgcgtgggcgatcaaccggagtgccgacgcgtggtcggagccggacaagttcataccagagaggttcctcggtggcgagactaggggatatctgggccaagacttcgaaatg

SEQ ID NO: 272 - DNA, 1389 bp, Oryza sativa
  ref <308>: DATABASE ACCESSION NUMBER: AK058425
  ref <309>: DATABASE ENTRY DATE: 2001-12-06
aacttcgtttaccatgacgacaagtgtcttgccgctactactactccacatcttcatcctctcgtccatgggctctcatgaccatggccatggtgatggaggagctgagaatcgcgagcactacattgccgtggaaaccagctccttgttgaagcccaaagccatctgctccggtctcaaggcaatgccatccagcaatggcacgtgggtggcgctgcaccgcccctacggcccgtgctcgccgtcgccgacgacaacctcgccgccgttgttggtcgacatgctacgctgggacaagctccacaccgacgccatccggaggaaggccaccgccggcggcgacgtcgtgcttgagccggacaagccgatcgtcgacgtgcagcagtcggactacaagatgcaggcgagcttcggcatcggcaccggtggcagatcgggctcgtcgtcgtcgtcgtcgtcaagaatcagccgcccgtcggcgatcgacgaccccatcctggcgcagccgatgtccatcgacaccagcatcgacctgccatggatccagtgcgcgccgtgccccatgccggagtgctacccgcagcagaacgccttgtttgacccgaggaggtcgaggacctccgccgccgtgccgtgcggctccgccgcctgcggcgagctcggccgctacggcgctggttgctccaacaaccagtgccagtacttcgtcgactacggcgacggcagggccacctcggggacgtacatggtggacgccctcacgctcaacccgagcaccgtcgtcatgaacttccgcttcggccgcagccacgccgtgcgcggcaacttcagcgcctccacctccggcaccatgttcgcgaggacgccgctggtgcgtaacccgagcatcatcccgacgctgtacctggttcgcctcaggggcatcgaggtcggcgggcggcggctgaacgtgccgccggtggtgttcgccggcggcgcggtgatggactcgagcgtgatcatcacgcagctgccgccgacggcgtacagggcgctgcggctggcgttccggagcgccatggcggcgtacccgcgggtggcgggagggagggccgggctggacacctgctacgacttcgtccggttcacgagcgtgacggtgccggcggtgtcgctggtgttcgacggcggcgcggtggtgaggctggacgcgatgggagtcatggtggaggggtgcctcgcgttcgtgccgacgccgggagacttcgcgctcggcttcatcgggaacgtgcagcagcagacgcacgaggtgctctacgacgtcgtcggcggctccgtcggcttccgccgtggcgcctgctgacgaccgcaccttgtgatcgacccgtttaatttgagatttgctccggt

SEQ ID NO: 273 - DNA, 607 bp, Oryza sativa
  ref <308>: DATABASE ACCESSION NUMBER: AK058426
  ref <309>: DATABASE ENTRY DATE: 2001-12-06
ctttcttcaggttctacaggggagctcagggccggctctgcagcttcagctgtactaacgcaactattaagaagttcagggatgcgcttgctaagcataaaccagatagatgcagccttggcccaactagggggctcgaggagtcggagctattggcgctggctgcgaacaaggatctgcagttcaactacaccaagaaaccagaactggttcctagcggagatgccgcagctgcccaggaattggatcgtggaagcacaaagctttctccacccgcaaaaccattggtcaagcagggctctgaagagaggtccttggtctcatcaggcagatgagatgaaatgagatgagatgctggtctgtatgatcgcatccctcaattctgtacagtttcttgattgttcttgatgtgtacaggttgtgccttatggttgagtgcaggctaatattttttattgtgaagcctgcccgttcatctgcatgtagcgtagcagcaagcagtagtatcagcaagtgttgtagccttgtaggcatgtagcaatgccagggatttgtatgggtagctgtatgaattcatctatattttgcctagttgtgtgacctttgg

SEQ ID NO: 274 - DNA, 2330 bp, Oryza sativa
  ref <308>: DATABASE ACCESSION NUMBER: AK103961
  ref <309>: DATABASE ENTRY DATE: 2002-08-28
ttccccttttctcccacctcgccgcgcacccctcccctccccatgtcctcgccttcctccccgcgctcttgctcccgcagcttcacgcttcccccgcactagtacagactcctgatggtggtggaggtaaacctcggcggctaacccatcgtccaccgcgcgcggcggctctgtttttggtttgggcggcattttggtctccttgggggtgtggatttgggttgggggggaggagagctgggtgaagatttgtggcggaaactgttgggggggaattgatggtgggattcatggagtgcgtgcacgattggttgctgtgggacgccgtcctggaatgcggagggatccggaggccaccgattagatagcggccgggggaggagggagaggagaggagagaggagcaggcggtggcagaggcggaggccgtcgccattagcaccagtcaccccgaggcgcgagtcaccaagccatgggggaagacctcgtcaccaccctgtccatggagaacggcggcggtggcggtggcggtggccaccacagcctctgcacccttctctccatggatcccgccggccacctcgacgaccgcgccgccggggtcatggtgcagccccgcatcggggacggcgccgggcgcgcccacgccgtgtcgctctccggcgcgcatccgccggacatcaaccagccgtggcagactgacctctgcgacatgctcgacgtcagcctcggcccgcagattcaggtgtacgacgccgaggcgctcgccgtgctgagcagtgccccgaaggctgggaaccgcaaggccgccaagcgcggggacagcatctggggcgcctggttcttcttcacgttctacttcaagcccctgctcgcggacaagtgcaaaggcaaggtcacccgggatgccaacggtgtgtcagggtttgacaagacggatctccggctcgacatgttcatggtgcagcacgacatggagaacatgtacatgtgggtcttcaaggagcggccggagaatgcccttggcaagatgcagctgaggagctacatgaacgggcactcccgccctggtgagccgcaattcccgttcagcgttgacaggggatttgtgcgatcacaccggatgcagcgcaagcactaccgtggactctcaaacccacagtgtattcatggaattgaggtggtgagatcaccaaatcttgcaagcataactgaggtagacaggaggaggtgggtggagcttacagggagggagctcaatttcgcaatcccgcaggaggcctgtgattttgggacatggaggactatgccaaacacagagattgagcttgacaggccacatcctgtcatgaagggcaacgttcatcaacacccaaagaagctgcttaatggatctggcttgaatttgtcatcaccctccaatcactcaggagaagatggcatggatctctccccagttagcagcaagcgcaggaaggaggtgtttccgcatgccatggatgaggaatgcttcttgccactcaactcttgcggcgagaggacacaacaaggtgtggagatgcattcagtagtgcagccttcatggcagcacgaattttctggggtgatgaaaaaggctcgcgggcctgtgactgccgccaagtcgatttatgaagatgaccaaggctacttgataatggtcagcttaccatttgttgatcagcagaaggtgaaagtttcatggaggaacagtcttactcatggtatagtaaagatcctttgtgttagtacagcccagacgccatacatcagaaggcatgacagggtattcaagcttgctgatcctatgcctgagcactgccctcatggggaatttgtccgtgaaatacctctagcaactcgcatccctgaagacgctaagctagaagcatactttgatgaggccgctgcagtgcttgagatcatggttcccaaacgtggaaatgagccagaagaacatgaagtaagagtctctatgcgcccccctcaccttgcagctaacgatctactcctgacataaccagtggaaggtctatcaaccatatagtcttgtttctgaccaccagatcaatgcccaaacatggctgagaaggtatgagcatgactgtgttgggagttttgctttctgagtatttgtcgtactgcactaggcctcttcagcgaagtctgctgaaggctactcagtttgttctagtatgttatgatgggtgtctttttagccctcatgctcttctcctttgtagaatatggctagattgctttttctagaatttgtactgtgttgaattaaccagaaataaattgtctgaatt

SEQ ID NO: 275 - DNA, 642 bp, Oryza sativa
  ref <308>: DATABASE ACCESSION NUMBER: AK058427
  ref <309>: DATABASE ENTRY DATE: 2001-12-06
aaccgcactgcaattcccacacttgcacgcacacacgaacaccacagagagagtccagcggcgcccggcgagaagcttcagccaagtcacagcggcctcggcttcttgcagctcgctgctcttccctctcttgatcgtgtctcgtgccacacatcctcgtttcgtcatctccatggcggcgtcgaccaaggccttggctctcctcttcgcggtgctcgtcgcgctcgtggcggcgacggcggccgtgagagtgctggaggaggaggccgtcgagctgggcggcctcgcgcctgctcccgcgccggccaacgcggcgggcgccgtcgcgccgggggcgtgggccgtggccgcggtcgtctcgctcctggccttcctcgcgcattgagatgagattcgacccctgagagggcgcagcgggtagtttgcggaatctgttgggacgggaatcctgtggtttggatttccgttgcagcggtagcatttggtgtttatctgaggagattattgctgtacgtttctatagttattttaggcgtgtttgttctagtccgttatggaggtgttgtgtactgccgatctctcttttgcctgtataagagaggaatatggttttgaataatacaattcatttactattctttt

SEQ ID NO: 276 - DNA, 1305 bp, Oryza sativa
  ref <308>: DATABASE ACCESSION NUMBER: AK058428
  ref <309>: DATABASE ENTRY DATE: 2001-12-06
acactcacagccgcgcgccgcaggaaaaaggtggaaaaccaccgcccacgcgggacgcgccgccgccgccgctcgccgccgcaccctcacgcgcaggggaggagcccccccgccggagcacctccacctgtttactctgagtgacatgtccccctcgccgctgctcgcccggccgccggcgccgtcgagcccgagcacgtacccgtccctcccgcctcgccggtgcgccccggctgtagcttccgcggcgctccgcgtggctccagccaccgcctcccgagccccattctccaggctggtgaccaagcggaatttcgctgcgtctgatattagagaagactactccactccgattgacgtcgttgccgatgtgaaaaccgagaagattgtggtgttgggagggagtggattcgttggctctgctatctgcaaagctgctgtctctaagggtattgaggttgtgagcctcagcaggtcagggagaccatcttactctgatccttgggttgatcaagttacttggctagcaggagatgttttctatgcaagatgggatgaagtgttagttggtgccactgctgttgtgtctacccttggaggattcggtaatgaagaacagatgaaaaggataaacggtgaggcaaatgtaacagcagtagatgctgcaaaagaatttggaatccccaaattcattttaatttctgttcatgattacaatcttccatcctttcttcttaactcgggttacttcactggtaagagaaaggctgaatctgaagtcctctccaaatacccaacctcaggtgttgtactgaggcctggtttcatttatggtaaaaggaaagtagatggttttgagataccactcgatgttgtaggacaaccattagaaaagctattttcctctgttgaaaatttcacaaaaccgctgagttcattgccagcttctgacttactccttgcacccccagtgagtgtggatgatgttgcctatgctgtgatcaatggagttatagatgacagcttctttggtgtcttcacgattgagcaaatcaaggaagccgcggcgaaagtaagagtgtaaactgggagtctttattgccaagatggaagattcaaacatgcggctccttattaagagatatccctgttctgtcttgcactcttgcagtcttagatcatacattcaatggttaaagttaaattcaaaactttgtacagtgtatgaatgtggtgcttgttccctccaagcagagaggaagaatgggctttgatggcaaaggccaatgcgcttcatttcttacg

SEQ ID NO: 277 - DNA, 1531 bp, Oryza sativa
  ref <308>: DATABASE ACCESSION NUMBER: AK058429
  ref <309>: DATABASE ENTRY DATE: 2001-12-06
aaccagcctgaattcctgaagtcctaagctatagctagcactagcagctagttgctccaaagcccaaaccatgcagcactcaccttcaaacgaaatgaccctccttctccttctcttcctccttggatgcacacactacggtcacgccggctcagaccgtcccaagatcgactccatcttcagcttcggcaactcgtacgccgacaccggcaacttcgtcaagctggcggcgccggtgttccccggcatccctttcaacaacctcccctacggcgagaccttcttcggccaccccaccggccgcgcctccaatggccgcctcaacgtcgacttcatcgctgagggccttggagtccccttgctcgccccgtaccatggcgagtcgcaggacttcagccatggcgccaacttcgccgtcgtcggcgccacggcgctcgatctcgccttcttccagaagaacaacatcaccagcgtgcccccgttcaacacctcactgagcgtgcaggtcgagtggttccaaaagctcaagcctaccttgtgctcgacaacccaagggtgcaaagactacttcgagagatcgctcttcttcatgggcgagataggcggtaacgactacgtcttcctctatgccgccggcaagaccgtcgacgaggccatgtcatacgtgccaaaggtcgtccaagccatctctgccggcgtcgaggcggtgatcaaggagggagccaggtacgtggtggtgccgggccagctgccgacgggctgcctcccgatcatcctcacgctgtacgcgagcccggccgcggcggactacgacgccggcaccggctgcctgtggcggttcaacgcgctcgcacgctaccacaacgcggtgctgttcgcggcggtgtcgctgctccgggccaagcacccgtcggtcgccatcgtcttcgcggactactaccgcccggtgatcaagttcgtgcaaaacccagacgaattcgggttcagcgagtcgtcgaagctccgggcgtgctgcggcggcggcggcggggcgtacaactacgacgtggcggcggcgtgcggcttccccggcgcggcggcgtgcccggaccccgacgcggcgatcaactgggacggcatccacctcacggaggcggcctacggccaggtcgccgccggctggctccgcggcccgtacgcgcatccgcccatcctcgcggccgtgcaacgatctgacgaaggaaaccccatccaaatggctacgtcgatgcctgcctctttctgatacgctctccttttgagtcactttgtctctgttattcttaatccaagagtaccccagctgttaattgtatatgctcctttaaaaaggagtccataagtgacagttactggaagtcggagctgcttcatcgattgcgatgagtttggcagcgatatataaccggtgacgagtctgagtagttgcgttgttctggggttttgcttatgctttctgtgtggtttttgctggtttttcataaatgaaccgtgtggttgtatggttctgtgc

SEQ ID NO: 278 - DNA, 337 bp, Oryza sativa
  ref <308>: DATABASE ACCESSION NUMBER: AK058430
  ref <309>: DATABASE ENTRY DATE: 2001-12-06
gattcagatggtcagacccaacgactcgaatgtggggcaagtttcaccaagtttacagttagccagcatgtttgctagcttgaactgcaatgctgacatggtaatttcagtgggaggagatagtctctaaatttctgtgtaatggcgtagggatgaatgattagaactggaggctagcaattatgctcgttcccagtagcaatactacagaactgttaactatttttgagccaatatgaggtgatgcagcgagtagatccgtgtaacgaggtacagattgagattggcagtataacaaaatacaaagggatactgcagctatttctgttgcctgttc

SEQ ID NO: 279 - DNA, 392 bp, Oryza sativa
  ref <308>: DATABASE ACCESSION NUMBER: AK058431
  ref <309>: DATABASE ENTRY DATE: 2001-12-06
caaagctgtgttcaaggaacttgaactgaagaaggagccgtatgttgtggagcttgatcaacgagaggatggttgggagattcaggatgccttatctgacatggttggcaggcgaactgttcctcaagtttttgtccatgggaagcacctgggtggctctgatgatactgttgaagcatatgagagtggcaagctagccaaacttttgaacattgatgtcaaagaagatctttgagtagtaatagtttagcatcaatggcaggcctctttcatttccatagaacatacccaaatactatgcaactatgaattcttcatagaatttggctgtgaatgtacctctttagacccctttaaactgtactctatgacaaaccgacaatacctccgtt

SEQ ID NO: 280 - DNA, 1480 bp, Oryza sativa
  ref <308>: DATABASE ACCESSION NUMBER: AK058432
  ref <309>: DATABASE ENTRY DATE: 2001-12-06
gagcctgccaaatccacgcggagtccgctaaaatttttccactggttctagatgatcgccatcgatgatgcaacgaccaactgcttcctctgcggaatagctgaataaattcagagttcaggtccatctaggctgctgctgctgctcttcgtctttgctgacctcggcacaggcagagagagaagccaagaaaagggaaaagagaggaagaagagagggaagaggagaagggagacgcgcggtgatcggaggttgatccatggctggcaggtcgagaacgacaaccccttcgaggagggcggcggcgacgaggtcaaccctttcgcggataaagcttctaaaggaggatcagcaggtcaatccagctattccggaggcgcattctatacaacacaatcacgccctagtgctccaccggccacccacctttcgcctcttcctcctgagccagctgacttctacaatgacttctcgaccccggtggatattccaatggacactagcaaggatatgaaaacaagggagaaggaacttcttgcaaaggaagccgagctaaacaggcgagagaaggaaatcaaaaggagagaggaggctgcagcacgagctggtattgtgttggaagacaaaaactggcctccatttttccccatcatccataatgatattggcaatgagatacctgtccacctgcaaagaacacagtatgtcgcatttgcgtcactcttaggattggtcctgtgcttgttttggaacatcatctgtgttacggctgcttggattaaaggggaaggtcccaagatctggtttcttgctgtcatctatttcattcttggatgcccaggtgcctactatctgtggtaccgaccactttaccgtgccatgaggaatgagagtgctctgaaatttggatggtttttcctgttctacttggtccacatcgctttctgtgtgtatgcggctgtttctccatcaattctatttgtagggaaatcattgacaggaatttttccagcaatcagcttaataggcaatactgttatcgttggggtgttttattttcttggattcgcaatgttttgcctggagtcgctgctcagcatgtgggttattcagcgtgtgtatctttacttccggggcagcgggaaagaggccgagatgaagcgcgaggctgcacgcagcgcagcgagggcggcgttttgatgatgatgtacgtatgcgtgaaatgcataggagtgtccattgtttgaaaaattactgtgcgctgtaaatttggagagtggtagtagagttgttctgcttatgatatgtaggattttgtgacttgatttgagatttcttccgctgtccatgtccatttcttctgatctgttctaacttcatgctttgcactttagggatactagtatatatttgagagagaaaaattgtggcattaggacttgccagatctatgtatgtaacaaaaagcatacctttctgc

SEQ ID NO: 281 - DNA, 1170 bp, Oryza sativa
  ref <308>: DATABASE ACCESSION NUMBER: AK058433
  ref <309>: DATABASE ENTRY DATE: 2001-12-06
atcgttcctgcgtttcggatattcagtctcattcgaagctttagacaagggtgctattgagatattgggcccttatggtatctcgtacacattccgacgattggccgagcgaataagtcaacttcaaagtggatttgttgtgcgaagagtgcgttatgaaccgtggccgcctacctgctttggttggtgggggcggctcctccgttgtgggtaaacgggaaacccgactctacgaacccgaggaaaggctgcactgcttccgtaagggcgttaagaccggagctttttgtagtgctagcaggaatgcaagtgaatgaatccaatcctatcccctcggcgaggtaataccttattgaagtagggcacgctacggcaacacaggactgacggggtgggggcttgctgtctacttggcgagccttcactgcccccttctgtaacttcccttctttcgtccgtccacgaggcagtcaaaagaaagagagaaaggggcggctataacgcaggagtcgtggcggttgtatgccacaaggtccctatagacaaggggacaagtgaatcatcgcttttgggcgcaggcagccctctaccatccatcccattgcattcctctcgtagagtactgtaccgtctcagaccagatacatctatggaaagaaaggatttcatagaaaatcttcatttttctatttttttggacccccatgcattccgttattcccgtaactatggattgattgtccctacctaactaaatggtagtggtctagggagcgcaattgctagagcacgggagaatgaagagtaatgatttaagcaagagcagccggacggactactatagtcagtctagtgactactatagtcttttctttctttgtagttaagtaataatgtttggtatagcagcctttccgagcgagtctctgggatctcctgtaaacccccatgatgtggtaaagggaggatattaggggaagcagtgagtggagattcccctgcagagagccggatgaggggagtccctcacgtccggttcggagggcggggatatcccgaccctactatcattatgcctttgcaatgttacttggtttaactttatttgtgaccttttcttgtatgtgggactctctatcttcttgggtagattctagatcgtctttcatt

SEQ ID NO: 282 - DNA, 1622 bp, Oryza sativa
  ref <308>: DATABASE ACCESSION NUMBER: AK103962
  ref <309>: DATABASE ENTRY DATE: 2002-08-28
acccccagtcgcctcccgcttccctccgccgccttccgccgcgatccccatcccgcagctgccgtaaacatgcttcatcattcgaatagccggcaccaaaggaacagaggatcaagagtcaaaacattactccaggctaccttacttctaggtgttgttgtctggcttatgtaccaggtgaaacattcctatgataagaaaaatgagtacttggaagatgctgagaaccagcctgcccatgatgatagaagcatgttccaggggaggaaagaaaggggaggtagttatggtgatggcattctggaaaagggtggggagaaccctgatgtagtaagcaaaccagacgaagagaacattggagaaactgtgtttgagaaagacaatactgactctcatgatgatgatataagaaacactgacagatcaaaagctggtgaagggcatggcagtagtgcagatgggaatacagaagctaatagtaatgatgaggatggaacgaccaatcactcagaaggagagaagagtgacgctgagtccaattcatctgacgctgagagtaaaggtgaagaccattcaactggagatgatatgccccaaagcaatactgtcctagaggaaagcagtgcagagacgaacagaatgccccatgaagaagttgcacatggtgatgaatctactaatgaagatcagtccaatgtgaaaagtgacggatctaatgaagaggaagctgagaaaaaagaggcagtggattctcaaaatgcttctgaatctctgtccgatgatgcgaagggtggaacagatgatgagcattccagtggaactcttcctgatgaaacaggtaatctaccatcagggcagaatgagaactcacaaagtgatgcgacttccaccacatctgatgcttctagcgaggctgttcacattgagactggatctgagaatgaagatgcagcaaaatcatctgggactgcatctggtgatgatgacaagggctcagccaatgaggcatctgattcaaacgaaacaaaatctgatgaaggcaatgtggcagcagaagtttctaatgaccaggctgcaaacacggaggcagggaactcccaagaagcgtctgctgcagaagctgcaaatggctcttcagaagagaccaagcctgtggagaaccagaatgatgggaatacagagtcgtctaacaatggtgagcaggtggatatcaagatggaaaccagtgcttccaccaatgccgagcagaaggaatctcaagtcggcgatggcagctctgggtcgaacggctcaaatgacagtggcgctaaacagactggcacgactgaaacccagtgatacaacaaccaattggacatgaacattgtttattatacggatttatccctgaaaatttagacgggctactgcacatagaattttcaggttgaggttacgatcgtttagctcatagcaaatgtatggttggtgccaatagtgcactctatgtgatccgtgctcagaaagacaatcgactatcgaatgtattttcttcttgactcgtgtggctttggccgagacactcaaaccctgcatagtgatctattcatgaattcagtataatatacgcggaagttcatgtg

SEQ ID NO: 283 - DNA, 837 bp, Oryza sativa
  ref <308>: DATABASE ACCESSION NUMBER: AK058434
  ref <309>: DATABASE ENTRY DATE: 2001-12-06
atcctcccctctcttccaccgcttcttcttcctccagtccccccacattgctttcctaccttctcttcttctctcctcggatctcgagctcgccacgcgcctgtttcttgtgctgcggtgagcggtggtgatggccgccctgcagctgcaggcgctgcgcgcgcccgccgccgccgcggcgccgctccggtcgtcatcgttctgcacgccgctgtcgctgccggcgccggcgccgccgcggcgcggcgccagggcgtcgacggcgtcggcgaggatcacgatgcgcttcggcgtcgcgtccaagcaggcctacatctgccgcgactgcgggtacatctacagcgacaggacccccttcgacaagcttcccgacaagtacttctgccccgtttgtggagcaccaaagagaaggttcaagccgtacgagcctaaggtggccaagaacgccaacgccaccgatgcccgcaaggctaggaaggagcagctgaaaaaggacgaagccgtcgggcaagcgttgcctatcggtatcgccgtcgggatacttgcattggccggcttgttcttctacttgaacagtgtctactagatggagaaacatacgagatgatcgatccactgcagtgggggaaaagcatcaaagagttttaaattttgccttcttttcaaacgtgctgttatatgcttctaggaaatccatggcaagtttctgtatcttagagaagaaactacacttttttaggggtgaagatatccatcccctatattattgacaacaaattgacttctcattgtgccgcatcgtcggcaaattaaagcctgtttgatcatcctacgatg

SEQ ID NO: 284 - DNA, 601 bp, Oryza sativa
  ref <308>: DATABASE ACCESSION NUMBER: AK103963
  ref <309>: DATABASE ENTRY DATE: 2002-08-28
ctcgtcaaaccaaacccaagcaaagcacccgccacatcggagaagagagagagagagagagagcgtggaagcttctggaaggttctcgaagatgctgtcctccctgtcggcgtggctggtgaacccgcggcggaacccgctggcccgcctccacatgaacgccgtcgcctcccgcctccgcaaatacgggctccggtacgacgacctgtacgacccctaccacgacctcgacatcaaggaggccctggcgcggctgccgcgggaggtggtggacgcccgcaaccagcgcctcaagcgcgccatggacctctccatgaagcaccagtacctccccgccgatgcccaggcgaagcagacaccgttcagaggctatttatctgatatgctagcactggtgaaaaaggagagcgcagagcgcgaagcattgggagcactccccctgtaccagaggaccatcccatgaagcgtctacttcgtaggcctgtttctaattttcttgatgtatgaaagtgaattcaataaaacgcagtggacgattatgtaccatgtattatgctaaaatccttgttgtgtaatgtgttatgtgtatgcttattatgtg

SEQ ID NO: 285 - DNA, 1604 bp, Oryza sativa
  ref <308>: DATABASE ACCESSION NUMBER: AK058435
  ref <309>: DATABASE ENTRY DATE: 2001-12-06
aagctggtagtttaagctggccatacatgcatccatcatccatggctgggatatcgcagctcctcctgcgcgagtccaccatcaccatcaccatcaccaccaccactaatattcccggtgccggcgtcgaattgcccagacaagtgcggcaacgtatccatcccctacccgttcggcatcggcagaggctgctacctcgacctgccgggctccggcagcttcagcatcacctgcaaccacaagacggaccctccccaaccctacaccgccgatgccctcttggtcctgaacataacgctggagacagcggaaatgttcgtcgtctcggctggcgccctcgccgtggtcaagtacccatcagtaagagcaagaagtgccatcacgagcaaatttatcactactactcaacaagaagaagaacattctatgcaagtaaaagtaactgtaggaatgcctgtcacccaacaagtaaacatgacattcttaccaagcggatacaccttgagcgcaccgtaccggctttccccgacgggcaacatgttcacggccgtggggtgcgtcaccatggcgaagttgtacggcagcgtagagaacagcagcagcagcagcagcacgggggcgacgacgacgacagcagcagcagcaggagggcaaatgataggggagagggcgtatgcgtacgacgcgggctgcatcacctactgcccgagcctgagcgacgccgcggcggatggggcgccgtgcaaggacctcggctgctgcgagtcgcccatcacgccaggcctcacccagttcgccgtaggatgggggcgatggccaggtgcatccgacgacgactacggcgagttggaccccgaacagtactaccagtatgcctttgtggcccaggactggtatacgttcaaacaagatcatcttactcactgggacatagacaacatcagtgttcctttcgttcttcactgggatatcaaggatggacctgcatgccgaccagagacaaattatgatagtcccttcggcgcatgtcatagcaaccacagcaaatgcgccaatgtcaccagtggtttggatggctatttttgcaactgctccgagggatacattggcaatccgtacataccagatggatgcaaagatgttaatgagtgtgaaaacaattctatttgtggtgctgggtccacatgcaagaatacagaaggtagctatcgttgtgactgcaatttcggccaaagacgtgacaatagttctgataacatgggtaattgtgaacccatattttccagagctgccatagcagtcataggtgaggttcaatacatgaatgcaatgttgattgaaatttgcagcatgccatacattccacatataatatataatgctctaattacatgcagttctgcattccatgtatacaccatatttgcattgcactacattcaacttgaagctcaacattgaagtgtgaaaacataattatttccagatagaccatggctgtgcctaaatgttatcttttcgcatgagcatagaccatgtggttgtgcctaaattatcttttcacgtgagcaatatatatggactacgcaattgcatgaatatgt

SEQ ID NO: 286 - DNA, 1449 bp, Oryza sativa
  ref <308>: DATABASE ACCESSION NUMBER: AK058436
  ref <309>: DATABASE ENTRY DATE: 2001-12-06
aacaaattgatggtggcatggcagaaaatggtggggacaaagagggtgaaactgatgatgccaataaatcaagaacagggcatgacgagaaaatccctgagaacagtgatatcaaggaagacttgtcagatgatgttgagaagtcaaaagaggcagctgctcaatctgttaagaaaggagaaagtccttcagaaaatgcggatgatccaatttcaagggaagattttaaagaagaatttggcaaattcggcacagtgcggtatgtggacttcagcataggggaggattcaggatacattcggttcgaggattctaaggcagctgaaaaggcccgtgcacttgcggctatttcagatgaaggtggtttgattatgaagggccatcttgttactttggaacctgtgtccggtcaagctgagaaggattattggagtgcgataaagggcggtcaaggaaaatatagagacaatagaagtaacaggggaagggactggaagaataacaggggcgggaggcacttcggtgggaagcgtggtcgccactcggacggccatgaaagggcaaataaagctcgaaaagtcgatgctgctgcttaaaggcctcgtcgtcttatactagtaacctcagcttatgagctctagtgaggaacggaaatgtttgctccgttgcttgcttccacaactttgggagcaaaccttttgtgttgtgtttcttgtcgtgagctatgctctttggaagtaagaaacggtgaactcatgatgaactcactgctcacaaccaccgaatccttccccaaaatccccaatcccccatctctttctcctccagcgagcgagcgcggcggccatgtcggggcgcggcaagggcggcaaggggctcggcaagggcggcgcgaagaggcatcgcaaggtgctccgcgacaacatccagggcatcaccaagccggcgatccggaggctggcgaggaggggcggcgtgaagcgcatctccgggctgatctacgaggagacccgcggcgtgctcaagatcttcctcgagaacgtcatccgcgacgccgtcacctacacggagcacgcccgccgcaagaccgtcaccgccatggacgtcgtctacgcgctcaagcgccagggccgcaccctctacggcttcggcggctgaggtccgccgctgcatccgcctggccgtggggacaagtcttggctcgcggtcaagaaatccgggaggatatctccaattgatctgggtctcagttagtagtagtagcagtagtttgtgttggcatcgttcttgtgcctggggcaagtttgctttcgtgttctgaacttgtgctgtgtaaatccgtatggtgttttagctattaacaaagttgggtcattcgctgcaaacctcatgcttctagttattgttgttcatatgagctagtataaaactgctagttttgtcttgtgc

SEQ ID NO: 287 - DNA, 514 bp, Oryza sativa
  ref <308>: DATABASE ACCESSION NUMBER: AK058437
  ref <309>: DATABASE ENTRY DATE: 2001-12-06
aaaagaaaaagaaaagaggaaaaaaaagaaaactgtagcgcaatctctccccctcgcgtctcgcgtcccggcggcggcggcggcggcggcgtgcctcctcccggcgacctcgagccttccgctcatccatctctgcagaggacaccaccagggtcccatggaagcagcggcggcggcggaggcggaggcgggaacaggcggaggcggcggaagggacgggacggcgacgaagaagaaggcggcggcgtgcgacgtggcggcgctgcgcaagtgcctcgaggagaacaagggcgaccgctccaagtgccaggaccacatcgacgccttccgctcctcctgctccaccaaccccccgccgcctcgcaggtcctagagctttcgcccaatcagccaaagcaactctgtgtctttctttttttcttttttgcttttactatcctcgatccgaataaatggttgtttccagtagctgtttcgatcaaacaagcagagtaaaaacaattggcatatgaac

SEQ ID NO: 288 - DNA, 2062 bp, Oryza sativa
  ref <308>: DATABASE ACCESSION NUMBER: AK058438
  ref <309>: DATABASE ENTRY DATE: 2001-12-06
ctttccttttctttacctcaacacgccgagaacgtggccatgatcagtcacagctaagactatatatatccaagctaggtaggataatatatgcagccggagtgaactatcctcaagaagctttgcaacctccggcgagtagacgagagacgatggcgagcgccggcggtgaggtcgtcgtcgtcgacccggccgcggccgcggtggcgcctgacgtcgagcaccacgcgccggcgccgcggctgactccggcgggcagcggcgggcggctgatggcggagctgctcggcgtgttcaacgggctgacggagcggatgggggacgacgtcgccacctcgtcgtcgtggaccctcctcttccgcgcgctcaagctggcgctgcccgcgctccgcgacgccgccggcggacgctccctcgcccgcgcgctcatcgtcgcggcgtccctcgccgacctccagatggacgccgaggtcatctcggcggggatcgtgaggcaggcgatggacgccggcgcggtggccatggccgacgccgaggcgcagctcgggccgggcgccgccgcgctgctcctcgagagcctcgacgtgaagaacgcgccgtcgcgggtcgacgtcgccgacgaggaggcggcgagcgcggtgcgcaaccggatcctctccggctacgacgtccgcgccgtcatcctcgagctcgccatcaggctcgacgccatgaagcacctcgacggcgtccccaagcaccagcagcgcaccacctcgctggaggtgctcaaggtgttcgcgccgctggcgcacgccgtcggcgccggcgcgctctccaaggagctcgaggacctctccttctggcgcctctacccgcaggcctacgcccaggtggaccaatggctgagcggccaagaagacgactgcaagcgcgtcctcgccacctgcaaggacgacctcctccaggcgctcgccgccgacgacgagctccgccacaccgtcgccggcttcgacgtcaaaggccgatacaagagccggttcagcgccatgaagaagctggtgaaggacgggcggcggccggaggacgtgcacgacatcctcggcatgcgcgtcatcctggaccaccgcgccggcgccggcgacggccaccgcgcgtgcatcaggacgcacgaggtgatcaaggggatgtggaaggacgtgccggcgaggaccaaggactacatcgcgcggcccaagggggacgggtaccggagcttgcacatcgccgtcgacatgagcgagccggggccggaggggaagaagaggccgctgatggaggtccagatccgcaccaaggagatgaacgacgccgccgtctttggccacgccctctacaagggctgcctcgcggatcctgaagaggcgaaaaggctcaaggacatcatgctggcggcggcagaggttgcagcgcagcacctccgcgacgagccagccaccggcgaccagaccggagtccctgccgccgccgcagccgccgccagcgccggcaacatcgagcgagcattccggttgctggacaagaacggcgacgggaggatcagcatggaggagctgacggagctcatggaggacctcggcgccggcggcaaggacgccgaggagctcatgcgcctcctcgacgacaataacgacggctcgctcagctccgacgagttcgccctcttccaaaaacgggttgagctgaaggcgaagttggaggacaaggatgatgagtacaaggagatcctcaggcagaagctgcagaaggtcgacgacacggggctcatccacgtctaccgcaagaacctcagcgacaagctcgtctccggctgaacaaacgagctgcaaaatcgatctggtgatatttggttgtggtttcggcgtcaatttgaagatcattgattgcatgcaaatcccaatctgggttgatgttgatgttttcgtcttgtatgaatcaattcatgttaatggaatctgtaagcctgtaataatttatttggatgctgaacggtaataaggtaccaaaatgctttttaaagtaaaattgaaaggcaattgtgttt

SEQ ID NO: 289 - DNA, 1201 bp, Oryza sativa
  ref <308>: DATABASE ACCESSION NUMBER: AK058439
  ref <309>: DATABASE ENTRY DATE: 2001-12-06
atcagagattgtgttcagccacatgtcatgtgtgtttatcccacaaaccacagttatgccgagaaatgacgacacatcctctcgagtgatcaggatccgtccccggctataatgccggggacgcgtatttatagtaacaggtgtagtgccatttgcatagctctcctcctagctcctacctgtgcatttcagcgttgcaacaacatctcttcctacttttgctaccaagctatagccaacaaagtaaggtaggcgccatgggaggccccggagctagtagcaccatgtcgttcgagcaagcgttcctcaagaacctcctcctgagcctccaagactgctcgacgacgaagcccctggacgccatgagcctccacgagaggaagcgagccgtcaagtcctccgccggcttcgccatggccacggcgcgcggcggcggcgcgcggtggcccaaggccatcgtcttgcagcagcagccggcgtcgacgacggccagggcgcggcggtgcgggaggatcgtgaggcggtgctgcggccggaagacgagatcaggtgcaggtggtggtggtgagatggcgaggaggctgcaggtgaggaggagggccatggcgctgcggaaggtgatacccggaggcggcgacgccatggacgaggcggcgctgctccgcgaggccatggactacgtcgtccacctccgcgcgcaggtcgacgtcctccgccgcgtctcggaagccgtgcagcttcagagacgatacacgtcgtccacctctctccgggattattcctggtctaaatgtgccttgaaaggagaggaggattcgagcatgaatatgaagcgatgatgaattgattgtgctctctttcagaagattagggttgtgccattgcagacggacactggaaattatggtgaccagggatgcatccctcaattatcttgtacaaaatggtgaacaatcggttgatggatcaggattttatcatgttctttgggagatcagtaaggggattgtaagctagctatctactgttgtattgggaggatagaaacaatcttgtagatcatcagagaaatttctgggtgggtgtcatgtttaattttccagcagtgacatgttgtcgactgatctttcctaaatcatccttgcatatatggtctatgttgcatttatcgccttatcggaggatttccagaatctcactt

SEQ ID NO: 290 - DNA, 750 bp, Oryza sativa
  ref <308>: DATABASE ACCESSION NUMBER: AK058440
  ref <309>: DATABASE ENTRY DATE: 2001-12-06
cattatatggcgccaaacatatattgctgtggagcaggaactgccgctgacactgaggctgtaacagatatggtcagttcccagcttcaacttcaccgttatgcaactggtcgtgagtccagagttgtaacctctcttacattactgaagtcgcacctttttagctaccaaggtcatgtcagtgctgcccttgttcttggtggagtagatgttactgggccacacctgcacactgtttatccacatggctccacggacactcttccttttgccacaatgggttctggatcccttgcggcaatgtcagtgtttgaatcgaagtacaaagaaggcctcacaagggaggagggaatacaacttgttgctgaggcaattcgtggtggtatcttcaatgacttgggcagtggcagcaatgtggatgtttgcgtaatcaccaaggggaagacagagtacttgagaaaccaccagttaccaaatccaaggacttacgttagttcgaaggggtacaacttcaccaaggggcagactgtggtgttgtccacaaagataacacaactgaagccgaaggtagaggtgacagagggtgatgcaatggaggagtgattttgtgtgcttacattcagacaagcagtcacgttgagaacatatgctttcatttcagtggaaatgcttgaacaaaaaaagatgactcttgttgtacttccttgggcttaatgcacatctttaagttgattttcgacacatttatgg

SEQ ID NO: 291 - DNA, 1266 bp, Oryza sativa
  ref <308>: DATABASE ACCESSION NUMBER: AK103964
  ref <309>: DATABASE ENTRY DATE: 2002-08-28
aaacccccgcgacccacacccaaacccgccaccgattccgagcgcgccgcggcgagcgagcgggagagaggggggtcgcaagcgcagcttcctccccggccatggatctcctgcacggggagagcgtccagaccacggtggccatcgccgtcgccgtcgtcgcggtcgccgcgggcggcgccttcctcctcctccggtccaggaagcccaagggctgtttggatcctgagaacttcaagaagtttaaacttgtggaaaagaagcaaataagtcataacgtggccagattcaaatttgctcttccaactccaacctctgtattgggccttccaattggtcagcatatcagttgcagaggacaagatgctacaggcgaagaagtaatcaaaccttatacccctactacattggattctgatctagggcattttgagcttgttattaagatgtaccctcaaggaagaatgtcacaccatttccgtgaaatgaaagttggtgattatatgtctgtgaagggacctaagggtcgtttcagataccaagttgggcaagtgagagcttttggaatgctagctggtggatcaggcatcactcccatgttccaagttgcaagggcaattcttgagaaccctaatgatatcacaaaagttcatttagtctatgcaaatgtcacgcatgacgacattcttctgaaggaagaactggacaacatggccaaaacctaccctgatcgctttaagatctactatgtcttgaatcagcctcctgaagtctggaacggtggcgttgggtttgtgtcacaggacatgattaaagctcatttgccagcacctgccgaggacattcaaatcttgaggtgtggtcctcctccgatgaacaaggcaatggctgcgcaccttgatgagctcgggtacaccaaggagatgcagttccagttctaagctctcctaatggcggagtaccagaataatggaccccatggcctacgctgtcttacgctctcttgtgtcatggagacgtcgtctgacctcttttgttagttgatagcaatacatgattagtcgtgacccaacaattcatgtatcactccatttttatgggcaaatgttatctgcaattggcagaagccctgtgactgccatctggtttacaaactgaacattggatgctgcaccgcggggaaactattcaatccctcgaggggatgttctctcgtttgctcaaaaaccatctaaacggttatgaaaaattctgaaaaaatttgac

SEQ ID NO: 292 - DNA, 1543 bp, Oryza sativa
  ref <308>: DATABASE ACCESSION NUMBER: AK058441
  ref <309>: DATABASE ENTRY DATE: 2001-12-06
acgttttgctacgaccatggcgttcttcctccctctcgcgttctccctcttcctcgccgtcatctccgcctacgtcctccagctcctcgccgacgctcgccgccggctgccgccaggcccgtggccgctgccgctgatcggcaacctccaccagctcgaccacctgccgcaccgctccctcgcgcgcctcgccgcgcgccacgggccgctcatgtcgctccgcctcggcaccgtgcgcgccgtcgtcgcgtcgtcgccggagatggcgcgggaggtcctgcagcggcacaacgccgacatcgccgccaggtccttcggcgactccatgcgcgccggcggccactgcgagaactccgtggtttgcctgcccccgcgccgcaggtggcgcgccctgcggcggctcagcaccgtcgggctcttctcgccgcgccggctcgacgccatgagggctctcctggaggagaaggtggccgagcttgtccgccgcgtgtccggccacgccgcgcgcggcgaggccgtggacgtgggccacgccgcgcacgtcgccgcgctgggcgtcctgtcgcgcaccatgttctccgtcgacctcgaccccgaggcggcgcgcgaggtgagcgacatcgtggacgaggcgtcggtgctgggcaccgggccgaacgtctccgacttcttcccggcgatcgcgccggccgacctccagggagttcgccggaggatggcgaggctggtgaagaggatgtacgccatcattgacgagcagatcgagcggaggatgcatggccgcaccgccggcgagccacgcaagaacgacctgctcgacgtgatgctggaggagggggagagtaaagaagatagcaacgaaattaaccgtgatgccatccgtggactttttacagatttgttcactggtggagagacgacttctcacacaatggagtgtgcaatggcagaactattgcagtgtccaaactcgatgagaagggtgcacgaactcaagagtgtgataggcagcaaacaacaaatggatgaacatgatattaccaaactgccctaccaccatacgaggccgaagccacgatagaaatacaaggttacaccattcctaagggagcgaaagtgcttataaacttgtgggcgatcaatcgatgcgccaacacatggaccgagccagataagttcatgccagagaggttctacgatagtgacattactttcatggggagggattttcaactaattccttttggagctggaaagcgcatttgccttggattgccactagctcacagaatggtccatttgatgcttggctcgttgctacaccgattcacatggacattgccagctgaggctgggaaaaatggagtggatatgagggagaggtttgggttaacactatcatttgttgctcccctctatgtaatagctcaagaaatacaataagaaacatgtgacttttttatgatgaagaatagaagaacattacaaatgtaatgcgatgatagctgctctaaatatgtaatcacccaagatattttctgat

SEQ ID NO: 293 - DNA, 1283 bp, Oryza sativa
  ref <308>: DATABASE ACCESSION NUMBER: AK058442
  ref <309>: DATABASE ENTRY DATE: 2001-12-06
cactggagaagccattttgcatatccaagctccaaccatggcgacgaggccggcgcggttgtctgctcccgcagtggcggctatacttgtcgccgccttagccttgtgcgcagccacggcgtcggcggcgaacgtcacgacgacgacggcgacggcgccgagcggcgggtgctacagccacctgttcaccttcggcaactcgctgatcgacaccggcaacttcatccactactccacctcgccgggccccgtcgcccgctccccctacggcgagaccttcttccgccgccccaccggccgctggtccgacggccgcctcatcgtcgacttcatcgtggagaggctggggttcccgtactggacgccgtacttggccgggaagagcagggaggacttccggtacggcgccaacttcgcggtggcgagcgggacggcgctgaaccagctgctgttcaagaagaagcacctcagcgtcgccggcatcacgccctactccctcgccgtccaggtcggctggttcaagaaggttcttgccatgctcgcctccacagaacaagagcggaaggaggcgatggcgaggtcggtgttcatggtgggcgagttcggcggcaacgactacctccacccgctgttccagaacaagacgctggagtgggtgcgcccgctggtgccgcgcgtcgtccgctacatcgccggcgccgtcgaggagctcgtcgggctcggcgccaccaccgtctacgtcccgggcctcttcccgctcggctgcgtcccgcgcctcctcttcctcttccgggacggcggcgccggcgaccgcgaccccgccacgggctgcctccgggggctcaacgacggcctcgccgccctccacaacgcgctcctccgccgccgcctcgccgagctccgcgccgcgcacccgggcgtcaccatcgcctacgccgactactacggcgaggtgatggagctcgtgtcgaaccccgcggcgagcgggttcgacgacgccctgaccgcgtgctgcgccggcggcgggccgtacaacggcaacttcaccgtgcactgctccgaccccggcgcgacgcagtgcgcggacccgtcgcggcgcatctcgtgggacggcctgcacatgacggaggcggtgtaccggatcatggcgcgcggcgtgctcgacggcccgttcgccgacccgcccatcatgtccagatgccacggctactagcctactagctagcttaagccagtttgggatttgctcatttgttaatttgcacggacaattttttttttcg

SEQ ID NO: 294 - DNA, 858 bp, Oryza sativa
  ref <308>: DATABASE ACCESSION NUMBER: AK058443
  ref <309>: DATABASE ENTRY DATE: 2001-12-06
atatactagacctccgaaccaaaccgagggcaagagcatccgattcgccgccgccttcgtcttcctcgcagagatggcggacgtggaggagtaccgttgcttcattgggaatctgtcatggtccacaactgatgaaagcctcaaggatgcctttggcaaatttggcaacctcactgaagcaaaggtggtttttgacaagtattctggccgttctcgtggttttggctttgtgacctttgatgagaagaaagccatggaagatgctattgaaggaatgaacggattggatttggatgggcgggcgatcactgtcgataaagctcagccacaaggacctggtagagaccgtaatggagaccgtgattatgatcgtgaccgtggatctcgttatgaccgtggccgtgactttggtggtggtgggcgtgcaccacgtggctcaggtggtggtggggattgctacaagtgtggaaaacctggccactttgctagagagtgcccatctggagatggtggtggtagaggtgatagatatggtggccgagatgataggtacggtggtggtggtggcggtggcggccgttatggatctgaccgtggtggtgaccgttattctggtcgtagtcgagatggtggtggctacggtggaggtgggggtgaccgttacagtcgtgaccggtctggtccctattgatggcctatcaaatctctaagaagtatgttccatccaggtatggaagtctatctactattgtgagctgtgtttccttgtgtctggaactttgtgttcatgtagtttgagaactatggtgtaccatgagaaagcatctactttattatcgactgtattactgacattct

SEQ ID NO: 295 - DNA, 471 bp, Oryza sativa
  ref <308>: DATABASE ACCESSION NUMBER: AK058444
  ref <309>: DATABASE ENTRY DATE: 2001-12-06
aaggaggaatttgatgatgcggggcacagcgagagtgccaaggagctaatgcaagattatttcattggggagttggatccaacacccaacatccctgagatggaggttttcaggaaggagcaggatgtgaacttcgcaagcaagctgatggccaatgcagcacagtactggcccattccagcgacagtagtcgggatatcagtcgttattgctgtactgtatgcacgccagaagtgataatcttttgtgacattgattgaagggccatatgaggcattgagggaaaccgacccatttttacccgctcatggatggtgatattgtatttctgtccatagccccaaaagttacaaacactgggtccttaggtacattaattcaaatatttgtttgaaatttatgaaaactatattgtcaaggtgacagtcatttgatgaattattggattcaatactatttaaacatccttgc

SEQ ID NO: 296 - DNA, 850 bp, Oryza sativa
  ref <308>: DATABASE ACCESSION NUMBER: AK058445
  ref <309>: DATABASE ENTRY DATE: 2001-12-06
aaagtcctcacctcccgtgagagatctcctcttgtgcgggcggagatccacagccggcgggctcgacctcctcctcgggcgccatccacgcgcgcgcgatgttctccttcggcggcgggtcgtcgctgacgtcggtggtgccggacgcgaccccggccccggcggcgccgccgggcaccgggacgggcgccaacgcgcaggtgctctacgtcttcaaccgcggcggcgtctgcctgctgtaccgcgagtggcaccggccgctccgcacgctcgaccccacccaggaccagaagctcatgttcggcctcctcttctccctccgctccttcaccgccaagatcgatcccaccacagcagaaaaggggaatcttggggtgccactactgccgggccagggttgctcattttacagcttcaagacaaacacatacaaattgaacttcctagagagcccttctggtatcaagcttattctaattacacatccaaggactggtgatcaacgtgacacgctgaagcatatctacaacctatatgtggaatatgttgtaaaaaatcctttgtacgctcctggcacaccaatcaagtgcgagcttttcaataagcaccttgatcaatatgtcaaaacattgatatgatacttttagaggttataccgatcctaaatacggttaatgtcatatcttctgggtaactttggtacgcttactggtatcagtgtgctatttgatttattactacattaagaggtctagtgttccttgaggaatatgctaagacttttctatcacaaacattcccttgttcctgttgtacattgaacaatgctgcattacatctgttgaactgc

SEQ ID NO: 297 - DNA, 1408 bp, Oryza sativa
  ref <308>: DATABASE ACCESSION NUMBER: AK058446
  ref <309>: DATABASE ENTRY DATE: 2001-12-06
gattattgaagagcctgaaccatccattttccattggaatgaggttcagagtttgctatgagagtgaagatgctaatgagaggtccgctggattaatttcaggcattagtgaagttgaccccataagatggcctggatcaagatggaaatgcctactggtaagatgggatgatagtacagatagcagccaccaaaacagagtttctccatgggagatcgagagagttggtggcagtgtctcggttacccattccttgtcatctgggtctaagcgaaccaaattgcactttcctcaaggcagtttggatactccatttcttaatggaaatggtcacccggactccatgggaactgaaaatttccacagggtcttgcaaggtcaagaatttaggggttctaggtcccatggtgttgtatgctctgaatcacctggtgtaccaaactttcaatctcctgacaataggagattttctgctgatatgcggggctacatgatgccagcaagtgggcccccacagcggaacacagagtttacttatcagcccataggcttcagtgagtctcttggattcccagaggtcttgcaaggtcaagaaatgtcacaagtagttcctttgttccgaggagctacttttggcgctcgtacacagaatgacagagttgtctctgctaattctgtgcatagatcagctgcacagagtggattgctagcttcaactctagggcatcccatctcgcagtttactctgtcatcgtcaaaggtatcttctccctcgtcggttctgatgtttaaccaagcgacagctccaaatcatgaaacagtaagcggaaccaacaacaaaggtatgcatgtcagccagtttgcttcccaggagatgctctcagaaactgtaacctggcccggcacacaacgtcaaacgccgagcgaaatcacgagcaaccagttcgccctggcgagaatcccagctcctccaagcggagctgaatccggattgcccaagagggatgccgggagaagcagctgcagactgtttggcttctccctgacaggcaacatgctgggagaagatggagaaggcctagatgatggagccattgaagctggttgcgaaaacccgcccgtgctggagctgtttgggcacagccattctactcccggtgctcttcatgccctgtgtgctgctgctcccctgggaatgtgatgctgctgcagtactgatggtttgctctggggaaatggtcgttgcatcaagctacctagctgaaacaaactgaataatgtgttagctacttcctagatttcttcggcacattcttgtaaggattgcagcggcgccatttgtatgttggtgccacatgatgcatgtaagactgtaactgtaccttgaaatttcggctgtttgtccgt

SEQ ID NO: 298 - DNA, 660 bp, Oryza sativa
  ref <308>: DATABASE ACCESSION NUMBER: AK058447
  ref <309>: DATABASE ENTRY DATE: 2001-12-06
ttgtgcctttcccttgcagaaaacagttcactgtagttattcttatgccgaagtcatcctgctggaactcgtttaaggcactgcttacttggagccctggtggatttagcagagacgcaaagattttggctggcatggctggcgcaatagtgttagcggtcagtttatggagatactcacgtagcacattgagatcatagcacgtctatcacgctctcgactgttttagtaagatccaaaaatggatctgtcaagacaatcatctgcttgactccaggtacatgagctgacgacaagattttggtttcctcctgggatgctgcttcctatctgagagtggatgtggtgattgtccgtcacagaagaaagtatacagaaattggtagctaacagattcattgccgcatgcgtgcgctaagcctgtaacacaacaccatacgattcttttgtcgcagcatacgtgccccgtaacagccactgatgtatattgacacctcccatttcatttgatcctctagactgcaagtaggaaacggcaggttgcatgctattagctgaagtagtagcggttttgtttcttggtgagctttggatgtgtgtttgtgggaaaacccagaatgataaaagaatataggagtaaggatgcagacatttgtatgc

SEQ ID NO: 299 - DNA, 1368 bp, Oryza sativa
  ref <308>: DATABASE ACCESSION NUMBER: AK058448
  ref <309>: DATABASE ENTRY DATE: 2001-12-06
aaagaggagggcaggtgatatactctgggcaattgggtcgtaattcccagaaaatgattgaatatttcgaggcaattcctggtgtgcctaaaatcaaagataagtacaatccagctacatggatgcttgaggtcagttcagttgctgcggaagtacgcttaaatatggactttgctgagtactataagacatcagacctgtacaagcaaaacaaggtattggtgaatcagctaagtcaaccagagccaggaacatcagatctgcattttcctacaaaatactctcaatccaccatagggcaatttagggcctgcctctggaagcaatggctgacctattggcgcagcccagattacaatcttgttagattttccttcactctgttcacagccttgctactcggcaccatcttttggaagatcggcaccaagatgggaaatgccaattctcttagaatggtcattggagcaatgtatacagcagtgatgtttatcggtatcaacaattgtgcgactgtgcagccaatcgtgtcgattgagagaacagttttctaccgagagagggctgctgggatgtactctgctatgccctatgccattgctcaggttgtcatggagataccctatgtgttcgtccaaactgcatattataccctcattgtttatgccatgatgagcttccagtggacagcagccaagttcttctggttcttcttcgtctcctacttctcatttctctacttcacctactatggtatgatgacggtggcaatctcaccaaaccatgaggttgcagccatctttgccgcggcgttctattccttgttcaacctattctcaggattcttcattccgagaccaaggattcccaaatggtggatctggtactactggctttgcccattggcatggacagtgtatgggctcatagtgacacagtatggagacctagaacaaatcatctcagtccctggccaatccaaccagacaatcggctactatgttactcatcattttggatatcacaggaaatttatgccagttgttgcgccggtgctcgtgctcttcgctgtgtttttcgcgttcatgtatgccatttgcatcaagaagttgaacttccgacatcgataggggcattgaaacaacaggcaaaatctggttggaaacttttttttggttttgaaccaaatcttcttttgtcctttccccacagataatatcttcctttatcctcacatttttgtggtctatatatgccatgtaaatatgctggtaggttttctgtattccatacatcgccaaatgtggcgaggtttcatatgaccttttagctttggaaatgtaaactttataagagcattgttgtcag

SEQ ID NO: 300 - DNA, 1600 bp, Oryza sativa
  ref <308>: DATABASE ACCESSION NUMBER: AK058449
  ref <309>: DATABASE ENTRY DATE: 2001-12-06
gtctccactatactacctagctagtctacctccattggtgcctagctagctagctaggctaaggagggagagggttcgagatggccatggccggcggcgagccgacgctgatgccggtgtcggcgatgtgcacgccggcgttcgtggcgcgggtggtgcggagccggtggttcgtggtgttcgcgtcgatggtggtgatggcggcgtcggggtccacctacatcttcgcgctctactccaaggagctccgctccacgctgggctacaaccagcagacgctcaacaccctcagcttcttcaaggacctcggcaccaacgtcggcgtcgtctccggcctcgtccagcaggtggcccccacctgggcggtgctcctcatcggcgccgccatgaacctcgccggttacctcatggtctacctcgccctggaccgccgcacggcggcgccgccggtgtggctcatgtgcgtgtacatctgcgttggcgccaacgcgctcaccttctccaacaccggcgcgctcgtctcctgcgtcaagaacttcccgctcgccgtcgatcgccgtcgagcaccccacgcccacgaaagaagccgacggcgagccggcgacgtcgtgcgtggggaggatgttcaggccgccggagttgggggaggactacagcatcatgcaggcgctggtgagcgtggagatggccgtgctgttcgttgtgtcggtgtttggcatcggcgggacgctgacggcgatcgacaacatggcgcagatcgggcagtcgctgggctacccggcgaagagcatcaacacgttcgtgtcgctcatcagcatctggaactacgccggccgcgtcggcgccggctacctgtcggagatgctcctcgcccggtacaggttcccgcggccgctggcgctcaccgccgtgctcctcgcctcctgcgtcggccacctcctcatcgcgttcggcgtcccgggctcgctctacgccgcctccgtcatcatcggcttctgcttcggcgcgcagtggccgctgctgttcgccatcatctccgaggtgttcggcctcaagtactactccacgctcttcaacttcggctccgccgcgagccccatcggcgcctacgtgctcaacgtgcgggtggcggggcggatgtacgacgccgaggcggccaggcagcacggcggcgtcgccgtcgccggcgacaagatctgcaagggggtgatgtgcttcaagcgctccttcctcatcatcaccggcgtcaccttcgccggcgcgctcgtctcgctgctgctcgtgtggaggacgaggagcttctacaagggggatatctacgccaggttcaaggtggcgccggcgacggccgcgacgtcggcggcggcggcggcggaggcgagctcgccggaggtggaggagaagaagggcactgagaagaacaagaaagacggagttcatgaacacgtgtctaactgaagatgatggatgactaattaacctatatatttttcagttgttttgaacgataattagtgggaagatgaaacagtttgtgtattattactggtgaatctgtgtacttccgtgttaaaatgtgatgaggtaaattcgcatggct

SEQ ID NO: 301 - DNA, 1387 bp, Oryza sativa
  ref <308>: DATABASE ACCESSION NUMBER: AK103965
  ref <309>: DATABASE ENTRY DATE: 2002-08-28
actcatctcatctcccttctccagatcaaaagacccttgctttccctcaggatcggccatggcgaccgccgttgcgtcccaggttgctgtctctgctccggctggctcggatcgcggcttgaggagttctgggatccagggtagcaacaatattagctttagcaacaaatcatgggttggcaccacattggcgtgggagagcaaggccacgcgaccgaggcatgcgaacaaggtgctctgcatgtcagttcagcaagcgagcgaaagcaaggttgctgtcaagcctcttgatttggagagtgctaacgagccgccgctcaacacatacaaaccaaaggagccttacaccgccacaattgtctcggttgagaggatcgtaggccccaaggctccaggagagacatgccacattgttattgatcatggtggcaatgtgccttactgggaggggcaaagctatggcattattcctccaggggagaacccgaagaagcctggtgcaccacataatgtccgtctttattcaattgcatctacaaggtatggagattcattcgatggaaggaccactagtttatgtgtgcgccgtgccgtttattatgatcctgaaactggcaaggaggacccctcaaaaaatggtgtctgcagtaacttcctatgtaattcaaaaccaggggacaaggttaaagtgacaggtccgtcaggcaaaataatgctcctgcctgaggaagatccaaatgcaactcacatcatgatagctactggcactggtgttgctccattccgtggctacctacgccgtatgttcatggaagatgtcccaaagtacagatttggtggcttggcctggctcttccttggtgtggctaacactgacagccttctctatgatgaagagttcacaagctaccttaagcagtatccagacaatttcaggtatgacaaagcgctaagcagggagcagaaaaacaagaacgctggcaagatgtatgtccaggacaagatcgaggagtacagcgacgagatcttcaagctcttggatggcggcgcgcacatctacttctgtggtttgaaggggatgatgcctgggattcaagacaccctcaagaaagtggcggagcagagaggggagagctgggagcagaagctatcccagctcaagaagaacaagcaatggcacgttgaggtctactaggatctaagtgtccaaggattatgattgttgcgcagtgaaaaagagaaaacaaaacgcatgatctgatgattcttgtagggtggtgtaaaatcatcattttttttctgaatatgaatcataaaatcacccatgtaattcataagcttctgcatcacatgatgaacgaaaggaagcatgtaacttttgcctgtc

SEQ ID NO: 302 - DNA, 2044 bp, Oryza sativa
  ref <308>: DATABASE ACCESSION NUMBER: AK058450
  ref <309>: DATABASE ENTRY DATE: 2001-12-06
aacgaactcatccaatattgatcaggtcaattcagatatctcatcacctcaagagcatcatactcttcagaagcatgactcaactgaaggacaaaatgtggcccgacgccacattagctcgacggttactgttactcctgaaaagttggttgacgatcaatgttattgggagggccaacatcagaagaaagatcagagatcatcaagtggcagaaatttctccacactgaagtctggtgtagctgtaaggacagcacaagcattgccacaagatgaactccgccatgaagtgtgcattggaagaaatgcttctgcaagacggtttcctttggctgtaagaagtgatgatgtgctagatccagaatctattaaaaaacgtggcaatgtttgggataggctaggaaagcctgccataaaggatcgtatttgcgctacagaagatgatgacatgcatgttcaaaatggactacataagaaggcgaagttaatggtcactgagcatgagctaagatgccgtatgaactcaagtacagaaggagatttatttgatatagcaaattccagaagatttcccagaagctatcaagatgtcaacacagtacaagcacatgagcacacagagaagtccaatagaagcaggttgattggtcggataaattttggtgatattgagcgtaatcagcttcaagttagagatgttattcgccaaaagtccagtccaaatttgccagcaagaagtgttccactacaaagtcagaatgaattcatatctgaagtgaagagctcagtaacagcagtctctgagtcagcatgccatgtgagtaaatcaacaaaaggacaagtaccaggatctagcaaattgggtcaactagctacacggagaaatttagagactgaagttttgcaaagtcagcaagttagcagcccagcgcaatctaagacaggatcttctgtacatgaagatggtggaaattgctgtaacaagcctatgaaaaatgaaatgctggatgtgaaactaaagctcaaacaagtggaactggatgtgctcaagcttcgttccaagcaggcacagataaacaatgtgaagcaaggtttcctatcatcaggtccccatgctaatctagatgaggatgctgactccagaactgttctcgtgacaaatgtacattttgcagcaacaaaggaagcattgtcagggcattttatgaagtgcggcactgtgcttaagataaatatattgacagatgcaatttctgggcaccctaaaggggctgcatttgttactttcactgacaaggaatctgttgagaaggcagtatcattgagtgggtcatcatttttctcaagagttctaacagtaatgcgcaaagccgaagcacctccaggttttctggcatctgttcaaccgatcgggaggcctctacagtcatggaactcaccacccatccagaaaggggtgagtccaaggcagatccctggttatcacctccaatggaaacgtgagcaatctgtgctggagaaatcccctgccagttgccctactaactgaagaaaaccacaacaaatggtctagaagaaaataggcctactctacattggcctggcagtggactgtacttgcaaatgtacaaagtttttgctggagaaaaatggccatgtttggcatctgttactatgcccacaaaatacaggtttcttccatacaaggtattgagggcttcaattgcggcgagatacgtgacatggggagagattgctggcaacgccaaatgaatctgttgatcagtttccgattggacacgttgtagcgtatgcctgaaaactgttttctgaacttcacttgagtctcttcatatctctactgtcacccttgtcaaatgtaagcagggcgggtattctgatgataacatgaaatgaaatcacagttctgaaacatttacaaacatttctaaaagcagtatatgtagtatggagtaacatataggtaaaagtacattgtgttaaggtatatgaaaaattaatgcttccacctcggtctcggtct

SEQ ID NO: 303 - DNA, 1202 bp, Oryza sativa
  ref <308>: DATABASE ACCESSION NUMBER: AK058451
  ref <309>: DATABASE ENTRY DATE: 2001-12-06
cagatgtgacaaatgattttagtgatcaggcttgttgtactcctaactgtgaaagtgaagctctagctgttgctgcagctatggagaagggaacaactcatcctattggaagggcagttttagatcattctgttgggaaggacctcccactggttgctgtagaaagctttgagtgcttacctggtagaggagttgttgctactttgagcggtgtaaaggctggaaacaatgaagatgaactttctaaggcatcaattggttctgtggaatacatttcttcgctatacagatccagtggtgaatctgagcagataaaagaggctgtaaaagcttctgcatttgggcctgaatttgtccaggctgctctaacagtggataaaaaggtcaccctttttcactttgaggatgaaccccgttctggtgtatgtgaagttatatctaccttaagagacaaggctaaacttcgcatcatgatgcttacgggagatcatgaatcaagtgctctaagagttgctaaagctgtttgtatcgacgaagttcactgctgtttaaagccagaggacaagttgaataaagtaaaagcagtttcaagggagggaggtggaggtctaataatggttggtgatggcataaatgatgcaccagctcttgcagctgcaacggttggtatagttctagcccagcgtgccagtgcaacagcggtggctgttgcagatgttcttttgttgcaggataatatatgtggggtgccattttgtatagctaaagctcgtcaaacaacttctttggtcaagcaaagtgtagctcttgcattgtcttgtattgtttttgcggcacttccttctgttttgggatttcttcctctttggttgacggtgctgcttcacgagggaggaactcttctcgtttgcttgaactcaatacgagcactcaacagtccgacatggtcttgggtagatgatattcggcaactcattaatagcctaagaaagtacatctcgtcaaagttacagagtacttcgtcaaactatgtagttgatgctgttccgttgtagatattatgtacagcaacagttttctgtcagctttgtatgtatggtactgttggaattttgacgaggagttctaagttgtaaccaaatttttgtaggatgtacatgtactcgtatcactatcgtgtaaagaattttttttcaagttct

SEQ ID NO: 304 - DNA, 1059 bp, Oryza sativa
  ref <308>: DATABASE ACCESSION NUMBER: AK103966
  ref <309>: DATABASE ENTRY DATE: 2002-08-28
cacacgcgcacacgacacgacgcaccaatggcgctcgtctccgcctcctcctccaccaccgccgtcgcggcgctccccggcgccgccagggcctcctccttcctcggcggcgccggcaggagcggcaggctgctgctgaggcaggccgagtcgtcgtccgcgcgggcgtcgttcgccgtgcgcgccgcggcgcccgacaggccaatctggttccccggcagcaccccgccgccgtggctcgacggcagcctccccggcgacttcggcttcgaccccctgggtctcggatcggacccggagagcttgcggtggaacgtgcaggcggagctggtgcactgccggtgggcgatgctgggcgcggcgggcatcttcatcccggagttcctgaccaagatcggcatcctcaacacgccgtcgtggtacaccgccggcgagcagcaatacttcaccgacaccaccaccctcttcatcatcgagctcatcctcatcggctgggccgagggccgccggtgggctgacatcatcaagcccggctgcgtcaacaccgaccccatcttccccaacaacaagctcaccggcaccgacgtcgggtaccctggtggtctgtggtttgacccgctcggctggggcaccggctcgccggagaagatcaaggagctgcgcaccaaggagatcaagaacgggcggctcgccatgctcgccgtcatgggagcttggttccaggcagagtacaccggcaccggccccatcgacaacctcttcgcccatctcgccgaccccggccacgccaccatcttccaggccttcacccccaaatgaggagttcttcaggtgttggagtgttagcaatggctgccaatggaggaagatgaaaagactgttcgtcgacgcgacttacctctcttttttgggatcggagtaggctgtgaatggtggtggtgtattgggatgtaattgtggatggagcactgcatgccttgttgattgtgtacctgtactatgatgtaaccgatgtaaaaaacaagttgatactcttttagaagtgaagttctcttcatc

SEQ ID NO: 305 - DNA, 848 bp, Oryza sativa
  ref <308>: DATABASE ACCESSION NUMBER: AK058452
  ref <309>: DATABASE ENTRY DATE: 2001-12-06
acgcgctaccacacgccaggcaaacccacacgccgccttcccgccgcctccgctcttcttcccccaaccgcgtcgcaagcccacggcgagcgccgccgccgtcccaccgtcgccgatgacccgcggcgtcgctatggcgcacgcgaggctcctcctggcgcgctactacgcgatggcggcccccagttggcctaccgtatccaagaaccttccgctgctgggccatggacgttctcatcatccgatgtatgcaagtcaagacgagattaaaatgtcaagtagaagatggtgccatggttctcctgacaatcaagagctggcaaagaagatttgtgttccatgcaattctaaggatatacatgccatgccagaagattctgctaagaagatgctagaacaagtgggtggttgggaattagcaaccgaaggtgacattctgaaattgcacagagcatggaaggtgaagaattttgtaaaagggcttgaattccttcagcttgttgctgctgttgctgaggaagaaggccaccaccctgatcttcatcttgtcggttggaacaatgtgaaaattgatgtttggactcactctgtcagaggcttaactgacaatgatttcatccttgctgcgaagatcaataacctcaacttagaaggcctcttaagcaagaaagctacagtccaaaagtagttcgcgcagatgaagcgattgatttctgacgagatttatgtacttgcttcggttagaatgcgtgagttgaggtatctttaacttgataagcttttcttgaatttgtaccgggagtttctctgttctttctaaattttaccaatgctgttggaccgggtct

SEQ ID NO: 306 - DNA, 1151 bp, Oryza sativa
  ref <308>: DATABASE ACCESSION NUMBER: AK058453
  ref <309>: DATABASE ENTRY DATE: 2001-12-06
tggccgctgatcgaaccattgccgtcatatgggagagggcgtgagcttcccggtggaagatacatgagtttgatccatggcaatggccttcaggatgttgtcattacaggcgataatggaactatcgatggccaaggcagtgcgtggtgggacatgtggaagaagggcacactacccttcactaggcctcacttactcgagctgatgaactcttctgatgttgtcgtctccaatgtggtcttccaggattcgccgttttggaacatccatcctgtttactgcagcaatgtggtgataagaaatgtgaccgtactagctccacatgactcacccaacactgatggaattgatccagattccagcagcaacgtctgcatcgaggactgctacatctcgacaggagatgatctgatcgccatcaagagtggctgggacgagtacggcatggcctacgggcgccccagctcgcacatcaccatccgccggatcaccggctcctcccccttcgccggcttcgctgtcgggagcgagacgtccggcggcgtggagcacgtcctcgcggagcacctcaacttcttcagctcggggttcggcatccacatcaagaccaacaccggcaggggagggttcatccggaacgtcaccgtctccgacgtgacgctggactccgtccgctacggcctgaggatcgccggcgatgtcggcgggcaccccgacgaccgctacgaccggaacgcgctccccgtcgtggacggcctgacgatcaagaacgtccagggccagaacatcagggaggcagggtcgatcaaggggatcgcgacgtcggccttctccaggatctgcctgtccaacgtgaagctcaacggcggcgcggcggtccggccgtggaagtgcgaggccgtcagcggggcggcgctcgacgtgcagccgtcgccgtgcacggagctgaccagcacgtccgggatgagcttctgtgcaaattcgctgtgaactgaaactgtcaagcgtgcatgttcaggggccaagttgttctataattatcaaggcggtttttttctatcgatgaggcaatgagcgtgttatgttggtaacgcccatcaaagatatgctaaacatttaatcattcgtcagagtatatgagtaattctccg

SEQ ID NO: 307 - DNA, 205 bp, Oryza sativa
  ref <308>: DATABASE ACCESSION NUMBER: AK058454
  ref <309>: DATABASE ENTRY DATE: 2001-12-06
ttaatactcgtttatttctgttcggttaaaactgatgctctgagtccgattattgtccatcggctgttttggaatgcgagtatttacattgctacttcctgtgtcgttattttcgtttgtgctattccctgcttttgctgctattgataactggaaactgtctctgtcattgaatctcagacaagttttctgctattggaaactg

SEQ ID NO: 308 - DNA, 394 bp, Oryza sativa
  ref <308>: DATABASE ACCESSION NUMBER: AK058455
  ref <309>: DATABASE ENTRY DATE: 2001-12-06
gatatgacaaataactatagccacgcatctgacttggacagcagagaaacgtttgaattttgatctgtcttagatcttgaatacagccctggattggcattttcagtactgtattactaaggactgcatggacttggagtactgtattactcaagggctgcatggacttggaagtgacatccaggtacactaggaactgatgcatattatcagcatgtgaaactaccatcatggtctaaggtgcctacatgatcgtaaacttactgcaacagaataagtaatcagatggatcatttacctttgcctttgtttttaggaatgcattttacctttctcaatgcagggaaaagttggtgttgcatgctattaatgcaattagaagcattattatttc

SEQ ID NO: 309 - DNA, 994 bp, Oryza sativa
  ref <308>: DATABASE ACCESSION NUMBER: AK058456
  ref <309>: DATABASE ENTRY DATE: 2001-12-06
atgccgtctcgcaccgccccgttcatctctcgcctccggctcctccgaaccgccgccgccctctccccgttctcgtcctccgcgccgccgcggcacagcccccgcatcctccgcgctatccctgtcggtgcgcctcacccgccgcgcgtctccgcagccgtctcgccgctggtccgtccggtcgccgccgggttcgcgctgttcagcatggccaccgccgcctcctccgccgcatccgtccacgacttcaccgtcaaggatgcaagtggcaaagatgtggacctgagcaccttcaaggggaaagtcctccttatcgtcaatgttgcatctcagtgtggcttgaccaattccaactacacggagctgagccagttgtatgagaagtacaaggaccagggttttgagatccttgctttcccatgcaaccagtttggtggacaggaacctggcactaatgaggagattgtccaatttgcttgcacccgcttcaaggccgagtatccaatttttgataaggttgatgttaatggtgacaacactgcacccatctacaagtttctgaagtccagcaaaggtggtcttttcggtgacaatatcaaatggaacttctccaagttcttggtcgacaaagaggggcgtgttgtggagcgctatgcgccaactacttctccactcagcatggagaaggacatcaagaagctgcttggaagttcttaaaaccttaccgccggcgccaccagatgcactgctgcgttgcattgagcacttggaacttccaataatgttgtaataaaactgtgcttggaattgctgtattttcatttgcgtagccctgctgtgtaatgtataaagtattaacgtgtaatgaaattggcttactgcatcactttgcccctttattgaaatattatctcctgtatctgtgttcgttattgagacctgcgactgcgatgagcaagttttgacgtgtaacgtgtactcgttctatctgtgc

SEQ ID NO: 310 - DNA, 1236 bp, Oryza sativa
  ref <308>: DATABASE ACCESSION NUMBER: AK058457
  ref <309>: DATABASE ENTRY DATE: 2001-12-06
gcataaccaaaagaaagaaagaaaaatcttcaatagtggagagagagagagagagagagagagagcgcttctcctcctctcttctcttctcttctcccccttcgcttctctttccccccactcaatcaaaccctaaccctactgcgtacgccgcgccatcgacgacgacgcgctcgcgcgatgagcgttgagcgagatgggcgcgaccagcccaacatcgactcgttctcgcagctgccgttcatccgccaggcggcccgcgagaagccgccgtcgtcgtcgtccggcggctccgtcgtcgtccctcctgcgcccatccggctgttcggcttcgacgtgccgccggacgcgtccaccaccgccgatgtgctaggagagaacaaggagagcgccgccgccgtcgtcgccgctgaggggagtaaacaaacggcgtccggtctggacgcaatcggcggcggcggcgggagccggaagttcgagtgccactactgctgccggaacttcccgacgtcgcaggcgctgggcgggcaccagaacgcgcacaagcgggagcggcagcgcgcgaagcacgcgcagttccagacggccatggccatgcaccacggccacggtcagtactacccgctcccggacccctacgcggcggcgttcgcggcgtaccccggccaccaccaccaccaccgcttcgccgccaccgccgccgccgccatgcctccgccgccgcactacccgtcgtgggctgcaggctccaggtactacagcggtccaggatccatctcgcagccgatcaacgggagcccggtggcgccggccgggatgtggcggctccctgccgccgccagctgcgtcggcttggcgacgacgacgactacggcggcgccgctgcccgcgcggcgccaagagcggccggcggcgacaattccttcgctgctcggaggcggcgaggagcccgtggtgctgggaggagctggctccacctcgttctcgccgtcgacgtcctcctcctcgtcgtcggcgtcgccgcacgagcggcgcgcgcagccagcgcgtaaagagaatgtgagtttggatctgagcttgtagcagcggaggaatgatggccggtgtcagcctcataattgtttcttaattacaaaacaaaatcaagtgccttttcatttcacgtttggatttattttcagctcgttgagctaataccaatggtactagagatcagctactaattaagatagtagt

SEQ ID NO: 311 - DNA, 562 bp, Oryza sativa
  ref <308>: DATABASE ACCESSION NUMBER: AK058458
  ref <309>: DATABASE ENTRY DATE: 2001-12-06
ggcgtgaactgggctacttccagccaaattacatgggcatccaatggatgggtcaggtactccctgatattctgccggtgaagccagatgagggcccagatcatgtttctcgtgaaagaggtgccataatgatcggtgctgcacctttacccctgaactataatgtgccggtactatcgaaggatatcccaaccataagaaggatcacccgaagggtgactggtcgtggtggaggactcccgacagtgcaagcgcttgccctttcccatggtgatgactgcacagagattgcatgcttcctggatccagatcatgtcagtgccgatcaggttcagcagcaggtggaacagatagcagcagagcaaggacttgaggttgaaaaggggtacttcactgacttctcaaaggatgcaatgcttgaaaaatacttcaagattgtgttgtctgttgattaacatgtgcatagtcttctatggccaaatgtcacgcatgcgttattgtttttgcacagatgattcatacctgtgtaatgatgcatgaaaaacaataaccaattttatct

SEQ ID NO: 312 - DNA, 1248 bp, Oryza sativa
  ref <308>: DATABASE ACCESSION NUMBER: AK058459
  ref <309>: DATABASE ENTRY DATE: 2001-12-06
atcgattcccccaacatattagggctcacgcctcccaaagtcaaaacagcccagcccgaacaagcatttcctcgaacacttcgccctccaccaccatggccgccgccgcctccaccctcgcctccctctccgccaccgcggccgcggccgccggcaagcgcctcctcctctcctccccctcccgctccctctccctctccctcgcctcccgcggccgcatcgccgtcatgccccacctccgcgctggcatcctctccgccgcaccgaggagggcggtgtcggcctcggccccggccgcggccaccatcgcggtcggggacaagctccccgacgcgacgctctcctacttcgactcgcccgacggggagctgaagacggtgaccgtgcgcgacctcaccgccgggaagaaggtggtcctcttcgcggtccccggcgcgttcaccccgacctgcacgcagaagcacgtcccggggttcgtcgccaaggccggggagctccgcgccaagggggtcgacgccgtggcctgcgtctccgtcaacgacgcgttcgtgatgcgggcgtggaaggagagcctcggcgtcggcgacgaggtgctcctcctctccgacggcaacggcgagctcgcccgcgccatgggcgtcgagctcgacctctccgacaagcccgccggcctcggcgtgcggtcccgccgctacgcgctcctggcggaggacggcgtcgtcaaggtgctcaacctcgaggagggcggcgccttcaccaccagcagcgccgaggagatgctcaaggcgctctgaagcgtgaacaactcaagccatcctccacttttcatctcaaatctccatagctcggttcgttgcctacttctctcaagtgttcgcttcttttcctgaataataaatcatggcaacaatggtggaccgtgcagagtagtgttgtcgttttgatgtgtgaagcttctatagcgaacatagtgtgcaatttttaggtaacatatatgagtcttggccttgcactgtttgtcaggtagtaacaacttggcacagctatagactgtagtaacagagttcctttcatgttgaatggtgaggctgtgatgtgttctagagctgaataaacgtgctctggtaaatactgtcaccagatcagactatggagtagtagtaagattttgcttggttaattgggcaatggctatttttcaggatcgttcagttgagataaacatgttttgctgttcagatgagttcg

SEQ ID NO: 313 - DNA, 1182 bp, Oryza sativa
  ref <308>: DATABASE ACCESSION NUMBER: AK058460
  ref <309>: DATABASE ENTRY DATE: 2001-12-06
gaacagtacccagatgattgccatagctattgataggatgatgggttatcgcctactttccaatctggctatagtcaaatgggttttttctcctgctaatgttgatcaatttcatgtttcagatcgtccatgggagattcttagaaatgctgttagtaaaacatacaatcggatttttgacctccggaaagaaattcagacactcaggaaaggtcttcaagctgctaaagaggccagtgaaaaggccgccagagagttggaggaggctaaatctattattgagattgtagatggccaacctgtgccatctgaaaatccaggaaggctaagacgacttcaagcgcgtgctgacaaagcgaaagaaggagaagtaaccactgaagaatctttagaagcaaaggaggccctccttgctcgagggcttgaagaaagcaaggaattgcttaggttactattcaagagctttgttgaagtgctaactgaacgtttgccacctatttctgctgatggagatgttcctaatttacgtgctggagacccgaatgtaaattcttcagcccgtgaccctgaagcaacaaccatggaaatagacaatgaaaatggaggagataacgatagtcagctgaatggtcaaaacaagaaaatcagtcacaatgttggagagcttgagcaatggtgtctctgcacattgggctatctcaagtcgttttctcgtcaatatgctactgagatctggtcccatattgccatgttggatcaggagattttcgttgggaatattcaccctcttatccggaaagctgctttctccggtttgtgcagacctaccagtgaagggtctcacctttgattttgacccttccagtgagttggagtttacctgtattatacgcgacaaatttttcatcatgcttcactaactggacatgcccaaaagtactctgatgtgtactcaggaactccatcgattctcctgtaatcctggccccgaggaacacccttggtggaaagcactgtaacgactttaggtgattaaattatcagttaggtttatttgaattgtagtggactaattttcttgggtgagtaattgctatggtctagctttcttaattccctctgcctgtgttaggacaacgccgtgtttattgataagctgatctgaagccgtcattactttac

SEQ ID NO: 314 - DNA, 450 bp, Oryza sativa
  ref <308>: DATABASE ACCESSION NUMBER: AK058461
  ref <309>: DATABASE ENTRY DATE: 2001-12-06
gaaaaatggtggtggcaaggagagaccaggtagtgactatagtgaagatgatggtgagactgctgagccaaacaaagttagcaccagtagcaagggcgagaaggcagatccggtgagacgatcatcaaggaccgcatcgaaaccccgccaggtaaataaattaaaagaaagatagcaagagatgaagagactcgctgatgttcgcaaagatcattttggtgtgtgtatagctttagctttagatgctctccgatggccatattggtgaaatccttgtagccttgattagtgagttcttttctctgtgtcttgtgcgctactgtaccagattattcaaagatgccctcttggaaattggaaggtgtaatcgttccatactgggcaaaacatatgcttctcctgtgcaacatgaacaatgacatatctaggctatgttgctcgtgtcaaacc

SEQ ID NO: 315 - DNA, 574 bp, Oryza sativa
  ref <308>: DATABASE ACCESSION NUMBER: AK103967
  ref <309>: DATABASE ENTRY DATE: 2002-08-28
cagaccggcggcggcgggggcgacctaaggcgagaacacgagcgaaaccagagagggggcgatggcgacggcgacggcgctcaaccgcggcctccgctccgggatccgcctcctcgccaccggcgctgaggcctccaagacagattctcgtggattccatgccactggtgtgaagaggatgggagggcatggccatgatgagccctactacctccatgccaagcacatgtacaacttgcacaggatgaagcaccagaagccgaaggtgtatctttccgtgctgggagcagttggcattggcatcgcagtcccagtttatgcggttgttttccagcagaagaagaccgcctccggataagctctctaagtgctacataatgaacttactttctatagcactccgcgaagttaaaattgggacttcactttaaattggttattgcttgttactccattttgcacttgcctgaagttgtaagctccttttcatggcgtttgatgtaggaatactgctattttctgttaataatatcatggcatgaactttcctggctgtggagaaaccaggcagcgt

SEQ ID NO: 316 - DNA, 1506 bp, Oryza sativa
  ref <308>: DATABASE ACCESSION NUMBER: AK058462
  ref <309>: DATABASE ENTRY DATE: 2001-12-06
gtttaaaagatatgcaaagtggctagataagctatatgatgtaagctttcggcaaacaatggcttatggaggctggagcttgagtttgaactatctataccattctactcaggtcattgcagtgttgattggagggatatccatcatggctgggaagctaactgctgagcaactgacaaaattcatactctatgctgagtggctaattttgtcaacatggtggattggagacaactggtcctctctgatgcagtctgttggagcaagtgaaaaggtcttccgtttgatggatctacttcctagcagacagcttagttctgaaggccacaggttacagaagttggaaggccggattcagtatgccgatgtatcattttcatatccatcaagacctacggtaccaattctgggtggattgaatctaacacttcatccaaatgaagtagttgcaattgttggtcttagtggaagtggaaagagtactgtagttaacctactacttcggctatatgaacctacagatgggcaaatattagtagatggtgtcccactcagtgagcttgacatcagatggttcagggaaaggattggttttgttggacaggaacctaggctattccgaatggatattagttctaatattaggtatggttgtccaagagaagttagcaatgaagaagtggagtgggctgcaaagcaggcatatgctcacgatttcataatgtctctccctgatggttataacaccattgtcgatgatgctcttcttagtggaggccaaaagcaacgcgttgctattgcgagggcccttcttagggacccatccatcttggtattagatgaagccactagtgcacttgatgctgagagtgaacattatgtgaagaatgtaatcacaaagtttagtactgatcctaaggctagaagaaccgtgatcatcatagctcacagactatctacaattcaagcggctgatagaattatcgtgatggaaaatggtaatattgtggaggatggaaaccacagcgagcttattaataagcacgatggtttgtattccagattagctaggcgacaaaacgacgccctcgattagtcctgaattcacagagattggtctactccacaccattttttttcaagtggaacggcaggcaaggagagttcttagtaattggtgtattctttacgagtgaccctgaccgtggtggccaaacaggtgaaactggatagtttacaaatgatgataactaatcaaactaagaagttgtttcccaccataaaacgggtcggtagtatggaggatccgggaacctgtaactgcaaatgattctttacagaagtcaaatagttatacatgtcatcaggcgcaacctgtaatacaaatgtataggcattctgatcagagtcaagaccatcggaaatcataacttatatactctgcagggaaagtttactccagttttgacaatttgcatagagcattacaccgtatacttatttctc

SEQ ID NO: 317 - DNA, 1507 bp, Oryza sativa
  ref <308>: DATABASE ACCESSION NUMBER: AK058463
  ref <309>: DATABASE ENTRY DATE: 2001-12-06
acagagagagctcgagctcgacatggcgatggcgggtggaggacgaggagactacggcgccttcatggagaggttcgtgctgccgccgccgccatcgcagcaactccctctccacggcctcaccttcgccatcaaggacatcttcgacatcgccggccgcgtcaccgggttcggcaacccggactgggcgaggacccacgcgcccgccgccgccacctcccccgtcgtcctcgccgcgctcgccgccggcgccaccagcctcggcaccaccatcatggacgagatggcctacagcatcaatggggagaacacgcactacggcacgccgaccaacccttgcgcgcctgggagagtccccggaggatcctccagtggttcagctgtcgccgtcgccgccaacctcgtcgacttctccctcggcaccgacaccggcggcagcgtcagggtgcctgctgcctactgcggcatctttggactccgcccttcccatgggttggtttctgcagagaatgtcatccccatggcgcaaatgtttgatactgttgggtggttttccagagatttatctacgttgtctcgtgtaaccaaagtgctgttgccactccctgatgacattgtcaagcaacctactcaagtcacaattcctatggactgtttccagatcttaggctctctcgacgaccgcacctatcaaatcatcaatgcttcggtagcaaagagatttgatagtcagatattagacaataggaaccttggagatttcatctctgataatgttccaagcataggaaagttcatcactgacttctctgaaagcgaactcccttctgtgccagctctatccgtcatttcacatgtcatgcgaggccttcaaaggtctcagtccaaagcaaaccatgcagagtgggtcaacactgtaaaacctaacctaggccctggattacgggagagaatactggaggccattgcatctggggataatgaatccctggaggatttccaagctataagggctgaattcaagtctgcacttgctgctcttctgagggatcatggaatccttgcaatccctacagttcctgggcctccacccaaggtgggcatggaagctgctcctctggaaaatttccgagcaagagcattttcacttctctccatcgctggattatccgggttttgccaggtgagtattccgctgggcatgcgcaatggtcttcctgtgtcagtttcgctcgtggcgcgacatggtgcagaccatttcctcctcaatgtggttgaggagctgtatcagacactcatagacgaagccactaaaacttggtcctcctgaatcctgccctatttcatctgtatatgcctaatacacagtcaaaacacatttcatatggaaatggagtgatactgatacagatactacagtagactgcccatgtaattaacatttgcatatgcatggatgtttgcactgcacagacaaagttctttgggataaaacttgtgctttacc

SEQ ID NO: 318 - DNA, 1435 bp, Oryza sativa
  ref <308>: DATABASE ACCESSION NUMBER: AK103968
  ref <309>: DATABASE ENTRY DATE: 2002-08-28
acacctccattcgctccccgccacacaacacgagaaaccccccacccttcgctcgccgccgccgccgccgccttccgccgcctcgaaccggaccaaccaacgacggctcgcttccctccgaggcggtaggccacctcctcccggcggctcccccatctggccgcccggcgccgagctggggatccatccgcccgcgattcctctcgccggtttgctctccattgccagctgccggtggccatggatgacggggacctcgatttctccaacccggacacattcctctgcccggccgtcggtggtgctgaccccgacggcagctgctccatggacagctatttcgacgacatcctcaaggatacggagcaccatgcatgcacccacacccacacctgcaacccgcctgtgcatgacctctcacacacccacacctgcgtccatgtccacaccaagatcgtctccgccccatccgacactccgtcggatgctgccgagaccgccgagtccccgacggagaacaatgcctccaagaagcggccgtcgggtaaccgtgccgctgtgaggaagtacagggagaagaagaaagctcacactgcctcgctggaggaggaggttgttcatttgagggctctaaaccagcagctcatgaagaagctccagaaccatgccacgctcgaggcagaggtatccaggctgcggtgcctgctcgttgatattagaggaaggattgaaggggagattggggcttttccttatcagaggccagtgaagaacatcgatttggtttctagtgttgatcagggaagttatcttggtggtgcccaggttatgaactcctgtgactttcgatgtgccgaccagatgtattgcagtccagggatgcaggtgagaacaatgggcgaggatggcgctgtgagtggtcaggtgttggggcaaggtgcctgtgatattgccagtatccaatgccaaggtgcaaaatctggatctgcaaagctcccagtctgtggggctatgggtacgatgcctgtcggctgtatgccaaattctgaaaagaaatgaaggatccccatcgccaagacttcaagtcagggcattcaagaaacatcgcataaattgctagcgtctatctctaggaatgtgtgtgattctgtcgccgatgatgcttccacagtgcctgaggcgatttaagttcgttagctatgaagctatcagtatgtcctctagtttgcttagctttccctccgtttttttcttgatgttggaaatggacaatattgctgctagtgactcccaaatgctccctgataaaaaacttaaagattcagcatcattgttttatgccaggatacatgtccagatttggctaggcctcaagttttgatgtgaatctcttgtaaatacatcatgtatgaaatctttgtagtaacatggattc

SEQ ID NO: 319 - DNA, 1529 bp, Oryza sativa
  ref <308>: DATABASE ACCESSION NUMBER: AK058464
  ref <309>: DATABASE ENTRY DATE: 2001-12-06
tgttgttgacgatgaatcaagagaaaatgagggagatcttatagtggctgcttctttggttaccccagaggccatggcgtttgttgtaagatatggcacaggaatagtgtgtgttagcatgaaagaagaggatcttgaaagattgaaccttcctttgatggttgcaacaaaggaaaatgaggagaagctctgtactgcattcactgttacagtggatgctaaagagggaacaacaactggggtatctgcaaaggatagggcaaagacagttatgactcttgcatcccctgactctaagcctgaagacttcaatcggcctggtcatattttccctctgaaatacagagagggtggtgttctgaaacgagctggacatactgaagcatctgtagatcttgctatgttagctgggttacctcctgctgcggtcttatgtgagattgtggatgaggatgggtccatggctcgcctaccaaagctgcgcgtgtttgctgaaagggagaatttgaagattgtatccattgctgacttgattagatataggagaaaaagagacaggctagttgaacgttcatctgttgcacgcttacctttgagatggggtaatgtccgcgcttactgctacagatctgttattgatgggatagagcatattgcaatggtgaaaggggagattggagatggtcaaggcgttttagtgagggtgcactccgaatgcctcacaggggacatttttggatcagcaagatgtgattgtggtgatcagcttgccatggcaatggagatgattgagaaggctggaaggggtgtactagtttatcttcgtggacatgaagggaggggtattggtctcggtcacaagctccgtgcttataacctgcaagatgacgggcgcgacactgtggaggctaatgaagacctaggactgcctgtggattcacgggaatatggcattggtgcacagatattacgtgatctgggggtccgttcaatgaagttgatgactaataacccagcaaagtatggtggtctcaagggttatggattgagcattgtgggcagggttcccttggtaactccaatcacctcagagaatcggagatacctggaaacaaagagaacaaagatggggcatgtatatggattggccaatggccaagctagccatcagacgggcagcaatggtgccaaaggggagcattaggccaatcggactcaggttcacattctaatccacgacaatcttatgtgatggagtttgtcaaattatgctacaacatatgttcgtggtgaaccaatttttttttagctgacagtaggttgaaagatgggcgtaataaaagtatccctttatttgttgtaatccacagccacacaactgggttattactgtaaatatatacacacacataaactgctccctagcgggtacagactccagccttacctgaattgagaagactggcgataaaaatatcgactgagatccaaggcaatactagtatgaatctaactcccaatattgaaag

SEQ ID NO: 320 - DNA, 736 bp, Oryza sativa
  ref <308>: DATABASE ACCESSION NUMBER: AK058465
  ref <309>: DATABASE ENTRY DATE: 2001-12-06
tcagtgaaagccgcgatgatagctcctcatataacttaggaaggttcgattccttcagatcccaggagagcggattcttccctcaggaaagtcgtttttccaggtttgactccataaacaactccaaaggtgagaatgtaactggattcgattcaccgaaaagctcaacaaatttcggtcggtttgattcttttgatgatgccgatccatttggttcaagtggaccctttaaagcatcaggtagcaggtctccccccaaattctgatacaccagggtactatttttagtgaattcatttgtcgatacaaggctgaattcttttgaggaaactccaacgcgttgatgcagtggaacctttttgagtgggaggttggtcattcaccttgtgcgtttttcctgtccattatacggtacaaaggggacaggttttggtatatcctttgtattttgtaaagtacaccgagtttgtttttgttcatagttatcatatctctggaacggctgctgatcatctgctgtttgccatttgtttcttggtttgtaccataccaaatgttacagttggtttactaaactcccaccattttgtaagaaactgaggacgatttagcatgtttgcgatctgtatgtgtaaaatcattttgggatcagcttcggcgtttctgttgtgtcgaagtctgtttttttccctgctgtattatcacggcttgtacactggagtggtttcttagcatc

SEQ ID NO: 321 - DNA, 1777 bp, Oryza sativa
  ref <308>: DATABASE ACCESSION NUMBER: AK058466
  ref <309>: DATABASE ENTRY DATE: 2001-12-06
aagtctaggccattccccctctcgtggccggtcgccggagatccatcacccgccgtcgcccgctctccccggcgatcctccccgagccgcgcgctcgcttcccccgttgtcaccaacctccacgcaggatccgcaccgccgcttcttctctgcccccaaccgcccaatcccctatccctcgcgagactttgcacgcttaagccttaagcttctactaccatttggatccggagaccgggagaagttggagggcacggactccggaggcgtcacccgcgggaggtcccctctgcaccggccggctgcgggcgcggctctgatggcgcacgagcgtggcggcgccgcgtcgtccgccgcggctcccgccaccgaggaggatgcgctgtttattgacttgctacatgaagctcctctctctggtcatcgagagcctagaagcattgttggtggcaccttgtactgtatcttgttggcaggttatgctgctgtggcagtgtcagccccatggatattttaccttgtaccagacatgatccccccattgctatgcagctccaatgttatcattctgattctaacaggtatttttcaacaatattgggttcaccaggtcagaaaagtgagattgcaggggtattacgattttagtgagaaattgaagcgccttgctcaacttccatttgccaccgttgctagtggcgttgcttcaatgctcttaatcatagtctggcaacctctagtacacatactatcggtttctttattgctaaggattgctattgtggttgaagctatatgtgctggatgtttcatgagcttatacttatggcatatccacaagtacaactctctgaatgggcaccctgatattttgcggtccttatattctgcactccaactccaaccatctagttctttggaagaacgaaggtattatgatggtcgtttttctgaccagcaaatggctctgcttcagtaccaaagggagaatattcattacctgagtgaggaggtgctccgcttgcaagaatgcttaagcaaataccagagaactgatgttgggagcactcctcaggccgatcttgctcatctattagcatcgcgtgatcaagaacttagagcactctccgctgagatgaatcaagtgcattcagagcttcaacttgcacgtagtctgattgatgaaaaggactcagagatccagcgcattcgtgtgagcaataatcagtatattgaagaaaatgatagactcagagccattcttggagaatggagcgctcgagcagcaaagcttgaaagagcactggaggcagagcaaatatcgagcattgaattacggaagaacattgcaaaactccgagggcagacttacaaggatcaaaacacctgatctcccttgttttcaggatatattcacctatggcgatgtttgagcaggtttatcaactcttcagctgctaaaggtgccacctgtgatatccttgaattccaaacctctagtgataagaagagtgccaacacagtccagtttcgctaacaacaaagcaaggtacaagatcatcactcaatctgatatgcatcaaggaaaggaaaaatgcctttgctacacctctctcgtgaatgtacagattgatgtttgtaaatgttgttcgagagtatggtgcagcactggttttttgtgcttctacctgatgcttctacaatgacatcttatcatggcaagagttgtgcattgttttctgagcacttgcgaaatgaaaagtgagcatttgtgcct

SEQ ID NO: 322 - DNA, 1316 bp, Oryza sativa
  ref <308>: DATABASE ACCESSION NUMBER: AK103969
  ref <309>: DATABASE ENTRY DATE: 2002-08-28
gtgcacacacagacacacagacgcactcacacactcagcttaagcgagcgagcgagtgaacgagagagagagacagagatggcgagtgttgcctccttcccggtgatcaacatggagaacctggagaccgaggagaggggcgcagcaatggaggtcatccgcgacgcctgcgagaactggggcttcttcgagatgctgaaccatggcatcgcgcacgagctgatggacgaggtggagcgggtgagcaaggcgcactacgccaactgccgggaggagaagttcaaggagttcgcgcggcggatgctggaggccggcgagaagggcgccgacgtgaagggcatcgactgggagagcaccttcttcgtccgccaccgccccgtctccaacctcgccgacctccccgacgtcgacgaccactacaggcaggtgatgaagcaatttgcgtcggagatcgagaagctctcggagagggtgctggacctgctgtgcgagaatctgggcctggagaagggttacctgaagaaggccttcgccgggtcgaacggcccaacgttcggcaccaaggtgagcagctacccgccgtgcccgcgccccgatctcgtcgacggcctccgcgcccacaccgacgccggtggcatcatcctgctgttccaggacgaccaggtgagcggcctccagctgctcaaggacggggagtgggtggacgtgccgcccatgcgccacgccatcgtcgccaacatcggcgaccagctggaggtgatcaccaacggcaggtacaagagcgtcatgcaccgcgtcctcacgcgccccgacggcaaccgcatgtccatcgcctccttctacaaccccggcgccgacgccgtcatcttcccggcgcccgcgctcgccgccgccgacgcggcggcggccgcctacccgaggttcgtgttcgaggactacatgaacctgtacgtgcgccacaagttcgaggccaaggagccacgcttcgaggccatgaagtccgccgccgaggtcgtccacgcggcgcccatcgccaccgcttgataaggatcagacttcactagctacggctgcgcgtgccatgatccagatatatgggatgtgtacggtagtgtacgtggtgctgtacatgccgtcccgtgtttttctgcgtaatgtttttacgtactagactactactagtgtgtgtacgtaacctggggatgtaagtatcgcgtcaagtactcaagtgtgtgtaacgggcgctctaatcgtattgttctgtgcttcaatggctaccacgctagatgggccttgtgctaatgttgttttatgct

SEQ ID NO: 323 - DNA, 919 bp, Oryza sativa
  ref <308>: DATABASE ACCESSION NUMBER: AK058467
  ref <309>: DATABASE ENTRY DATE: 2001-12-06
aaaaaaataatgccacatctggtgggacattcaatcagatagagtatcttgttagtcagggttgcatcaagccgctttgtgatttacttgttcaccaagattccaaaacagtgttaacttgtttggaggcccttgataatatcttgagggttggggaggctaagaagaacttgggggcttgtaatatgaacatatttgtgccgatggttgatgaagctgatggcttggacaaaattgaggatctccagaaccatgacaatgttgagatatataataaggcagtttatgtgcttgagtcatactgggtgcaggaggatgaccaacagccctttcttattccatctgtatctgaatctgaatctgacaatgaaatgtttcagtttggcagtttcggtaaaggtaaatttctattcactaatggttggaactgtgaatctgaatctgacaatgaaatgtttcagtttggcagtttcggtgaagtgcccgatttggatggaaatgcaccgtagctgtctgttcagggggctttccagaatcggagagtcaagttatccgagtcatggtttggtcctgctaacttgttatgaggcagcagtcagggttcgtccgataagagcaaggtcagggtatggcaattaggtacattgcttttgtgtggttcgggtgtcttgtgtatagcggttggttcatatggattatggttctccacacaagggggtgggtactggaaattggtcggtcggggaagggcatactcttgcttgtgttgtcgggttagctattacttttaccttcctttcagtagcgtaagctggtatgtctgtggaggtaaaaaaaaaagggaaaagacaaaaatacttggaagctgtaaagccatagtttacattgttgttaatcatgagaacccagtgggttttgg

SEQ ID NO: 324 - DNA, 1242 bp, Oryza sativa
  ref <308>: DATABASE ACCESSION NUMBER: AK103970
  ref <309>: DATABASE ENTRY DATE: 2002-08-28
aagctctccgctcagctaagctctccaccattgcttgcaaagctggtcgtgtcactcctcccgttaagcttcccgcggcggcgagagcaagctaagctaggtcgggcatggggaaggacgaggtgatggagagcggcggcgccgccggcgagttcgcggccaaggactacacggacccgccgccggcgccgctgatcgacgcggcggagctggggtcgtggtcgctgtaccgcgccgtcatcgccgagttcatcgccacgctgctgttcctgtacatcaccgtggccacggtgatcgggtacaagcaccagacggacgcgtcggcctccggcgccgacgcggcgtgcggcggcgtgggcgtgctcggcatcgcgtgggcgttcggcggcatgatcttcatcctggtctactgcaccgccggcatctccggcgggcacatcaacccggcggtgacgttcgggctcttcctggcgcgcaaggtgtccctggtccgcgccatcctctacatcgtggcgcagtgcctcggcgccatctgcggcgtcggcctcgtcaaggcgttccagagcgcctacttcaacaggtacggcggcggcgccaacaccctcgccgccggctactccaagggcaccggcctcgccgccgagatcatcggcaccttcgtgctcgtctacaccgtcttctccgccaccgaccccaagcgcaacgcccgcgactcacatgtcccggtcttggcgccgctgccaatcggcttcgccgtgttcatggtccacctggcgacgatcccgatcaccggcaccggcatcaacccggccaggagcatcggagcggccgtcatcttcaacaacgagaaggcgtggcacaaccattggatcttctgggtcggcccgttcgtcggcgccgccatcgcggcgttctaccaccagtacatcctccgggccggcgccatcaaagccctcggctccttcaggagcaacgcgtgatatcaaaggagttcgagcagccattgttgggggataatggctggaaggcgttgatgaagcaattggccatgatgatgagttctaccgtgttatgattctccctttttcaaaaaaattaagttcgccgctggtcgttttgtttcagcagctgctcctcctcctgcttgtcgtgtgtgtgaagtgaacatccatgtgtttgtaatctgtttttaaatcgagggatgtctcatgtgtttagcctgtactcccatttaatttagcg

SEQ ID NO: 325 - DNA, 1763 bp, Oryza sativa
  ref <308>: DATABASE ACCESSION NUMBER: AK058468
  ref <309>: DATABASE ENTRY DATE: 2001-12-06
aaagaacaggagaattatccccacttccagagtccaaacctccccgtccatggcgacggcgagctcgatccggccgccacgcgcggcgctagtcctcctcctgctcgcgctgtccttctccctcaccctcgccgcccacttcgagggctttggctccgacgacctccactccgcccacgccgacgcggcctcggcagacgacgaagacgacgaggggctcgacgtcgagctcccgccgccgccgcgcatctccctctccacttcaactccttcccctcccgtcaccaccaccaccaccaccacctccgctccaaaccctaaccccgatcctaacccgacgctgaccccgccgaaccccaccccgacgctcgatctctgggacgaggacgagttcgagggcatccctgtcccggaagcggcctcctccgacgaatcctccacgccggcggaagccgccccgtcagatcccgcggccgatgccgcggccgaggcggcgccagccccgccccggcggcccgcggagctgctccgcgcgtacaccgtcgagatcgcgtgcgtcagcttcctgatctgcttcctgctcaaccacttcaccgggaagcggcagaacgaggcgatcgcgctcgcctgggccaccaggttcgccaccagggactccatcttcgacaagaacttcagcctcctcggcaccggcgacggcaaggacacgccgctcctgatgaaggaagggcaggacgtgttcaagttctacgcgagcgggaggcggtactgccaggggatgctcgccaccatggagatgcgcgcgcggcacgacctgctgtccaagctggtggagctggtgttccccaggaaggacaccatcacgttcgaggtggtgatgaacgaggaagccatggaccacgtcatgttggccgtggcgaggaagaaggcggccaagacgatgcagaaggaggagagggatctgcagaaatttgccggggttctgacctcggcacccgccgggaggagatgggttgcggatgagcttgcggtagtggccgagtcaaaggaggttgctggggatatgattactgaagccgtgctggaccaggtccttggtgacaaagcttttgagaaatttgggaaatggttcatctcacttcatttttcagatcaactggcaggctcttacaagaaagtcctttctttcaagtttgtactgccagatgcaagcaacatggctgagatgacaagattagttgctctcgtgccatactacattgatttggtggggcgttacaagctcagcaaccatgctcgttccaaaactgaagctgcaagaacaaaagcttcccaggaggctttcagggagcaacagggtctaaggcaggaagcccttcaaaggaagagggctgagaagaaaaaacttatggaagaggcagaggccaaattgagcgccgaggcactccgcaagaaagaggaaaaagaaagggctcgtcagatgaagaagtccatgcccaaagttaaaatgctccgttcctagtaacatcaaagatatatcacagcactggctttagctattcagttgctgattagcttattgttgcctgccagactcttttatgttcttctgggccatcaacttttctttgccatggggggatacaagcgaaaggaaataggtgaagataatcttttgctgttgtttcagcttgtcgcttgttgggggattaatttgaaacgctgttttccttgtattaatatacgcaggctggaatggcgtc

SEQ ID NO: 326 - DNA, 1195 bp, Oryza sativa
  ref <308>: DATABASE ACCESSION NUMBER: AK058469
  ref <309>: DATABASE ENTRY DATE: 2001-12-06
ataaacctatgacagccgcaactttctcaagcgatggatctgttcttgcggttgcagctgagaatgtcgtcacattgtgggatcctgataataacacacttgttggtgtgattgcagaggcactatcgcccatcacaaaactttcgttcattgggacatcaccatttttgatgtctctatctcagagctccaaaccacaggttgccatgtggaatgttccaaatctttccatgcaatggtcttacagcctctttgcagaagctgcgtgttgctcgtcaagtagaagtgagtttgcagttcttgctcttctaagctgtcctgatggagaaacactggcagagcaagatggggtgatactacttttcgatgcagaaaatccaaagcctgtttcttcctggtcagtaaagaaggcaaggggaggcagcgttgcttttttgaagggtgattcctctttggatgcaaacagaaaagacaggatagatggagaggcatcatcgctggtttatgtcaacggttctcatgagtatgttatatttgatccccgaagcaatggagaattgcatattggcaagagtgcacacaaaaatattcaaactgaggagcctggaccaattggttatgcttctatttttggagaacttccgaaactggagtcaaagaaagatgttccagaaattctatttataccgtcagagagaccttgggagactatattcagtggatcaactcatgttcttccgcctctcacaaagttatgtcctgcattcttggcatcattgcttgagaagagaccagttgcaaatgagtgagaaagtgccgaagttttgtcccgtcatacaatgcaacaaggaaccctgctagttacaaatggcattgcacatgaaatccttatgactagtgctgcccgaagctcgtccaatactgctgaagctggttgtgggcattgattatctgtcagctcagctcacaagagaacacatgcgatgatggctacagcaacgctgttgggtgaatgagccaccctacctctttttgtaggtgatatctagtgatctatcttcagatcctagcaaattttgtttccataggctaatctgtaattctgatagcaaaaactagctctttttggtgaaaatgtaacgcgctaagatatccagtaacacggtgagtgaatgatgctgttttactgactctg

SEQ ID NO: 327 - DNA, 1847 bp, Oryza sativa
  ref <308>: DATABASE ACCESSION NUMBER: AK058470
  ref <309>: DATABASE ENTRY DATE: 2001-12-06
accaccacctagatagaacaataaaaattgctgcatccgtcagagctggccactacaaaaaccagctgcatcacaggagagagcaggcagagaggcagctctccagctcgcgtttggggttgaccagttactccggcgaaccgacggcaagccggcgccggcggcgagggtcgtcgggagcggaagagagggagaaagaatggccaccaccgcctccgtccgacctcccctgctccgacaagcagcaggttcagaaaaagcctcactcctttgcaaaccaaagcagagagcttctgtcagaagaagaagcttcactgccagggccagctcgaatcctgtgagcatcccgaagcaatggtacaacctcgtcgccgacctgccggtgaagccaccgccgccgctgcacccgcagacgcaccagccactgaaccctagtgacctgtcccctctcttccccgacgagctgatcaggcaggaggtgaccgaggagcggttcatcgacatcccggaggaggtcgccgaggtttacaagctctggcgcccgacgccgctgatcagggcgaggaggctggagaagctgctgggcacgccggcgaagatctactacaagtacgaggggacgagcccggcggggtcgcacaagccgaacacggcggtgccgcaggcgtggtacaacgccgccgccggggtgaggagcgtggtgacggagaccggcgccgggcagtggggcagcgcgctgtcgttcgcgagcagcctgttcgggctcacctgcgaggtgtggcaggtgcgcgcgtcgtacgaccagaagccgtaccggcggctgatgatggagacgtggggcgccacggtgcacccgtcgccgtcggcggcgacggagtcggggaggaggatcctggaacgcgacccggcgagcccgggcagcctcgggatcgccatctcggaggcggtggaggtggcggcgagggacgccgacaccaagtactgcctcggcagcgtgctcaaccacgtgctgctccaccagacggtgattggggaggagtgcctggagcagctggcggccgccggcgacgtccccgacgtcgtcatcggctgcactggcggcgggtccaacttcggcgggctggtgttcccgttcatgcgcgagaagctcgccggcaggatgagcccggcgttcaaggccgtcgagccggcggcgtgcccgacgctcaccaagggcgtctacgcctacgacttcggcgacaccgccggcctcacgccgctcatgaagatgcacaccctcggccatggattcgtccccgaccccatccatgcaggagggcttcgctaccatggaatggcgccactaatctcccatgtgtatgagcttggattcatggaagccattgccatccaacaaactgaatgcttcgatgctgcgttgaaatttgcgcggacggaggggatcatcccggcgccggagccgacgcacgcgatcgcggcggcgatcagggaggcgatggagtgcaagaggacgggggagaagaaggtgatcctgatggccatgtgcgggcacggccacttcgacctggcgtcctacgagaagtacctgaggggcgacatggtcgacctctcccactccgacgagaagctgcaggaagccctcgccgccgtccccaaaatctgatcaatgcgatacaaaaataatcatcagtaaccaagaagaataatctctgttgttgtgttcttggcatgttgttgttttgccttggcgaccgtgttcatctgctgttgatttagggacgcatatggactgaataaatttgatcaataaatgaagtagtttcccctaataggggaatgtttggcac

SEQ ID NO: 328 - DNA, 1364 bp, Oryza sativa
  ref <308>: DATABASE ACCESSION NUMBER: AK058471
  ref <309>: DATABASE ENTRY DATE: 2001-12-06
aaatggcgacatcttctccaaatccctcacctttatttcctcctcgtctcctcctcctccgctctctcctcccgcgtctaaaccctaaccctaccgcagccgccctccatggccgccgactaccgcacacccgaccgcctcctctccgccgccgcccccggcgaggagcaggcgcaggatccgcccaagccggtgctcgccgtcgccgcgacccatgacggcctccggttctggcagtacatgctcgccggctccgtcgccggcgtcgtcgagcacaccgcgatgttccccgtcgacacgctcaagacgcacatgcaggccggggcgccgccctgccgcccggtcctgtcgctgggggcggtgctgcgcgccgccgtgtccggcgagggcggcgtcagggcgctgtaccgcggcctccccgcgatggcgctcggcgccggccccgcccacgccgtctacttctccgtctacgagttcgccaagtcgcggctctccgaacgcctgggccccaacaaccccgccgcgcacgccgcatcgggggtgctcgccaccatcgccagcgacgccgtgttcaccccgatggacaccgtcaagcagcggctgcagctcacgagcagcccgtacacgggcgtctcgcactgcgtccggaccgtgctccgtgacgagggcctcggcgcgttcttcgcgtcctaccggaccacggtggtgatgaacgcgccgtacacggcggtacacttcgctacctatgaggcggcgaagcggatgctcggggacatggccaccaacgaggattcgctcgccgtgcacgccaccgccggagccgcagccggcgcgctcgcggctgcagtcacaacgccgctcgacgttgtcaagactcagctgcagtgtcagggtgtgtgcggctgtgagcgcttctcaagtagctcaataggtgatgtattcagaacaatcataaagcgtgatggatatgctgggcttatgagaggatggaagccaagaatgctgttccacgcacctgcagctgctatctgctggtcgacgtacgaggcctcaaagtcgttcttcgaaagattcaacgagaaaagaaggaaataatctgaacattcaaggctcaaagcccatgtattttcttgaagtcaatgtacttctatactgcaccatacatcctcagctgacagaacgaagcagcccccaagatgctgttgtggtgatgcaggcctgctagtgatccatgtggaatgatgtactgtgcatcaaaacatgtccaaagatagatctctgtaccttgtatttcatttcagccaagttaatgtattattttgcctgctgggtccagataataattacaaggataatttttgccc

SEQ ID NO: 329 - DNA, 1380 bp, Oryza sativa
  ref <308>: DATABASE ACCESSION NUMBER: AK058472
  ref <309>: DATABASE ENTRY DATE: 2001-12-06
aaaaaaatccaaactcttctctctcgtctcgtcgcggaggaggccatgagcttggcttatccgctcctccgcctcccatgccgctgctcgctggcggcggcggcggtgccggcgccgccgagggcgtcgcctgggcctactatatcggtgtctatgtccgtggatgggggtgagggggagctgacggggagggagaggcggaagcagcggggggagaggcgggggctgcgggcgcgggactggaaggaggaggtgcaggagcggctcatccacgagccggcgcggcggcggaagaagccacccaagaggacgtggagggagaacctcaacctcgacttcctcgccgagcacggcccgcagtggtggctcgtgcgcgtctccatggcgcccggcaccgactacgtcgacctcctcaccaaggcgatctcacgacggtacccggagctctcgttcaagatttataatccatccatccaagtcaagaagagactgaaaaatggttcaatcagtaccaaatcaaagcctttgcatcccgggttggtctttctgtattgcaccttgaacaaggaagttcatgacttcattagggacactgaaggttgttatggttttattggagctacagttggctctatcaaaaggcagattaaaaagcctaaacctattccagttgaagaagttgaatcgattattagggaagaaaaggaggagcaagagagagttgacagagagtttgaagaaatggaaaatggaggaattgtcgagtctttcaacaaacccgttgaagattctgaactcatgctaatgaataagatcaagagacagtttaagaaaccaatctcaaaaggtggcagcaaccacaatgcttttacgcctggtgctagtgttcatgttctatctgggccttttgaaggcttcactggttcactcctggaagtgaatcgcaaaaataagaaggccactcttcagttgacactttttgggaaggagagctttgtggatctagattttgatcaaattgaggcagttgatacttgatggtgaaaaaaaaagtcttgcggatcattagctttgatcaatacagctggggcctggaggaaatagctaagattgaatccatttaactttgagtaactaccgtgacaaaactgttagcatacgggctacctcaagaactgacctgagttacatgaccacatgagggctagatttgtcggacaaggaaagtcatgtagaaaacaaggttcaaactttttaggttggtatttttagatgcataggctattcatttcaaaattttggttcgtacctacatttatcaataaattcaataaaagaagaacaattctttgcacaagggttttgttcttatgagcattt

SEQ ID NO: 330 - DNA, 1787 bp, Oryza sativa
  ref <308>: DATABASE ACCESSION NUMBER: AK058473
  ref <309>: DATABASE ENTRY DATE: 2001-12-06
agccgccattcgtgcacaggcatcatggcgacctccctgaccctgatcgccacaccatgcacggctcctagatcatcctcgtccttcgcactcgctccacggctgccgcctcgttgcagcaacgcgactgcagcacgtcgccgcgccgtgagggcaaccacgctgcaatcggatcaggaacctgcaggatcaggagacagcggcgccacgacgacgaagctgtctgcctcgaccagcgtccgccaagaacgctgggaaggcgacctgcccatcgagggatgcctccctccttggctgaatggcacgtacatcaggaacgggccggggatgtgggacgtcggggagcacgcgttccaccacctgttcgacggctacgcgacgctcgtccgcgtctccttccgcggcgggggtggtgcgcgcgccacgggggcgcaccggcagatcgagtcggaggcgtacagggccgccgtggcgcgcggccgcccggtcctccgcgagttctcccactgccccgcgccggccaagagcctgctccaccgcttcggcgatctcgtcggcctcgtcaccggcgccgcgctcaccgacaaccccaacagcgccgtgctgccgctcggcgacggccgggtgatgtgcctcaccgagaccaccaagagctccgtcctcatcgacccggacacgctcgagacggtgggcaggttccggtacacggacaggctgggtggcatggtgcagtcggcgcacccgatcgtgaccgacacggagttcctgacgctgctgccggacctcgtccgtccgggccacctcgtcgtgaggatggaggccgggagcaacgagaggaaggtgatcgggagaatggactgccgcggcgggccgtcgcccgggtggctgcactcgttcgccgtcacggagaagtacgccgtcgtgccggagatgccgctccggtactcctccgccagcctgctcgcctccgagctcgccccgttctacgccttcgactgggtcccggcgtccggcagctacatgcacgtcatgtgcaagtccaccggcaagaccgtggcgagcgtggaggtgcctcctttcatggcgatccacttcatcaacgcatacgaggaggaaggcgacgaggccgccgtcgttgtcgactgctgtgagcactacggtgaccctgccatcatcgagacactcgtcctcagtagactgagattgttaaggggcaaggacgttttacctaacgccagggtggggcggttcaggatcccgctggatgggagcccgttcggcgaacttgagacggcgctggacccggaggagcacgggcgggggatggacatgtgcagcatcaacccggcgcgcctcggcaggaagtaccagtatgcctacgcgtgcggcgcgcgtcgcccgtgcaacttccccaacacgctcaccaagatcgacctggtggagaagaaggccaagagctggcacgaggagggctccgtgccgtccgagcctttcttcgtcgcgaggccgggagccaccgacgaagacgatggagtggtgatatctattgtaagctccgacgatggcgaagggtacgcactggtgctagacgcgaccacgtttgaggagattgcgcgcgtcaggttcccctacggattgccctacggcttccatggctgctggatccctgcgacggaagagtgactgagaaggaaaaacccgtatgaatatctgtagccgagaagactaggatcatatgtatgagcatccatgtaactcgtggggatttttattttaagcactactgg

SEQ ID NO: 331 - DNA, 1759 bp, Oryza sativa
  ref <308>: DATABASE ACCESSION NUMBER: AK058474
  ref <309>: DATABASE ENTRY DATE: 2001-12-06
gcaaatgatgaggatgaggagcaggagattgcctctttggcgatgcggagtattaggatggcttctttgatggctggggagtgggttcctgagactcaggagaatgaagcagttttcgacgcgttgagggagtcatatcggctccttgtgtcaaagcatttggtcacagttcaggaatggatatctgtgctggttagggtcaatctcgcagataatcgtttcagagattctgctttgaaggaattcattgatgttaagaatgaaatacgagcggtgagaaatcggtgtagtgagcttggtcttaatcttgacaatgtccataggcggaagggtgttcaggaggaagaggatgatgacttttgggttgaggggaatattgaggttcctagccctggtagagtaggtaccagtgcagatgttgcaagtagcagcaaggacactagaaagggaaagaagccagtaggtggcacggatactgatgatggcaaggcacctaatgctggcaatagtcctcaagagctggatccagagagggcaaagctgcatgcagaagcccctgtgctgccatggagctctgttttggatcgttggggttctaacagggatgcacttgtaaaccaaaggggacttgagctcgagagccattggggaagggtggataatgatgctgttatacctgctgcaaagattgcagaattaaatgttcatagttcaatatatagagaagatccagttgagattctaccatgccttgcacctctgaagaaaggaggcctttgccagagaagagatctcaagatatgcccgtttcatgggcctattgttccacgagatgccgaaggaaatccaattcatcagagtgatggccattgtgatgcagaaggaaatccagttgggcagactgatggccattatgatgcagcagtaagtcctattgatccgaatgaagacagttctgatgtaagagaaaatatgattatgccagatggaagcagtgatggtgaatgtatttatgagtcctctccttcaagaacggcaaacataaataatgacattagcgacagcgatgtaggtcatgacctcggtaaaattacagtggagcagttggcgagacaggcagtgcagaatgtccggaaaagagacagggatgacaaaaaagctctggaaaaagcccaacgagcgagaattcgtcagcataatcaagatgttttgcgggaagcggctcttgcttcaacctcgcgctcagcggcagactatgacctcccttcgccagcagtgtctcgacggggacgccgaggtaagacaaagggaccaacactggcatcgatgctgaagaagaaagttacttccaaagatagaattgcagagaggcttctgaatgctcgagctagggatgcgacaataagagaagtttcacatactgaagatatgagctacagagaagcattcccaaatcaatggtagtataagaagcctaatttttgctgaataggttggtgaatcgtcatgataagagtgaatcaataattctttctgtgcgcagttttcagttaaccacatgtcttcttgagttgcccagatacaagtaaaattgtaggttttcattgtgaagtttagtttttgtacagtacagtagattgaataagtttcttttatttcttttgcatgttcattttccctttgtaaacatgtatatgtaccactccatacttgctggattaataactatatacgctgaggctgcagttcaaattgtgtt

SEQ ID NO: 332 - DNA, 729 bp, Oryza sativa
  ref <308>: DATABASE ACCESSION NUMBER: AK058475
  ref <309>: DATABASE ENTRY DATE: 2001-12-06
tgccaaccagaatgaaaaagaggtgatgccttcacctcaggaagaggaagcagcaataaagaaaaagtatggtggaatagttcccagaaagccagcgcttatagccaaggatcatgagcgagcttactttgattctgctgattgggctttggggaagcaaggaggacaccctcaaaaacctaaagggccgcttgaagcactccgaccaaaattgcagcctactcaacagcaagcacgttcgcgtcgatttcttcatgcttctgttgacaacgaagagggtcttaattcaccgactgaagatgcaagccagaaccaggaatccaatgaggtcaaggacgataaatgattgcttttaaccgattccaagtttcaccacaaaaccactgtacgcggtttagatacgagaatgactataacaagttgtcttttttgttcgggattttgccagctgctatgctcatgccaatttgttacttcggtaataagtactccgtcgcctgtaatgctcgtgcctctgtgaggtttagctgaattttggaaatcatttttgaattttgggacatggtatcatccttatattgatgctccctgttttgatgcatgtaacaatctgagacggaattgcaacaggcgttgtgttgcactgaatatctgagtaaacaaaaggaaacttggagagtgataaccttttgtgctttataatgcagttatgcagaatagcctatgact

SEQ ID NO: 333 - DNA, 1000 bp, Oryza sativa
  ref <308>: DATABASE ACCESSION NUMBER: AK058476
  ref <309>: DATABASE ENTRY DATE: 2001-12-06
accaaactcgcctcgccctcctctcttccttcttcttcttcctcctccgagtaccagagcgcacgaaacccctctcgaattctccgctctcctcccgccggtgaccccatccgaccgatcgcaagccatggccgccgccgccgccgactccgccgatcccgtcatcaccaccgccacctgcgcgcactgccatcgagaaattccatctccaaacatcgcgctgcattctgcacactgcgctcgcaaccttcaaaagtgtgaacattgtgggtatatggttccaaagaagctaatggatgaacactatgatgaaaaccatgctccaatgatttgctcactttgccaaaaaactgtacaacgtgggctatgggatcttcataaaggcttacaatgcccacaaaggatgcttgcatgccaatattgtgactttgaactacctgcagctgatatttatgagcatcaggacgtgtgtgggaatcgaacagaatattgtcagccttgcaggaagtatgtcagactgcgggaacagattggacacgacatccagttccattcccaacccattgttgcttcagaatcttcaagtgacagaagcacgctggaagaagaagagagttatccagcagaagaacaaccagtacgacccaagcacactcatggcttacaacgcaagcaatttcttgtcacaattgtgatagctggaatttcaattctggttggatcagttctgctaaaaaaggggtggttatcatgatatttccaacataaacatgaatttgccttcttaatgtgcaaattccttcgtagcctatgggcagggcagagatccttgaactacagtttgaagtcattgtaggaatgacctgactgatatgtttttttttaccagaaggtatttctacatgctggcagctggtaatctatgtaaaaatgttatttacaagtacgaggcttacttttacaagggatcaatgccatctgttttgttgttgtcttgttg

SEQ ID NO: 334 - DNA, 1420 bp, Oryza sativa
  ref <308>: DATABASE ACCESSION NUMBER: AK103971
  ref <309>: DATABASE ENTRY DATE: 2002-08-28
aaaaacctcgtctttctcctcctctcctcccatggcgtccctccccaacggcgccgcctccgcctccgcctccgccgccggcggaggcccggcggtggtcgacaaggaggtggacttcgccaactacttctgcacctactcctacctctaccaccagaaggagatgctctgcgaccgcgtccggatggacgcctaccactccgccgtcttccgcaacgcccaccacttccgcggcaaggtggttcttgatgtgggtaccgggagtggcatcctcgccatctggagcgcgcaggctggcgccaggaaggtgtacgccgtggaggccaccaatatggcggagcacgcgcgcgagctcgcgcgggctaacgacgtcgccgacatcgtcgaggtgatacaggggtccatggaggacgttgtgttgccagagaaagttgatgtcattatatcggagtggatgggctactttctattgagggaatcgatgtttgattctgtcatttgtgcgcgtgatcgttggttgaagccagacggtgtaatgtatcccagtcatgctcggatgtggctagcaccaataaggagtgatctggctgaaaataagatggaagatcttgagattgctatgcatgactggaatctatttgttgaggataccgagtcttattatggggtcaacatgaatgttttgacaaaggcataccgtgcagaacatgaaaaatactatcttaagtctgccatatggaataatcttcatccaaaccaagttatagggcaagctgctgttattaaggaaattgattgcttgacagcaacggttgatgagattcgagaagttcgagcacaggttacaatgccaatcaagctggatatgacaagattagcagctcttgctggatggtttgatgttcattttcgaggtagtaagcaaaaccctgcaactcaagaagttgagttaagcacagctcctgatgtgaatggtggcactcactggggccagcaggtattcttgctgactccgcctctgaaagtaaacgaaggggacaatgttaaagtttctttcacaatggttcgctcaaaagagaatcatcggctcatggatatggagttcacatatgaattgcatgagtcatctggcaagcagcttcccgcaatcacaaccaagatttacttagaatagagcaagaacgctgactggatctgattcaattgatgaaaagattgtgtactggctaccatgtctgaaccttgcttgatagttggagccaagctgaactcctccctggtgtatttggtttttaatagagggcctaatggccacattgtgtaatactacccagaatatgtacaccgaggctgtgttgtgtgaggcatgataaaagtgccagagattttgttgtatcagtaattcatcgctcgattggtt

SEQ ID NO: 335 - DNA, 1349 bp, Oryza sativa
  ref <308>: DATABASE ACCESSION NUMBER: AK058477
  ref <309>: DATABASE ENTRY DATE: 2001-12-06
agggtcgtcattcctgggtaggaatgcatctctccgggcatctgttgctccaaggattgtaccaaaggcgaagtctggttctcaaatttctcctgaggcttcgtacaaagtggcagtgctcggtgctgctggtggtattggccaaccattgggccttttgattaagatgtctcctctggtctcagagctgcatctgtatgatattgcaaatgttaagggagttgctgctgatctcagccactgcaacacaccttctcaagttctggacttcactgggccctcggaactagccaactgcttgaaaggtgtggacgttgttgtcatccctgctggggtcccaaggaagccaggcatgactcgcgatgacctttttaacatcaatgcgagcattgtcaagtcgcttgttgaggctgttgcagacaattgtccagaggccttcatccatattatcagcaacccagtaaactccacggtgccaattgctgccgaggttctgaaacaaaagggtgtgtacaatcccaagaagctctttggagttaccaccctagatgttgttagagctaacacatttgtagctcagaagaagaacctcaagctcatcgatgttgatgttccagttgtcggtggtcatgctgggatcacaattctaccactgctgtcaaagaccatgccatctgtcaccttcacagatgaagaaactgaacagctgacaaagaggatacagaatgctggaacagaggtggtggaggcgaaagctggtgctggctccgctaccctctccatggcctacgctgctgccagattcgtcgagtcatctctgcgtgcacttgctggcgaccctgatgtttatgagtgcacattcgttcagtctgagttaaccgagctgccgttctttgcatccagagttaagcttggaaagaacggtgtcgagtccatcatttctgctgaccttgagggagtgaccgagtacgaggccaaggcacttgaggcattgaagtctgagttgaaggccagtatcgagaagggcatcgagttcgtccacaaacagcagacagcagcggcatctgtttgaagcaagcagaatggaatcaatacaaggaagataataaacggaagaggctcttgataccttttagtttccaggctagaattttctcttgtcgacgcgtagggaaaggctccagactatttgcattgtattgccattgctaatttcttcagaatacatgagggcgataacgcccaaactgctgcctgttttaacacaaattttgcttcagtttctgagaggttggtttgtagctggacaaactaaggaataaatcaattctttgatcgttttcagcatt

SEQ ID NO: 336 - DNA, 351 bp, Oryza sativa
  ref <308>: DATABASE ACCESSION NUMBER: AK058478
  ref <309>: DATABASE ENTRY DATE: 2001-12-06
atgccaacaaattactgcacaggtgtacaatgaatacagaactcgtgacatagggacttcattgttcacatggatggaacacaatttgcctgcatctgatgataagattacttcaccaacatttttcgccgggtattaatttaccaacatgattggtaatcaaattcagaactcagaacatgtcagatattgataataggtggaatgtgagattacgtgaaagcactttaatttttttcccagaacttttcattttaacctttgctcgtataagtcagagcattgtaaagtcagaacacactgatttggaccacaccgaggtataatttcagagtctaaggccctccacat

SEQ ID NO: 337 - DNA, 1686 bp, Oryza sativa
  ref <308>: DATABASE ACCESSION NUMBER: AK058479
  ref <309>: DATABASE ENTRY DATE: 2001-12-06
actgctgctgttcatgttctcatgttgtaactaactgatttgtacgtgaagagtctgaaactgttggattttgttggaaggtagtggtgatcgatgatggagtcggcgaggtttgtgtacgagctggatcatgggggagaaggcgaggaggaggaagaggaggacgcctgcttcttggacatctacgtgcacggcgcgcgcggcatccacaacatctgcatctacgcggcgcaggacgtgtacgccaggctcgcgctcacgtccagcccggacgacgcgccggcgctcgacacgcgcgtcgcggcgggcggcggcgccaacccgcgcttcgacgagcgcctcccgccgctgcgcgtcaggcgggcgcgcctcggcaccgacgtgctcaagtgcgagatatggatgcggagctgcgccaggcggctgctcgacgaccagctcctcggcttcgcgctcgtgccgctcgccgccgtcgcggccgccgacggcgcgcggctcgcgcaggacttctcgctgtcgtccaccgacctcttccactcgccggcggggaccatacggctctcgctcgccctccactccggaccacccggcgacgcgtgcccgccgccggagcgcgccgccgccgagccgtcgatcacgtcggaggtggtgatcctcgagccagcgccaccggtggactacgcgaggatcgagttccctgaccttaacgcggtgaaagaaaacgacgacatggccgtgcagtacctgccgttcttgcacctcgccgacgcgcaggccatggacgacgacgactgcgagatggccacgagcccgcgcgaggagaagccggcgtcctcggacgacgggagcaagaacgcctcgacgtcgacgaccaccgccgtcagcgacgacaacagggcggtgacgcgcaaggcgcggcccgacgccgacgacgccgccaccgcgccgatgtcgtgccgctcgccggacacgccgacgtccaacggcggcaagccgtcgtcgtcggacaaggagaagggcgccgcggaagacgtgttcgactcgccgcccctgcgcgatatcgacatggaggcggagcagagcgcgatgcagcggcagatcatggagatgtacatgaagagcatgcagcagttcaccgaatcgctgtccaagatgaagctgccgatggagctcgacggcgacaatggcgtcgtcgtccagaaggaggagaagccggaggcagaggtgaagctgcagcccaagaaggatggtgcaagggtgttctacggaagcagagctttcttctgaacaaaaagcaaacaaaaaaaaattgcagagagaaacaaattaagatgatctcttcttgcaattgcaaaagttatatctcagcaattcaatgccatgtacgaagcaaaatgccaaagaacaaaacagaagttagtggttgctgtttctacatcgacttcaacgcgactaacaccacgatcagttctcctgattacaatggactgccatgaactttcattgcaaatagcttcgaaatgccaatgtacaagtccaacatttctgccggtcgtacacttcagttcctgaagaagctgggagacagtcttcagtcgtcacaagaaatttggtacttgtgtagtactctgtatgaacaatgacttattagtatgagatttattaaagaagacgaaaacttcagac

SEQ ID NO: 338 - DNA, 1068 bp, Oryza sativa
  ref <308>: DATABASE ACCESSION NUMBER: AK058480
  ref <309>: DATABASE ENTRY DATE: 2001-12-06
aggctctatcccctcgaccgagcgccgccatcgacgggtgacgccgcgccgtcgacgcccgccggcccatcgcctcgagtcggcccccgcccacccgcctcgcggcatcgacgcctgccggccccgcgccaccgctgaagctgggtcgaagggagtccgcggcccgccgtcgacgccgcgtggtcggccgccggcatcgccgcgttcgtcagctcgggcatcgtcccggcatttcttcttccccggcaacaccgcaccgcatcgtcgccgtcatcctccggcgtcccgaatcgtgggtcggagagatgctcaagttcttgtcgaaggtggtggtggagtactgcccgctggacccgcggaaggcggcggtggtggagctcctggcgcagtgcaacggccgcaaggccaaggactccaacccggcctgctccgtcgagctccgccgcctcccctcgccgccccccgccgacgccgcggcggccggggagaagaacgcccacccgcccccgcgcgtgctcgtcacctacttcaacggcgtcgaggagtccttcgtcgccgcggagggcgccaccgcgcaggggatccgcgaccagatcctcgaccgcgggcgcctcctcgacactgagcagctcttccgcgacggcggggagaagtggcccgtcctcatccccgaggaggagctcaccatgtcgttcccgggcatcaagccaaagaaagccgaggagaagccccaggcctagtgatccaggcatagatggaatagcttccagcatatcttgaggtgttcattttggctatgttgttcaggacacccttcctctttatttttgctgaacgcgcttcagtagatgttaaaaaaaaaccttcctggaatgggtgttccatagtcatatatcgctgtacgcttatagcccttctctcagtgcagtctgttgtgaacgaatttattcagaataagcaccctcactgttttgtagtggatttcactactatacctgtttgaagggtagagagaatgggcagggtgtatctatttgaagaaatagactgcttagagttttcattact

SEQ ID NO: 339 - DNA, 1057 bp, Oryza sativa
  ref <308>: DATABASE ACCESSION NUMBER: AK103972
  ref <309>: DATABASE ENTRY DATE: 2002-08-28
tcaatagctgcattacgtcacctttcatctatattacgagttcttggaattaatgtcctgacaaatcatgctcaaatgcaacaaagggctcgcatgaaggctgtggatcgtttccgtgaaagtgaaaattcaattttggttgcaactgatggttttgcaaggggcatggattttgatgatgtccgaactgtgattcattatcaattgccacactcaactgatgtttacatccacagaagtggaaggacagcgcggaaatcaatggcaggttgcagcattgcattaatctctcctgcagacaaggccaagttttactcactttgcaagtcactgtcaaaggagaacctccagcagtttcctgttgaccatgcttacatgcctgcagtaatgaataggctcacccttgctcggcagattgacaagattacacgtaaaaattcccaggaaaatgccaacaaatcatggcttcagaggaatgctgagtccatgggattattattggagacaagtgacagtgaggaggaacgtgtacaggggcataagcaaaggaaagcaacttctgcgaacctccagaagcttcaacaggatttgagtgagctcttgcaacgccccttgcagcctaagactttttcgcggcgctatttagctggggctggtgtttcaccgttacttcaaaagcaactggaagagttgtccaaaaggaatgttaagggcagtgctagtgtaaatgcaaataaaggatcccgatttgttgttattggtcaggatcaaatagaacccttgcaagctcttcagaattctgggcaagaggtgtgtgtgagcattgacaagcaaagagaaaagcgaaggcttgctgaaaattggaggcgaaagaagcaaaaagagaagaaaagtacacgagagcaaaagagaaaggagaagaggatagctaaagaaagggactaaatgacaacgttgtccaactactcatcattgtaggcactacattgttactgttgggaaacaagttttgggggtgttggatatcatttttgcaattgaagatagggttataatc

SEQ ID NO: 340 - DNA, 1414 bp, Oryza sativa
  ref <308>: DATABASE ACCESSION NUMBER: AK103973
  ref <309>: DATABASE ENTRY DATE: 2002-08-28
ggctactccacgcatctccactcctcttgcatctccggcgagttctctccggcgagctccctcgccgccggcgatggagttcatcgacgacgactgggactaccagccacgcgcgcgagtcatccactcccgcagcaacgctaactccaacggtgccaccaccgcctcgtcgtcccaaccgacccgctccctcccccacaccgccgcctgcgccgccgcggccgtggcgctcctcgccgcggcgtactacctcctcccggactaccaggtcctcgcatccgtcgtcgtctgggtcgcgtcctccctcctcctcgcccccttcgcgccctcctccgccaccggcggcgacgtctccgtcggccgcggggatcccctccccgagcaggagcccgtcgaggaacccgtctcggatcccgcccccacctcccgccgcggtcggcgccagagctcgagctcgaacccgacgcctccgcccccgaagccctcagatccgatcgcgcctccgccgccgcgacacgcggcggctgcggctgcggctgcggcgacggccgtgtcggatggcggcgaggcggtggaggacgccggcgagtggaccgaccaagagatggacatcctccgccgccagatggtgaagcacccggcgggtgagccgcagcggtgggagaagattgccgcggcgttcggcggccgccgcacgccggagagcgtaatccgcgcggcgaagtccggcggcggcgctgctgccgcgggggcctcgttcgaccagttcctccgcaagcgcaagccgctcgacccgaggtccgaggcgaccgacgcaggaagtggcaatgccggaggaggaggaggggagagtggtgatgggtcttggagcgccggcgatgaccgggcattgctcaacgcgctcaaggagttccccaaggacacggcgatgaggtgggagaaggtggcggtggcggtgcccgggaagacgaaggcagcttgcatgaagagggtcaccgagctcaagcgcgatttccggagcagcaaggcagcatcggaggcagctccatagctgcaaatgctacctagttgcctgcaattcttctttgagagtaaggttttagacagagatttaccatgatgaaacgagaaacgaaaagccatttgctccggggtgatgccaaatgaaggagacaactgaattatagaacagatggtgtacttttattgttttgagaaaggtcaggaaaaaaatccttgatacatgaagatactgggacacacgaaaacaaacagattgccagattgtaaaagaaattgtagccccttgtttggttgtagtgtcactcaagcctccatccaacatgtgttaacattacgtgactgtttctgctcatcttttgatagggctaatacgatacacactgttctcttc

SEQ ID NO: 341 - DNA, 1210 bp, Oryza sativa
  ref <308>: DATABASE ACCESSION NUMBER: AK058481
  ref <309>: DATABASE ENTRY DATE: 2001-12-06
acactcctcctcatcagatccacacccatcctccccaccccccaagcggcggcgagaccaaatcccccacttctctctcaatctctctctctgctagggtttatccctccgcgccgccgcccccggaagacgagagagcgccatggccggcggtcccgcggcggtgtcgttcctgaccaacatcgccaaggcggcggcggggctcggcgccgcggcctccctcctgtcggcgtcgctctacaccgtcgacggcggcgagcgcgccgtcatcttcgaccggttccgcggggtgctcccggagaccgtcggcgaggggacccacttcctcgtgccgtggctccagaagcccttcgtcttcgacatccgcacgcgcccccacaacttctcctccaactccggcaccaaggacctgcagatggtcaacctcaccctccgcctcctctcccgccccgacgtcgtgcacctccccaccatcttcacctccctcggcctcgagtacgacgacaaggtgctcccctccatcggcaacgaggtgctcaaggccgtcgtcgcgcagttcaacgccgaccagctcctcaccgagcggccccacgtctcagccctcgtccgcgacgccctcatccgccgcgcccgcgagttcaacatcatcctcgacgacgtcgccatcacccacctctcctacggcatcgagttctcgcaggccgtcgagaagaagcaggtggcgcagcaggaggccgagcgctccaagttcctcgtggccaaggctgagcaggagaggcgcgcggccatcgtgcgcgcggagggagagagtgagtccgcgcggctcatttctgaggccaccgccgccgctgggacagggctgattgagctgaggaggatcgaggcggccagggagattgctgccgagctggcccgttctcctaatgttgcatacgttcctgctggggacaatggccggatgctgctcggcctcaacgctgccgggttcggccggtgatccgtcactccaattttacccctttagttgcccaggcatccgctctgtgttacattaaactggaatgatggtatggggaattatgttatctgctacttttggtaatatttagtctggatgtctttgaacggaatgtgctaatctttgtgatccaaataagttctgggtctaagactcatttatgttttatgatttgtctgctgattaagcttt

SEQ ID NO: 342 - DNA, 595 bp, Oryza sativa
  ref <308>: DATABASE ACCESSION NUMBER: AK058482
  ref <309>: DATABASE ENTRY DATE: 2001-12-06
acgacacctctctctctctctcccagctggttcgcgcggccaccaaacacatcgcctcgactccccccacccccacctccagcgatctccgccgccaccgtcctgcccggaatggagaagtaccagagcaaggcccggtttgcacccctcagtgatgctccatttgctctccgcggtgcccttggtagctcaaactcatccttcaacaacatagatcatctgagacaatcctcaagttctggacaagctaggagctacacatcttcacccctaggagctctgagaccaaagatgttcccatctggaaaccgactcctgcacacaagtcgtcccctgtcggctcctgttgcgaaccgcccactgtcaccccatctccctttgaagaagccgcagctgagtgctacgttctcaatctcacaccgtatttttggtgctgccctgggagctgtcattatatccattcctcttgccaccaaattcagcctcatgtttgatgtctgagagcgaaatgtagctttcattagctgggtttccttgcaaagaataactttgtttcatgcttgtggacatatatgagtaataagccaaaccatcc

SEQ ID NO: 343 - DNA, 600 bp, Oryza sativa
  ref <308>: DATABASE ACCESSION NUMBER: AK058483
  ref <309>: DATABASE ENTRY DATE: 2001-12-06
attggctatcggaagtatttctcccggtcttctgcaagcagcaattggtgcattttcaactgtttttcctgactatcaggagagaattgctaggcatgaagctgctcattttttggttgcctatttgattggactaccaattctgggatattccttggacattggaaaggagcatgttaacttgatagatgatcaattgcaaaagctaatatacagtggccagcttgatcaaaaggaaatagacaggttagctgtagtgtcaatggcagggctcgctgctgaaggtctagaatatgacaaagttgtcggtcaatcggcagatcttttcacccttcagagattcataaaccggactaagccgccattaaccaaggatcagcaacaaaaccttacaagatgggcagtcctattttcggcatcacttctgaagaacaataaagcagctcatgaagctctcatgtctgccatgtcgcagaaggccagtgtcttgggctgcatcgaagccatagagaatgcctcttgattgtaatggaacgttgaatgtcctaacacggttgaaattgatgaaaatgagaaaaatataaaagtcaagatatgaag

SEQ ID NO: 344 - DNA, 1222 bp, Oryza sativa
  ref <308>: DATABASE ACCESSION NUMBER: AK058484
  ref <309>: DATABASE ENTRY DATE: 2001-12-06
gcaactgatgtgacacaagagcatctcagaagtggtgattggaaggatcttgaattcaaagactataactttggagcccagggacaacctattgccattggttatgtgcaacctttgttggaggtgcgagaggaaatccagaacatctttcttcagatggggttcactgagatgccaactaacaattacgttgagagcagcttctggaacttcgatgcactgttccagccccaacagcatcctgctcgggattcacacgatacattttttcttgaagcccctgccgctacaaaacaattgcctgaagattatcttgagaaagtaaaggaagttcatcaacgtggtggttatggctccaagggatatggctatgactggaaacgggatgaagcagagaaaaacctgcttcgtacccacactacagcagtttcaacaaggatgctatacaagctagcacaagagaaaccttttgcccctaagaggtactactccattgatcgtgttttccgcaatgaagctgtggaccggactcatcttgcggaattccaccagattgaaggtctcatttgtgattatggtttgacgctgggtgatctgattggtgtattggaggatttcttctcgagtctaggcatgtcaaagctgcgtttcaagcctgcctacaatccatacaccgagccgagcatggaaattttcagttaccatgaaggtttgaagaaatgggtggaagttggtaactctggcatgttcagacctgaaatgttacttcccatgggactgccagagggtgttaatgttattgcatggggtctttcactagaaaggccaacaatgattctttacggcatcgacaacattcgagacctctttggaccaaaggttgatttcaacctcatcaagagcaaccctctctgccgcttgggactgcagtaaaaccttgcaaaagttggttggaagtgattaagtaacaagatttgtttagttgatcagtggttgaacgtgaagagatcatttctggcttaccttgaaacaccaatacatgtgcatttagcagaggtttttgtattacagttttgagtgatatgagactaccagccaatttttgtgtgtgtccatattcgaatactttgatacattttaattgagcacatccaatgtatgaagtggtcatctgccgctgcggttgcttgaatcaaaatatggaccattgttttcttttcac

SEQ ID NO: 345 - DNA, 1460 bp, Oryza sativa
  ref <308>: DATABASE ACCESSION NUMBER: AK058485
  ref <309>: DATABASE ENTRY DATE: 2001-12-06
attgcaacaacaactgcagctcaccttagcactaccacagctactgtcacttcaacattgccgagtcaacaatggcttcgaagctctttctgatggccgccatgctgggcctcctggcagtggtggcgctggccgacagcgggccgtgcaagggcggattctggcctgatggcaacggatgctgcccgcagatcatcaagggcagcccctactaccgcgactccaacaacaagtgctaccccaaggagatcaagtacggcgtctactacgccgacgccaacgggtgctatccggatgagcatggcagttacgccgccgctggcaagtcgtgcccgaaggagcagaagtgctactcgttctgcgtgaagcccgacggcaagtacgagtcgaccaccagcgaagtacaccactcgcaagcaggagacgaccacgagcgagaagcgcaccacgcccaagcaggagaccaccacgcacaaggagtacaccacgcccaagtacgagaccactacgcacaaggagtacaccaccgagcagcgcaccacgcccaagcaggagaccaccacgcacaaggagtacaccacgcccaagtacgagaccactactcacaaggagtacaccaccgagaagcgcactacgcccaagtacgagaccaccacgtacaagcatgagacgacgtcgtcggagaagtacaccacgcccaagtacgagacgaccactcacaaggagtacaccactgagcagcgcaccacgcccaagtacgagaccactacgcacaaggagtacaccacgcccaagtacgagaccaccacatcggagaagcacaccacgcccaagtacgagaccacgacccagaaggagtacaccacgcccaagcaggagaccaccacgcagagggagaccaccaccagcgagaagcgcaccacgcccaagtacgagaccaccacgcacaaggagtacaccaccgagaagtacgccacgtcgtccaagaagcacgatgagtgcccctacggcatggagaaggacgaggacggctgctgcccgcgccgcctcgacggttcgtggtactaccgtgatggccgcgggagctacccgatcgagctcgattgcggcgtgtactacgccgatggcaacaagtgctacccggacgagaagggcaactacctcgaggccggcggctactgcccctacaatcgcaagagcaagcccgagtgcgacaagggctactactaagcccgttccaccgagcggcgttccaagggtttctgtggccatccgttttcacggacctcgcgagccgcaccgccactcaacgagcgccctcacttcattccgcacccttcctcccctcttgctttggctcctccgcaaccgaggccatcgtgttagttgttgttttctacactcccatcatcgctttgatcttgctcttcatcaattctgcattcaaccttctcgagttc

SEQ ID NO: 346 - DNA, 529 bp, Oryza sativa
  ref <308>: DATABASE ACCESSION NUMBER: AK058486
  ref <309>: DATABASE ENTRY DATE: 2001-12-06
gctgtgctggagctgacatacaactatggtgtcactgaatatgacaaggggaatgcatatgcccagatcgcgatcggaaccgacgacgtctacaagacggcggaggtggtgaagctgttcggagggcaggtggtgcgggagccagggccattgccggggatcaacaccaagatcacgtccatcctggaccctgatggctggaaatcggtgtttgtcgacaacatcgactttgcaaaggaactggagtaaacctgttcagaaaccgggtgccagttctgtttgctgaatgactagtgaccagagataaatcttgcttggttgcaatcactgtaaatgagctcgaactccatgaccaagaaattttggtgtctgaataaataacagagcatgaggtttcgtccccgtgacgaccgggaagagtacaaaacatagcttagatgaatagataacaggacctagctacctgatctgttccaactttgaagcttaatctggaaataaactgttcaaagcaatgaacaagttgatg

SEQ ID NO: 347 - DNA, 627 bp, Oryza sativa
  ref <308>: DATABASE ACCESSION NUMBER: AK058487
  ref <309>: DATABASE ENTRY DATE: 2001-12-06
gcagtctagcacccgcacccgcacccgcacaaacgcagcgcaagatgagcagtggcggcgagaagtccggctcgggcggcggcggcggtggcggcggcggcggggcggtgaagacgccctccgacttcctcaagtccatcagggggcgccccgtcgtcgtcaagctcaactccggcgtcgactaccgcggtattttggcttgtcttgatggttacatgaacattgcaatggagcaaacggaagaatatgtcaatggtcagctgaagaacaagtacggtgacgctttcatacgaggaaacaatgttttatacatcagcacatcaaagcgtaccctcactgatggtgcatgagaaggtgagacagcatgcagttcaatgcctgccactatcgcaactttgatttcctctgtgatcaatctctaaagaaatactgccttacaatatcgtagttgctacatggaaagagatgttttctggaatggaggattatcaccagatatttgtacccaaaaaaactatgttcgattttagtagattctacatattgtggtctgctgcactattgatgtatgtggtgattattggaccgtcagggatatggataagatttatatcttggggtgtcctc

SEQ ID NO: 348 - DNA, 646 bp, Oryza sativa
  ref <308>: DATABASE ACCESSION NUMBER: AK058488
  ref <309>: DATABASE ENTRY DATE: 2001-12-06
gacagacaggtacacaaaatacaaacactgagaaagaaagaaaagacaactgtcgtgcatagagaatatctattgtcgatctctattaatgggcaacttgttcttcatccccaaacatcctcctcctcctccgcctccttcgcatgtccatagcattcatcaccctctctctaatgctccatctttcatgaatggtccgaatggattcatgatggcacacacattgtgcacagagacgaggctacctcttgatgaggaacagatgcgggagctgatgaagacgatcgataaaaagaagagcgagcagtgatactaaggtagtggctcagtgttaagtgttactccctccgtttcataataatgacttacattgtgaaacggaggaagtaacgaataaagggaagacaggtcggccgtacataatctgccgctagcttaccgaagaattaattataagatgatcaatcaactctgcagtctagctagttggagagaagagattatactactttgtatcgttagaaataaacaaaagaaaactacaaattatatctttgacatgatatggtttgtctctgaggttcatagctaccactcgttgtaaagtgtcatctaatttaagctaatttatgtttagctagtatac

SEQ ID NO: 349 - DNA, 587 bp, Oryza sativa
  ref <308>: DATABASE ACCESSION NUMBER: AK058489
  ref <309>: DATABASE ENTRY DATE: 2001-12-06
tttcttttgagctttcttgcaattttggtcttctttccttttgatttggtttctttccgtccgatttgtgaagaggaggagcaatggggttcaagggatttgtggagggtggcatcgcgtccatcgtcgctgggtgctcgacgcacccgctcgatttgattaaggtgaggatgcagctgcagggggaggcgtcggccgccctactccggcgccatcgactgcgcgctcaagacggtgcggtcggagggcgtcatggcgctgtacaaggggttcatccccaccgtgtcgcgccagggccccttcaccgtcgtgctcttcgtcacgctcgagcaggtgcgcaaggtcttcaacggcgtcgagttctaaaggccaccgccacgatgatgacgacgaacaatccacctctagtattacttctgctagtactacctctgctgctgatgctgctgctatgaataattactactacagcctggttgagagattgtaccttagcctgcctccccatggcatatgttccttctgttcctgcattcgaacgaatttggatggatttgatcaaaaacttcaatggaatccgcattttt

SEQ ID NO: 350 - DNA, 984 bp, Oryza sativa
  ref <308>: DATABASE ACCESSION NUMBER: AK058490
  ref <309>: DATABASE ENTRY DATE: 2001-12-06
ccccgaaacccttctccctcgcgtcgttccgccgccgccgccgtcgtccagggcgaagcttgcgtagagatagcggcgacgatgatggcggaggaggggacgcagcagctgccgtacgtgcgggagacggtgctgaagaagcggaaggtgaacgaggactgggcggtcaagaaccgggagcggaaggcggccaagaggcagcgccgccgcgacgacggcaagggcgccatcaagaggcccgaggacttcgtcagggagttccgcaacaaggagctcgacttcgtccggatgaagacccgcctcaaggtccgcaagctcccccccgccgagaccctcaactccaagctcgtcttcgcgattcgcatccctggcacaatggacttgcatccacacatgaggaggattttgcgcaagctgcggctgacgcaggtcctcaccggcgtgttcctcaaggccactgacgctactatgaagaggcttcttgttgtggagccgtttatcacttatgggttcccaaatttgaagaatgtgaaggatcttatttacaagaagggccgtgggttcctggacaaggaacctttccctcttaccagcaatgatctcattgagaaggctctgggagaatatggcatcatatgtttggaagatcttgtgcatgaaatcgcatcagttggcccacacttcagagaagcttcaaatttcctcatgcccttcaagctcaagtgtccagagaggaggttgcagatgaagaagaaacccttcaaggatggtggtgactcagggaaccgcgaagataaaatcaatgaattaattgagaagttgaattagtgcagaacctatgcccagtcgtaattcatgtgcaagggatggatccgttataccttgtcagatttgtaatagcctagccgattgtacctttatttctgaaagcttaatagagtgttcatgctcagattatgaaatagcagaatctgttttcctacc

SEQ ID NO: 351 - DNA, 964 bp, Oryza sativa
  ref <308>: DATABASE ACCESSION NUMBER: AK058491
  ref <309>: DATABASE ENTRY DATE: 2001-12-06
agccgccggcccaccgcgcgaggagatctcgcacggcgagtcggcgacacggcgacgtcgcgacttcttcttcttcctcctcctcctcctcctcacctcggccgctgcccgtcgctcggcgagccgccggcccgacggcgccgcacgcgcagggagcactcgaccggcgctcgccttggacgaaggcgccggttagccgcgaggcagccgcccagcgctcgcgttcccccctcctgatccgtggggttgctcagcggggcgccgtgccggaggagatgcagaggctgggggatttcaggctcccgcccttcttcaactacccgccttacttcacattgcagcctgtgcgagaaacacgtgaaaagcaagtgcagctgtggaaagatctgatacttgattattgtagaagtcaaaagctatatataatctccctagaagaagatttcccattgttctccaatccaaagatcgagagatctcttagccatgaagcaaaggaagtattccttgctgctcttgtttatgaaggacgtgcagaatggatggacaaaggtaaaggataatgggctggaagatagtgtaatgactgttgaggaaatacgttcaggaattgaaacacgtgggactgaacttgccggaattgaccgtggtgttctcatgagggctttgaagttactggaacagaagggcaaagcagcgatttttaagggcacttcagctgatgatgaaggtgtaaaattttcggcttagtgtctggggcctgtgtggcagatcaattatcctgaccagcatctttgaatgacgagaattcttgccaaccaggacgctgatcacgtcctccccaaacatatttatctgccttactgttcactgctgctgctgttaaatgccatgttggcctgtccatctttgactgaaaaaacactgtaatcagaacttaattcatttccacaagcatacctac

SEQ ID NO: 352 - DNA, 1019 bp, Oryza sativa
  ref <308>: DATABASE ACCESSION NUMBER: AK058492
  ref <309>: DATABASE ENTRY DATE: 2001-12-06
attttgggataaacgaaagtgaaggttgtggattgttatcagaggaagaaccacaaatagagatcagagactccgcttcacattggtgcattgaacacaatattgagtatgtcaaagcttgtgcttccaatgctgactttgataaatgtctatcggtgaatggagatagtcaaggcttagagcgactccttggagccctttctgcacacatgtggcctggaatgattctgaaatctgggaacagaataaccgttccatccttggttgagaaagaagaatctacagatgatgaatccaattacgaatttgagtacgaagttctgtcccatggatctgatgaacaatgggaattcattggtgagtcaagtacgtcaagagacttggagggattgaatgaagatacagctactcatgataaaactaatcaggttgtggatgctgatgctaattcagtggcatccaatcctcttccaaatggcagaatgacagaaactgctgaggaaaaactggtacctcagagccacaaaagcgaggttagtaatgatatggataacacacaagcagatgcttcagagaaactgcaagctggtatcccagagggtaacaagctatttgaagatgagcattacggtctagatgatctggagcggctaatgtcagagattggcaacatgcgctccaatttaaggctcatgcctgacttccaaaggaaagagatggctgccaagcttgccatgaaaatggcaaccatgtttggtgataacgacgaagagggctctgaagatatctgattcaattcacggagcccaccttttgcatgtcttcaaacatatgttcccagtttatggcgtgctgatttgtacaggcagatgggccgcaggccgtgtaggcatttccatcggctatcataattcccagtgaaattttgtaccttagtagttccatatttaccattcttactgctgtaagttgtatactgtattatttgaaattaaagttctctggaatcgacttgtctg

SEQ ID NO: 353 - DNA, 330 bp, Oryza sativa
  ref <308>: DATABASE ACCESSION NUMBER: AK058493
  ref <309>: DATABASE ENTRY DATE: 2001-12-06
ggtttcttttagcatcaactacatcgggaccaaacagagaaggaaccatgtatacatcgcactgaaccggcagagacaacgtcaagaatcttgagttctcaagttttccttattctcaatgtataagcatgtagcttaggatcatagctgtatcgcccattattctgaaagcagtagcagccaaacagtttttcttcatattttttatcgcgccgcaagttatttgtgggcaactgaatcacgagtggctgccacatcggtgttcagtcaaatgggattacaattttgacagagataaatgggattacaaatttgacagagaactatgtt

SEQ ID NO: 354 - DNA, 1339 bp, Oryza sativa
  ref <308>: DATABASE ACCESSION NUMBER: AK058494
  ref <309>: DATABASE ENTRY DATE: 2001-12-06
cacttatcgaggagggatgacggaggagaaaagggtaatgaggaggaaagttcttgccaagtggcttaaggagagtattttgagactaggtcccacatttatcaaaattgggcagcagttctccaccagagtggacattcttccacaggaatatgtcgaccagttatctgaattacaggaccaagttcctccatttccttcagagacagcggtgtcaattattgaggaagagctaggggcatctgtgaataagatttttgatcgatttgactttgaatatgtggagttcctccattttgggctgagactgagcaaggggtggcacaagccattcttcgtggaaatatcgatttcaaacgcgaaccctggccaaatgtttcagaaaatgctaaagatttggttcgacgcatgttggagcctgatccaaaactcaggttaactgcaaagcaagttcttgaacatccatggcttcaaaatgctaagaaagctccaaatgttcctcttggagatattgtgaagtcaaggctcaaacaattttctagaatgaatagattcaaaagaagagcactaagggtcattgccgatcatttatctgctgaggaagttgaggacataaaggagatgttcaaggctatggacactgataacgatggcattgtatcttatgaagaattaaagagcgggatagcaaaatttggttctcatctggcagaatcggaagtgcagatgcttatcgaagctgtggatacaaatggtaaggatgctctagattatggtgaatttttggctgtctctcttcatttgcaaaggatggcaaatgatgagcacctccggcgagccttcctattttttgacaaggatggcaatggctacatagagcctgaagagcttcgagaggctctagtggacgatggagcaggtgacagcatggaagtggtgaacgacatattgcaagaagttgacactgataaggatggcaagattagctatgacgaatttgtagcaatgatgaagacgggcacagattggagaaaggcgtcccggcattactctagaggaagattcaacagccttagcatgaagcttataaaggatgggtccgtaaaactggtcaatgagtgaaggcctaagggtgataattttatgcgtgtagtttaggcctttgggctcgctaagcagaaaccctttctccttttcttctcatgattattttgcgtggaaatttagataggtggaacctcccgattggcttacctgtgtaattagctcatctgacaagcacgcgccgaatgatataccaaatgctgtgcgcctgcttagccctcgtggccttgttcct

SEQ ID NO: 355 - DNA, 1334 bp, Oryza sativa
  ref <308>: DATABASE ACCESSION NUMBER: AK058495
  ref <309>: DATABASE ENTRY DATE: 2001-12-06
cccccacaaatcaccaaacgagctgcgtgaaccgggtgcgtttcgatttcttcttccccccattttttgttgccattgcttccctcgatttccgagctccgtgaggagagaggaagagagaggttgcaatggcggcggcgctgatgaggagggcggcgcgggcgccgccggcggcgtgcgggctccgccgcttcatgcaggagcagacggcgttccggcccgcggcggtgccggtggtgccgcccgagcgacgcgggttcatccccctcgccgaccggatccgcgacctcggcgccgcgttcccgcgcatcaacctcgacggcctcgtccccccggcgccgccgcagacgcatccgacggtggcgagggaggagcgggcgtcggcgtcggcggtggcggggctgacggtggaggaggcgaggaaggtgctgcgggcgacgcagatggaggcggcgcgggcgaggctgcgggcgtcgggcgcgggcaccgtgccgtacgccgagttcctccggctctgctgcgacgccgccggcgcggagtccggcgcctccgtcgcgcgcgcgctcgacgagtccggatccgtcatcgtcctcggcaagaccgtcttcctcaggcccgagatggttgtcaaagccatcgagaaggccataccgattccgagagcgcaacccattgccttggatggcccagcaagggaagagctgaaggccatggaggcgcagaaggtcgagatcgaccgcaccgcggcgctccaggtgcgccgtgagctttggctggggctggcatacctcgtcgtccagactgccggcttcatgaggctcacattctgggagctctcatgggatgtcatggaacccatctgcttctatgtggcctccatgtacttcatggccggctacaccttcttcctccggaccaagaaggagccctccttcgagggcttcttcgagagccggtttgcggcgaagcagaagcggttgatgcacgcccgggatttcgatctccgccggtatgacgagctccggcgagcctgtggcctgccggtggttcggactccgacgagcccctgcagaccgtcgtcgtcgtcgtcgtcttcgacgcaggagagccattgccattcttactgccattgccaatgatctttgtgctgttctgttctattgtcagaatttttttcatgcccagtttatgggggttaagctagcttctccattgtatcgttctgatgtgcggatgatgcgatgcaaagcatagtttgttgaagagatgacaaggcagattttagcttgaaaacctggaggtgagaaaaaaaaatcctgatgtgtgtgtgtgtg

SEQ ID NO: 356 - DNA, 1457 bp, Oryza sativa
  ref <308>: DATABASE ACCESSION NUMBER: AK058496
  ref <309>: DATABASE ENTRY DATE: 2001-12-06
gaacctcacccatttcggacttctacccactctcctctctccccttccctccctcctccctgctgggcttcgggcggcggcggcggcggcggtgggggtggatggcctccgcggcatcggcgccggcgttcgagaggctggccgggatccgggcactggcggagtccggccgcttcaaggcgtggttcctcgatcagtttggtgttcttcacgatgggaagaagccttaccctggtgccgttctcgcgttggagaagctcgctgagaaaggggcgaagatggtaatcattagcaattcgtcgaggaggtcgtctgtaaccatggagaagctagagagccttggttttgacccatcctgtttcctcagggccattactagcggggaactcacacatcagtaccttcagaagagagatgatccttggtttgcagctcttggaagaaagtgcgtccatctgacatggggcaatcgaggcgcaatttctctggagggccttggtttgcaagtcgtgagcaatgtcgaagaggcagagtttatattagcccatggtactgaggccctgggtctaccttcaggggatccacttcccaaaagtcttgaggagcttgagcaggttctaatgctatgcctagaaaagcgactgccaatggtagtagctaaccctgattatgttactgttgaagcacgagatctgcgagtcatgcctggcactctggcagccaaatacgagagtcttggtggtgaggtgaaatggatggggaagcctgataaggtgatctatacatcagcaatgtccctggcaggggttaatcctcatgaatgtatcacagtaggtgattcactgcaccacgacatcaaaggtgcaaacgcatctagagtcgcttctgcattcattactggagggattcatgcaactgaacttggactcaatgagattggagaaatcgctggagaggacgccatcgattcattgtgccgcaagcatggctcctatcccacctatgttttgccttcatttacatggtagaaacacggtatacctttgggtaaatgcatcatctgtgtctcagaacatggtgcagaaaccgtcaattccagcaaggtcatgcagtataatcagtaattgtgctcttgaggtacctgctactgtgctcaacgtttcccattttcctgagttgttggcaaaggtcaaaactgagaccagcagagttcaggatgagaatagtcttatttccttgctggatatacaagatggtgtcaaacttacatgtgttttttatgatttgttttgcaatggttccttctctgaaccatttggatttcatagacagattactgagaattactcatgttagagttaaacacgttatgctaataagatcacttatcagtgacacaccccttgtacatcaaatttcattgatgaatattaaacgagcaaaccatcaaacaactg

SEQ ID NO: 357 - DNA, 1651 bp, Oryza sativa
  ref <308>: DATABASE ACCESSION NUMBER: AK058497
  ref <309>: DATABASE ENTRY DATE: 2001-12-06
aagctgcgaggctgttctccgctgtgacgtctcgtctcttcctcctcctcaggaagtccagcgagtccacctccctctcctgctccaccaccaccacctcctccttccaaagattccttctcttcttcttcgtttcaggcgctgcgcgtctgcgggatttggggaggggagcggcggcggagatgcacccgaagctgtcgcggttcgcgcacagggtgctctgctgcgggaggaaaggctccggggaggatttgagtgatgaggggagcggatcgttgaggtgggtgttttcattgcgggagcttcggtcagctacaaatagcttcaactatgataacaagattggagaaggaccattcggaagtgtctattggggacaagtttgggatggttctcagattgctgttaagaagttgaagtgcgcaaagaatgggacagaaacagaatttgcttcagatgttgaaattctgggaagagtgaggcacaaaaacctcttgagtttccgtggatattgtgctgatggacctgaacgcgttctggtgtatgacttcatgccaaattcaagtctttatgcacatctgcacggaacacattctacagagtgccttcttgactggcggaggagaacatttattgcaattggtgctgctcgagctctagcgtatcttcaccaccacgcaacaccccagataatccatgggagcgtcaaggctactaatgtgctactcgattcaaatttccaggcacatcttggtgactttggtctgataaggttcatcccagatggggtggatcatgataagataatcagtgaaaaccaacgtggctatcttgctcctgagtacattatgtttggcaaacctacaataggttgtgatgtctacagctttggcataatactgttggagctatctagtgggagaagaccagtggaaaggtcgggctctgccaaaatgtgtggggttcgaaactgggtgctccctttggcaaaagatggcagatacgatgaaattgtggactccaaactcaatgataagtattctgaatctgaactaaaaagagtagtgttggttggtctggcttgcacacacagagaacctgaaaagagaccgacaatgctcgaagttgtatcgatgctgaaaggtgaatctaaagagatgctttccaggcttgaaaatgatgaattgttcaggccagactcgacggtgagttcccatggaatgtcaacaccagaggggagctcggactgtgtgcccaagaatgatcaagaattggcagcggcatgatggattagtaccctaggaaatgtagagtcgcattttttttgtgggattggtgcttggtctgcttggtttggcatgattcaaatgtacaggcattgtcatttgtgaaggtttctcctctttttggagagaggaaattagatgaatgatgagttagcagttatacatggtgctttttttggcaaagaattattatacatggtgctttttgtgtgcactggatagaagatccatatacttggcctgatgtttgggtatgattggtcatgttgtcatataaattattctttaatgctgatatctggatgattgaattgtgtttgtatcttatgattgaaacttctgcacaacacaggagtaaatactgc

SEQ ID NO: 358 - DNA, 323 bp, Oryza sativa
  ref <308>: DATABASE ACCESSION NUMBER: AK058498
  ref <309>: DATABASE ENTRY DATE: 2001-12-06
acgatggcaaggacgagttctggatctgttgcgataactgcgagaagtggtatcatgggaagtgcgtcaagatcacacccgctcgtgccgagcatatcaagcagtacaagtgcccggactgcaccaacaagagggcccgggcatgagtaacaagaagctgtgtcgaactgtgttagagtggagttgtcaatctccggatgtcatgatctcttagatattatcttgccctagcttttctagtttgtaagcttgtctctaatttaattttaaactgtaactgttgattaacctacctgtgtttaaagcttcatctttcctgtgtt

SEQ ID NO: 359 - DNA, 1470 bp, Oryza sativa
  ref <308>: DATABASE ACCESSION NUMBER: AK058499
  ref <309>: DATABASE ENTRY DATE: 2001-12-06
ccggcccattaacccccaatagagagaaaaaaacccaaaaccaaaaaaccctaactcttctccccatcgatctcctctctgagctctctccgacagccgccgccaggcgaggacgcgccggcgcccgtcgcccatcgcgccgtagccgacctcatcacctctccggcgccccgcggcctgcgccgtcgccccgtctcgccgtcgcacccgcaccgccccggcgccccgcgagcccgcgacgccgcccgggcctggcgagtggcgtcggcgcgctgccgtcctgttcgtccaccgaccattcaccaccgcacttttcctgtcccgagagccgagaggccgaagcttaggtggtgcaatggctttaagttcatccattagcatgtctcggcgtcttttcaagggacttactatcaacccggcattggcatctgggatgacgtgccagcatcaccagcttcaacagcatgcgccagtgagtggaacagccaagggtaaggctaagctcaagtctggccaacaattgaagcgtaacaccattggagcaaagaagggcggcgcgccttccactggtgggggtggtggcggtgggcgtggtcgtcgtgaggctattgagcgtattactcagattgcagagtcttgtctgaatgcctcaactcctctgcgccatctatcccccaaggagcgtcttcgtgaggccaaacgtgaggagcttggactcatttctaaggaacgtcaacgtgaacttgatttagccaaggctaaagccaagtccaaaggtacccgtgagggtgatggtggccgtgtgctgatgggtccaccaggtcttgactacatcagtcttggattggttgatgaggacgcaatccctaaatacgagctgacagtcgaagatggccggcgacttgccaaacaatacagtcaggtgctaatgcgacggcaccgcgcacggcaaactgcagaatcgtctcttctaagtctcaagaaggaggccattgcagcactccctgagaagctgcgagctgctgctatgattcctgacatgacaccattccctgcaaaccgatacatggcaacactcacgccaccaattgaagggtatattgaaaaggtgcgggatgctgccaagaagtattctgtgaaggagaaacttcgctgatttttacctcaagggaggaaagggtatctagaggtacatgaacatgtcaggctgtcagctatgacaacagagcatactttgttgattggcatatcaatgcaaggagaaattgggaagcttgttcaattttcagtgagtttttggtcattttcttctggctgggatgctgcatgaatggcaatttctgaagctcgatgggcattcgctttgtttcattgtttgtttgttacgaatgttgtatgcagccacttctgtaataagttcccggcagttagatttgcttctgccatttagattttgcgaacttttttttt

SEQ ID NO: 360 - DNA, 475 bp, Oryza sativa
  ref <308>: DATABASE ACCESSION NUMBER: AK058500
  ref <309>: DATABASE ENTRY DATE: 2001-12-06
gtggactatcaaacaagatgccatacataaaggactatagctctactggcagcaaggatgacgcacgacctttggctgatattgtggagacatcaccgcaaatgttgttggaatgcttgaaggcattctatggtctagtgactggaacagaaggttccttgcctgaatttgagcagctgcaggtaccaaggttgcgttctgatgcatgctatggtttggctagagctctggcggaagcttatgaactgatctataaggcagtggtggatccaaagaattgctaccctgacccaaggtctttagtaaaacactcgcctgagcagataaggactatactagaaatctgaggtctattcacaatctcttcatacatgttaatgagagaacccttttatagagtcaatgtcaatgtggggtatatttgctacgaaaaggtgtgatttcaaattcttttactgaagttgtttacaccttc

SEQ ID NO: 361 - DNA, 547 bp, Oryza sativa
  ref <308>: DATABASE ACCESSION NUMBER: AK058501
  ref <309>: DATABASE ENTRY DATE: 2001-12-06
aaaaaaaataggattctaagttgtgaagcaaaactaaaggggatgtagataaaaggaaggatgatagaaagaaggaagagaaataagaaagatataggattccaatatgtatggtctatgaattacatcataaaaagcaatgtgataaagcatcaatataataaaaataacagagaattcgaaatcgtaatttgattgaaacaagaaatacaaatttcaaggaataacaaagagcgtcccgagttagtaaaactgagaaattgactcggaaagaaattttttggaagctccattgcgagattcaaacctaaccattaaaggagaagcagtgggaacgacagaacctatgactggataggattttcttgaaaagaatcccaatacttcattgggtgggatggcggaacaaaccaaaaaaattgtcttatttgataaggttatgaattaacaaataagacaggaaagagtaaatattcgcccgcgaaatttttattgaattagaatactttaccgcgattcaataagagtaaaataaaaaaaggagatt

SEQ ID NO: 362 - DNA, 1024 bp, Oryza sativa
  ref <308>: DATABASE ACCESSION NUMBER: AK103974
  ref <309>: DATABASE ENTRY DATE: 2002-08-28
gacactactcgagctcgcgagcggcgagcccaaaacctgacaaaccacacgcccacctcgccatggcgcggcacctcgcgccaccaggaagcttccaccgcctcctcgcctcccggcactacccgccttcctccccggcaccgccgccgcgccctctccttctcctccccaaaaccctgataccgccggccgccgccgcaatggaattccctcgccgcgggcggcgcgacgtcgccgccgcctccgccccggcatcctcctcgccggagaccgaggtagcgccgggggcctgggggaaggtctccgccgtgctcttcgacatggacggcgtgctctgcaacagcgaggagctctcgcgcctcgcgggcgtcgacttatttgccgagatgggcgtcgacgtcaccggggacgactttgttccttacatgggcacaggtgaggctaatttccttggaggtgtagcgaagttgaagggagtgaaagatttcaacgctgaaagtgccaagaaacgtttttttgagatatatcttgacaagtatgcaaagccaaatgctggcattggattccctggggctctagatctcgtaacagagtgcaaaaatgcaggtttgaaggttgctgttgcatccagtgctgataggattaaggtggatgcaaatttggcagctgctggtttgcctctgtcgctattcgatgccattgtttctgctgatgcatttgaaaatttgaagcctgctccggacatttttttggcagcatctaaaaccctaggtgttgacacagatgagtgcattgtgatagaagacgcacttgctggagttcaagctgcaaaagctgccgaaatgagatgcattgctgtgatgactactctggaggaagatgcgttacagcaagccagtccctcactcatacggaagaatattggagatatttcaattagagatattttgtatggtggttctaatgcttaccacagtatgtagttcaagcaaagtttatttcaataaaataatgcatctcttgt

SEQ ID NO: 363 - DNA, 985 bp, Oryza sativa
  ref <308>: DATABASE ACCESSION NUMBER: AK103975
  ref <309>: DATABASE ENTRY DATE: 2002-08-28
atcgcgcccgagccaaacctaaatccctcggagagagagagagatagagaggaggaaaaaatcaaatctttttgaggaagaaatcatggcgtggcagcaacccatggacggatcccacgcgagcgggagcaaggcggcggcggcggtggcggatggcccgggaacccagaggacgcagtatccttatgtgactggctcatcaattattgcactgaaatacaaggatggtgtcatcatggcatccgacactggagcctcatatggctcaactttgcgatacaagagcgtggagcgcattaaggctgttggtaagcatagccttattggagcaagtggggagttcagtgatttccaggagattttgcgctatttggatgaattaaccctgtccgatcatatgtgggatgatggaaactccttgggtcccaaggaggtccatagctacctgacgagagtgatgtacaacaggcgcaacaagtttgatcccctctggaactcccttgtaattggtggggtgaaaaagggtccaaagggtgaagagaaatatcttggcatggttaacatgattggtacacactttgaggaaaaccacattgccactgggtttgggaaccatatggcaatcccaatacttcgtactgaatggcgcgaggacatgacatttgaggaagctgtcaagcttgttgagaagtgcttgcttgtcctgctgtaccgtgaccgatcatctattaacaagttccagattgccaagatcacaactgagggagcgaccatctacccgccatactcattgaagacttactggggcttcgctgcctttgaaaatccggcccagggtgctgtaggatcatggtagatttatttatgctgcagaggctgaatgtcaggccatgaaccaggatgaagaaacaggctctgttgctgagaggccttgtgaaatgttttatctgaacatcaatgaaactccagatttgctttgtatgac

SEQ ID NO: 364 - DNA, 1178 bp, Oryza sativa
  ref <308>: DATABASE ACCESSION NUMBER: AK058502
  ref <309>: DATABASE ENTRY DATE: 2001-12-06
aaacaaagccacagccttcatcatcatcagagagagaaggagagagaggaagagattgcagtgagtgagtgagtgagtgaagcagccatggcggcggcggcgagggcaacggcgcgggtcgggcttgcgctgctgctcgcggtggtgggcgtcggcgcgcaggactacgacttcttcttcctggtgctgcagtggcccgggtcgtactgcgacacgaagcagagctgctgctacccgcgctccggcaagccggcggccgacttcggcatccacggcctccggcccaaccgcgacgacggcagctacccgcagaactgcgaccctgacagcgagttcgacccctccaaggtgagcgacctgctggggagcatgcgctcggagtggccgacgctggcgtgcccgagcaacgacggcatccggttctgggcgcacgagtgggagaagcacggcacctgcgccgcggcggcgctcggcgacgagcacggctacttcgaggcggcgctccgcctccggtcgcggctgcccgtgctcgccgcgctgcgcgacggcggcgtgtcgcccgacggcggctactacacgctgtcccagatcaagggcgccatccagcgcggcgtcggcgccgagccgttcgtggagtgcaaccgcgacgagtccggcaacagccagctgtaccagctctacttctgcgtggacgccgccggcgagcgcttcgtcgactgccccgcctcccccggcggccgcccctgcggcaatcggatcgagttcccggcgttctagagctctgagctctctctctctaaccagcctcttctcctagctctacggggaagactctaccttcgaagcatgtcctttgtcactgacacgtgggttcgatgaaccatgggttcacttgttcagtgataaatgtatggtgtctttgaaggtataggatctcaattcgggaaaacgtcgacgacaaagaattgatgatgatttaatccatttcagtaatccatgttattgattacggagtaattattaatctgaccgtgtttttttttaattctgttgttgcaataaaagtatggccatgtaatgtttctctcttttttccccgcataatttgaacaagtttaggggggaagtggaacatataaatcaaagaaagaaatgaaatttacatgaatttttacatc

SEQ ID NO: 365 - DNA, 757 bp, Oryza sativa
  ref <308>: DATABASE ACCESSION NUMBER: AK058503
  ref <309>: DATABASE ENTRY DATE: 2001-12-06
gtgaaccacaaaccgacgagcacagcgggcgcgagggcggccggcgccgggcggagcacacgcctctttcacaccatcatcgccagcgccggatccatccacgatgggcggcggcaacgggcagaagtccaggatggcccgcgagcgcaacatggagaaggccaagggcgccaaggggagccagcttgagaccaacaagaaggccatgaacatccaggttttagtttttgattggcatataaaaatctgatgaactgtgttggcggatggcatgaggcccttcgaccaaatttgccgaaacccgtggcgaaggctatgaaccaaggatgatgcgaggcgaagggtcgcgtgagtacctgccgaagaaggacgacttcgccatagccagtttgccctggcatccagcgaagaaggacggcttcgccatgtccagttcgccctggcatccagctcgaagaaggacggcttcaccatgtccagttcgcccccgcaaaggccgaagaagccttttcggcccatcaagcttaggggctatagggccgacggtcgcctgacggcccatcaagggcccataagtcctcttgacattatgtaaccctataaacgtccctttcataagggcaaccatgtaaattcccccgtataacctaaatcctagtagtaagaacctgtaatggggctataaatagtcccctagggccatgtaatgggggatcccaagaaaaattcaaaatttaatacacttcgtttctttccc

SEQ ID NO: 366 - DNA, 1428 bp, Oryza sativa
  ref <308>: DATABASE ACCESSION NUMBER: AK058504
  ref <309>: DATABASE ENTRY DATE: 2001-12-06
acccgcatctcatcagatatgagtgatccttcaacacctaggaaaattgaagatgccaagaacatctccatatacaacgatgtgattgatttcacattgtttgaactcgagaccatcacaaagagcttccgtgctgactacgttcttggtgaaggagggtttgggactgtttacaagggctacatagatgagaatgtcagggttggtctgaagtcactacctgttgcagtcaaggtgctcaacaaagatggacatcaaggacacagagaatggcttactgaggttaggttccttgggcagctaagacatccaaatttagtcaagttgattgggtattgctgcgaagatgaccacaggctgcttgtgtacgagttcatgtttcgaggaagtctagaaaaccacttattccgaaggacagctactccactatcctgggctactaggatgtcgattgcattaggggctgccaaagggttagcttgcctccacaatgctgaaaggccaattatctacagggatttcaagacatcaaatattctgctggactcagattatactgctaaactctctgactttggtctggcaaaagctggcccagaaggcgatcaaacccatgtatcaacacgggtgatgggaacatatggttatgctgcccctgaatacgtgatgactggtcacttgactgctagaagtgatgtctacagctttggtgttgtccttcttgaactcttgactgggcgtaagtccatcgacaagtcacggcccagtagggagcacagcttggttgactgggccctcctgaaactgaacgacaagaggaggcttctccaaatcattgacccaaaactggagggacagtattcagttagagctgcccacaaagcctgcagcctagcatactactgcttgagccaaaacccaaaggcgaggcctcttatgagcgacgtcgttgagactcttgaaccattgcagggcagtggtggaagtgatggagctgttcaatctgttcttggcagtggccttccgagctacagagtaaaccgcagactaacgacgaacagcgtccactgtagggcgattccgaaccccaagtgctcccctgctgtcccagcatgcagggtgagatgagagtgtgctgtttcagttgctcctggaataggttcagttgtacattgcaagtctaaaccgtggatggtgcgtgagtgtgcacacctgcgctgtgtgcttttgggttttttcttcttttttttttggctttctccccagttttcaacctgtaaatttgctctgcatggtggtgcttgtaaggccctctaattttcacagtggtcttatgtgttgttgactgtgtttgctctgccaaaaccggcaaggtttaaccccagaaatgaaaggctgaactaagagtggttggatggttgctatgct

SEQ ID NO: 367 - DNA, 1134 bp, Oryza sativa
  ref <308>: DATABASE ACCESSION NUMBER: AK103976
  ref <309>: DATABASE ENTRY DATE: 2002-08-28
gaagcaagaattcgatcgagaatcaccatgatgacaagtagaatgttttcggcaatgcagatgctgatcatggtggtggtggcattggccgggctagctgccggagcgcgcgccggcgacatcgcgatctactggggccagaacggcaacgagggcacgctggcgcagacgtgcgcgaccggtaattacaggttcgtcatcgtggccttcctgcctgtgttcggcaagggccagacgccggtgctgaacctggccggccactgcgacccggcgtcgaacggctgcaccggcgtgggcgccgacatcaagtcgtgccagagcctcggcatcaaggtcatgttctcgatcggcggcggcgtcggcaactacggcctgtcctcccgcgacgacgccaagcaggtcgcggcgtacctgtggaacaactacctcggcggcacgtcgccgtcaaggccgctcggcgacgccgtcatggacggcatcgacttcgacatcgagagcggcgggggcatgtactgggacgacttggccaggtacctcaaggcgtactcgcggcaggggagcagcaagaagccggtgtacctgacggcggcgccacagtgccccttcccggacgcgtcgctcggcgtcgcgctcagcaccggcctgttcgactacgtgtgggtgcagttctacaacaacccgccgtgccagtacagctcgtccaacggcgtgggcaacctggcgagcgcgtggaagcagtggacgtcgatcccggcgggacgggtgttcctcggcctgccggcggcggcggaggccgccggcagcgggttcgtggagacgagcgacctggtgtcgaaggtgctccccgtggtgaagaagtctcccaagtacggagggatcatgctgtggttgcggtactatgacgggctcacggggtacagcgacaaggtgaagtccagcgtttgagctagccagggtaagctcgtgtcaggtcggcgttcgcgtagaatcacacgtgccgcgcgttccctgcaagatggagtagtttctacacatttcagaacaaagcaaacatgtacaataagatggccggcttgtatactcatttagaagcagaaaaaattgtgagaaatttacgtgtttggtgtgttctac

SEQ ID NO: 368 - DNA, 564 bp, Oryza sativa
  ref <308>: DATABASE ACCESSION NUMBER: AK058505
  ref <309>: DATABASE ENTRY DATE: 2001-12-06
atgtgaaccatctggggagaatgcgggtgttggggttgggagggcaccattattgtagattgtacaaggccagtgctgcttttctccaattgtctgcatgcttgtactggactccgctttatcagagtaaactgcttctgtttctcctacccttctcatggtcagtgtggacaaagcagcttcctcttgatgctaattcttatagcaagcacttctccagaacttgtctatgatttggtcaaatatcagtgtccattgtcatagctgaagttcaaataccagtgcccattgtcatagctgaagttcccttaggaggctcaaaattctgatgcaagaagaattgatatgctgttcttattggagtgcctagaacattggcacacagaaattctaatacctttatctaccatttgttatcttacagcctatggaaatttatgttgatgatgaggctaaactgacccttcacgggcttgttcagcactatataaaactaagtgaggcggagaagaaccggaaattgaatgatctcttagatgcacttgacttcaatcaagttgtgat

SEQ ID NO: 369 - DNA, 877 bp, Oryza sativa
  ref <308>: DATABASE ACCESSION NUMBER: AK058506
  ref <309>: DATABASE ENTRY DATE: 2001-12-06
gcaacagtaattacacggggaatcggataaggtttttctcctctccgacgacgacgacgaacgagagagatcagagcacacgtacgtacggcaatggagtctacgctgatcacgatcacgagatcgcccatcctcccctgtccattctcgagacggcccgcctcgcccgcgcgctgcttcgccggagctcgccgtagccgctgtgccgccgcctccgcttcgttcttctcccccgccggtggccgcggcggcggggatgcaggggcgggctcctcgctctcctccgccgcggccgcggccgcgctcggcgaggcggcggcggcgggtggcggcggatccgactccgaggccatcctgctcagcgtccaggggatgatgtgcgatgggtgcgcggcgagcgtgaagcggattttggagagccaacctgaagtcacttctgccaccgttgattttaaggaagcaaaagcagttgtcttgacaacagctgaggccaaggcggctgaagattggcaaaagcaatgtggagagaaactggcaaatcacctgggcacctgtggatttgaatctcgccttcaagagtaaggagaagccaaatgaagtcaatcatggaaatcgaagatgaagtgcagctggagacctgaagttctgtcctagggccactaatgagtgcaaggccaagtagaagttgccatgctggagaactcagcagttacagcgtttctgacattctgtgctttgtgctatgagctaaatcgaagtgtcaggatgctagcctcacattcacatttcccttgctcgtgaacttttagaaggttcatttggaggaaataaaaagaataaaaacatgaccaatcacaatgcaaggatcttgtacccc

SEQ ID NO: 370 - DNA, 1288 bp, Oryza sativa
  ref <308>: DATABASE ACCESSION NUMBER: AK103977
  ref <309>: DATABASE ENTRY DATE: 2002-08-28
agctcaggcagcagcaggaagcaacgccaatacgccattgccgtgctcctcgacctgcatgcacctctgttcttggcgttgagatacatagaggcttggggtgggtgtttaagaactaagaccggagttaattagcacccctgtggctaccatcgatctgtctaaagagtgattagatcgagatgaccatcaccattgagcagcctcaccttgatgctatcgccgaccggaaggtcgccggcggcggcggcggcgacaacgcggcggagctcgtgctcgacggcggcttcgtcgtgccggactccaacgccttcggcaacgccttcaggaattatgaggccgagtctgagaggaaggagacggtggaggagttctaccgggtcaaccacatcaaccagacatatgatttcgtgaggcggatgcgggaggagtacggtagggtggacaagacggagatggggatctgggagtgcatcgagctgctcaacgagttcatcgacgacagcgacccggacctcgacatgccgcagatcgagcacctcctccagaccgccgaggccatccgcaaggatttccccgacgaggactggctccacctcactggcctcatccacgatctgggcaaggtgctgctgcatcccagctttggggagctcccacagtggtcagtcgtcggtgacaccttccccgtcggctgcgcattcgacgaatgcaacgtccacttcaagtacttcaaggagaaccctgactacctgaacccaaagctcaacaccaagtttggggcctactccgagggctgtggccttgacaatgttctcatgtcctggggccatgacgactacatgtacctggttgccaaggagaacaagaccactcttccttctgcaggcttgttcatcatcagatatcattcattctaccccctgcacaagcatggagcctacatgcatctgatgaacgatgaggacaaggagaacctcaaatggctgcgtgtgttcaacaaatacgacctgtacagcaagagcaatgagaggatagacgttgagaaggtgaagccctactacatgtcactcatcgaaaagtatttcccggccaagttgagatggtgaagaagagggagagaacataaaaaaaattggtcgaaattatcctgtaatatgatgtaattgcaggagttcagttggctgtacaagtatgtagtagtacgtgtacacattttgtatgttaagagcagaatttgttgggagccatgcacgtggaataaaagttgccggtgattgttctttgt

SEQ ID NO: 371 - DNA, 962 bp, Oryza sativa
  ref <308>: DATABASE ACCESSION NUMBER: AK058507
  ref <309>: DATABASE ENTRY DATE: 2001-12-06
aaaatcccattgctcacccgcgttatataaccgcggccggccattgggagggacgccgcgaggggtgctcgtttcagcgcgggaggagatcagatcgggctcagatcttccagctcgccgcgccgcctccgccgccgcagcaggaagagagagggtgaggagaggaggaggctacgatgtttagcgggacgcagcagaagtgcaaggtgtgcaccaagacggtgtacccgatggaccagctctccaccgacggcgtcgtcttccaccgctcctgcttcaagtgccaacactgcaagtccaccctctcccttggcaactactcctcgattgaaggagtgccatactgcaagccccatttcgagcaactgttcaaggagaccgggagctacaacaagagcttccaatcacccgcgaaacccgcatcggagaagttgactcctgagctgacaagatcacctagcaaagccgcacgcatgttttcagggacacaggagaagtgtgccacttgcagtaaaacagcgtatcctctagagaaggtgacagttgaaggacaggcctaccacaagtcctgcttcaaatgttctcacggtggctgtgccatttcgccatccaattatgcagctttggaaggtatcctatactgcaagcaccatttctcccaacttttcaaggagaaagggagctacaaccatctgatcaaatgcgcatcagtcaagcgcgccgaagcacagccggcaccaccaccggccgctgcagattcctcctgaatgtaccatatctccagtgaggcttgagggcgaaaattcggaagccctctgttttacaacctgcttgtatgccatgttccagttctgaggataccgggacctatcaatttcgtgtcctctgctgtgctagactcgatcacattggtgaaccatgaatatcatgtccctttcaaagaaatcgttgtgcaagtactg

SEQ ID NO: 372 - DNA, 492 bp, Oryza sativa
  ref <308>: DATABASE ACCESSION NUMBER: AK058508
  ref <309>: DATABASE ENTRY DATE: 2001-12-06
ttttgcacttgctgctctactgttctttggattaacaatactttgggcgtaatacacctgtcgctgctgaagaatcacatagaagaccaagaacactggtgaaataaaaagattgggttcctcctcacattgcggaagtgaacctttatgcaatcagtaatgtggcttccactttactattaattggcttagctcttcaaaactatggttctctcggtaccatgtgtttgtttttgaaaacaggtttccatgtattcttgtataagtagctattctcaattctcatttacataattcacctgcaagtctgcaacctggtgcttcattcgttaatcgttcataatctggaacatcttcagtgtacaactgtacatattcctgtaacatgatccttggggagttgtgtgtgttttcatgttccttggtgcgtgcagacattgtaaaacaaagaaagtttgttctggaatcttgacaaagaaaaccttttgaatc

SEQ ID NO: 373 - DNA, 770 bp, Oryza sativa
  ref <308>: DATABASE ACCESSION NUMBER: AK058509
  ref <309>: DATABASE ENTRY DATE: 2001-12-06
atctcccttccctgtcgattaccttctctccttcctctgttcctcctctcctccacacatccaggcaggcaacacaagaatcatccgggagagcgacatggccccggttgccgtgggcgacaccctccccgacggccagctggggtggttcgacggggaggacaagctgcagcaggtctccgtccacggcctcgccgccggcaagaaggtcgtcctcttcggcgtccccggtgccttcaccccgacctgcagcaatcagcatgtgccaggattcataaatcaggctgagcagctcaaagccaagggtgtagacgacatcttgcttgtcagtgttaacgacccctttgtcatgaaggcgtgggcaaagtcataccctgagaataagcatgtgaaattccttgccgatggtttgggaacatacaccaaggcacttggtcttgagcttgacctttcggagaaagggcttggtattcgttcgagacggtttgctctccttgctgacaacctcaaggttactgttgcaaacattgaggaaggtggccaattcacaatctctggtgctgaggagatcctcaaggcactgtaagagcttcagctcttaggaacggcagcgatcacttggacctatcgtgtcaatcttgtttaaatttgtctgcaaaatacttgtgcgaataaaattgtcgatgagctgcctagttgtgaggactttatgataatgtttgaatctgtatccactgttgaatcaagtagtaatgttcagtgctcatgtt

SEQ ID NO: 374 - DNA, 1527 bp, Oryza sativa
  ref <308>: DATABASE ACCESSION NUMBER: AK058510
  ref <309>: DATABASE ENTRY DATE: 2001-12-06
aaaaaaacgaggctgtacgtggccaagattttgaaaaggctggggaattaagagatcgggaagtggaattgaaggcccaaattacagccattattgacaagagcaaggaaatggttaaagcagagactgaatccggtgaagtcggtccccttgttactgaggcagatattcagcatatcgtgtcctcttggactggaatacctgtggagaaagtctcatctgatgagtctgaccgtctccttaagatggaggagacactccatacgcgtatcattggtcaggatgaggctgtcaaagctattagccgtgccatccgccgtgctcgtgttggcctcaagaacccaaatcggcctattgctagcttcatcttctctggaccaactggtgtcggtaaatcagagttagcaaaggctcttgcagcctactactttggctcagaagaggccatgatcagactagacatgagtgagttcatggagaggcatacagtctccaagctcattggatcacctccaggttatgttggttacactgagggtggtcaactgacagaagcagttcgccgccgaccatacactgttgttctcttcgatgagattgaaaaggcacatcctgatgtcttcaacatgatgcttcagatcttagaagatggaagactaactgacagcaagggtcggactgttgatttcaagaacacactgttgatcatgacatcaaatgttggaagcagtgtcattgagaagggaggacggaagattggatttgaccttgactatgatgagaaagacaccagctacaataggattaagagcttggtgactgaagagctgaagcagtacttccgacctgagttcttaaacagattggacgagatgattgtgttccggcagcttaccaagctggaggttaaggagattgctgatattatgctcaaagaagtgtttgacaggctcaaggcaaaggacatcgacctccaggtgacagagaagttccgggatagagttgtcgacgaaggttacaacccaagctatggtgccaggcctctgcggcgtgctattatgaggcttctggaggacagcttggcggagaagatgttggctggcgaggtcaaggaaggtgactctgctattgttgatgtggattcagagggcaaggtgatagttcttaacggtggtagtggtgttccggaaccactggcacctgctctgagtgtctaattgaaggataatatcgtcgttctggaattatggccttttctcttctctcagctggggcgctcatgatggtaaaactagatggcataaattctcccttcatttaggtgctttcacttttcctctttttttccaacagaggcagtaggaatgttatggaaatgaatcaacagagatgcatttagcaaacaaactgtatgctagatcttgagttgcttttatttttaaaaggatgtcagaagctttactccttcaagtacgtgtatttattcttttggtagcagtaagataaacgctgcactgttgtacctgt

SEQ ID NO: 375 - DNA, 1246 bp, Oryza sativa
  ref <308>: DATABASE ACCESSION NUMBER: AK058511
  ref <309>: DATABASE ENTRY DATE: 2001-12-06
gcagcagcgcgcggcacaggagagcggggaggaggaggagatggcggaggcgaagcagcagcagcagcagccgcaggcggcgacggcggcggcggcgagcggggtgtggaagacggtgaagcccttcgccaacggcggcgcctccgggatgctcgccacctgcgtcatccagcccatcgacatggtcaaggtgaggatccagttgggtgagggctcggcggcttctgtcaccaagaaaatgcttgcaaatgagggaattagtgccttctacaagggcttgtctgctggtttgctcaggcaagcaacatacacaaccgctcgtctcggatcctttagggttctaacaaacaaagcggttgaagcaaatgatgggaagccactgcctctagtccagaaagctggtattggtctcaccgcaggagcaattggagcctgtgttggtagtcctgcggatttggcactcattaggatgcaggctgattcaacgttgccagcagcccaaagtcgcaattataagaatgcttttcatgcactttatcgtattgctgctgatgaaggtgttctagcactttggaagggcgcaggtccaactgtagtgagagctatgtcgctaaatatgggcatgcttgcctcctatgatcagagtgtggagttatttagagacacacttggtgctggagaagtcactactgtacttggggccagtgctgtttcagggttatgtgcgtctgcttgcagtttaccctttgattatgtgaagacacagattcaaaagatgcagcctgatgcctccgggaagtatccatacactgggtctcttgattgtgccatgaagaccttgaagagtggaggcccatttaagttctacactggctttcctgtgtactgtgtcaggattgcaccacatgccatgatgacttggatattcctaaatgagatccagaagctcgagaagcgtttaggcctctaagagctggttggttcggtcatgctgtccttacctaagacataacaacagtccaggtgtacatagtcgagcaattgcttctgataaacaaaatctttagcctatatgcttccttggtgctttgagccattgacaccaaatgatcacctcatttattgttctttggatcatttcttggtaaattttgggcttacatactgttatcagtttaacacgactaccaagtaccatgagaacaatacgttgttgaatgttgattactggtttgccatttgtttg

SEQ ID NO: 376 - DNA, 1848 bp, Oryza sativa
  ref <308>: DATABASE ACCESSION NUMBER: AK058512
  ref <309>: DATABASE ENTRY DATE: 2001-12-06
tgaaaattcaaaagagctatgaatctttggcaggtctataaatgccttggtccattatgaattatgttgagcaaagcacttaaggggaggagacaatggcggaaacaagcagtgcacggtcgccattgctggacgtcgatgagtcttcgggtgcgtcggaggagctgctgcgccgggagcccgtgccgcggagcgttctgtcgcggctggcggcatgggaggccggcaacctgtggcgcatctcgtgggcgtccatcctcatcacgctcctcagcttcactctcagcctcgtcacccagatgttcgtcggccacctcggtgagctcgagctcgccggcgcctccatcaccaacattggcattcagggcctagcctatggcatcatgattggcatggcgagcgcggtgcagacggtgtgcggccaggcgtacggcgccaggaagttcagggccatgggcattgtgtgccagagggcgctggtgctccagttcgcgacagccatcgtcatcgcattcctttactggtacgccggcccgttcctgcggctcattgggcaggccgcggatgtggcggcagcggggcagctgtacgcgcgcggcctggtgcctcagctgctcgcgttcgcgctcttctgcccgatgcagaggttcctgcaggcccagaacatcgtcaaccccgttgcctacatcaccatggccgtgctgatcttccacatcctcatatcgtggctgaccgtgttcgtgctcggctttggcctcctcggcgcggcactgacgctgagcttctcttggtgggtgctcgtggcattgacatgggggctcatggtctggactccggcttgtaaggagacgtggactggattgtccgtgctcgcgttcagaggcctctggggatatgccaagcttgccttcgcgtcagccgtcatgctagcgttggagatttggtatgtgcaaggatttgtgcttcttactggcttcctccccgacccagagattgcacttgattcgctctctatctgcatcaattactggaattgggacttccagatcatgcttggtttaagctatgcggccagtattcgtgtcggtaatgagcttggagctggccatccaaatgtggcaaggttctcggtcttcgtggttatcacagcaagcgttgccttcagcatcctggctacaattctagtcctagttctcaggtatcccctgagcacgctctacacaagcagcaccaccgtgatcgaggctgtcatcaaactgacaccgttgctgtccatcagcatcttcttgaatggaattcagccaatcctctcaggagtggccgttggtagtggatggcaggtggtggttgcctatgtcaatgttggtgcctactacctgattgggctgccaattggatgcgtccttggatacaaaacaagcctgggggcagctgggatctggtggggcttgatcataggagtatctgtgcaaacggtagctctgatcatcatcactgccaggaccaactgggacaatgaggtgatgaaggcgattcagcgactgcggcaaaccgccgtggatgatggcacggttcccatcgtcgacgacatcgagtgatctgcctgaatggaactgaacaggattacaggactgatctagagctcagcttggccatcctagaagctccaagttggacatggcaaagattttcttgggttgtttaccctttcggcttcagtttatgtagcatctcagtaactcagttccaatttgattagtggacgagaaaatttggtttagtttcgtacaactaagatgcttttgtagtgtgttcttgctccgaattggtattcatgaatattttcct

SEQ ID NO: 377 - DNA, 1299 bp, Oryza sativa
  ref <308>: DATABASE ACCESSION NUMBER: AK058513
  ref <309>: DATABASE ENTRY DATE: 2001-12-06
gtattcgggaaagaacttgtgaactcacctgcaaatgttcttactcctgctgtgcttgccgaggaggcatcaaacattgcttctacatacagtgatgtattcactgcgacaatattagatgtggagaaatgtaaagagttaaagatgggctcctacttgggagttgctgcagcttctgcgaatcctccccacttcatccacttgtgctacaaaccacctggtgggaatgccaagagaaagctggccattgttgggaagggtctaacttttgacagtggtggctacaacattaagactggaccaggctgcagtattgagctgatgaagtttgacatgggaggctctgcagcagtttttggtgcagcaaaagctttgggccaaatcaagccccctggagtagaggttcattttattgttgctgcttgtgaaaacatgattagtggcacaggcatgagacctggtgacattgtgactgcttctaacgggaagactattgaggtaaataacactgatgcggagggaaggcttacacttgctgatgctttggtgtacgcttgtaatcaaggtgttgacaagattattgatctggcaacacttactggtgcatgtgtcgttgcacttgggcctagcattgctggaattttcacgccaagtgatgaactagctaaggaagttgctgcggcatctgagatatcaggagagaagttctggagaatgccactcgaggaaagctactgggagtcgatgaagtctggtgttgctgacatggttaacaccggtggccggcagggtggttctattactgctgcactcttcctgaaacagtttgtggatgagaaggtgcagtggatgcacattgacatggccgggccagtgtggaacgacaagaagcgggcggccaccggattcggcgtctccaccctggttgagtgggttctcaagaactcatcttaaatcatttattcccttgcattctcatccccctgaggatgagatgacacgaggatttcggaggagtttggtggtggcaaagcggccagctagggccaatgatatacaaaagtttagtgggcaatttagaataagaaaactggtcatcgtcgtttccttttcagttggggtgtcgaattgtttggtgaaatcatcatcatcatcatcatcacattcacaagatgttttggccaggacaagtctgttcgtgccgtgtagctctctcccttttctcttttgtcaaatgtggaataacgctcttccttttgatttgtgccccgggataatctgagtcataaatatttcgac

SEQ ID NO: 378 - DNA, 1715 bp, Oryza sativa
  ref <308>: DATABASE ACCESSION NUMBER: AK058514
  ref <309>: DATABASE ENTRY DATE: 2001-12-06
tttctgctgctttgaatgagcctgatctaaattcgattgacatggaggtagacaatgacaatgtagaatgcaagtacgggaatgcaggcgattctactagtcctgaaaatggcaaacatattgaagatcagattattgattgcagaatgactgctttgaaagatcatgagatcaataccgatgtcaggataagagatgtcaacctcaattcatgtttagatgcaatgtctcctcctgtttctggtgcaaattatgaaacatctaatgccatagatgacaataatagatcatccatcattgcccaatgctttggtgctaattctgccgatgacaatgcttgtaaggaggaaaattttgtaaacaaccagagcagtgtatccaaggctgaaagcttcaaccagaacaatgacatgatatatcaacctaatttgaccatggatcctatctctcctgctcaaattaatgtggattgttttacttcttgttcaatgacatctgaaattaagaacaatagcaacagacgtgaagataatgccaaagaacagttggtgaatccacggaacattactagcaatgatgcaggttttgatgttgaagcttacagcaatatcttcaatggcgctatcacagaaagtagtcttgcccagctgaataatgcaataaacatgaaagctgattattcaagctgctattcgttatctgatctgaacacactgactggtggtcctgcaactgatgaaattgatattcacagtatgaggaatagttttgttaatagctccaccagtcgaaatgaaccaaatgaacattgcacactggattttgatatcaagggttccatgcttgaggcactggaaaaatctgacaatgacctggagaatcaatacaatggcagcactcgtccttgtggctcactccctacagctggcacaagtggaagtatagatgattttatgtccttgcaaaccaattttggtagcctgacctctctggttcgttctgttgaagatggtccaatgagtagaattattcaagaccagtgtgatttgcagcttggatttggtgttcagaaaccacagatgtatcctaccttcgaggagcagctgaggatggcctcagctggagctccacagtttgggactatgaacaggcataatcatgtacctgtacccgaaccaacactgatgttaggttatgcgccgcacattggcagctgccctcctgtccagttaggatgggacatgtccatgtcaaagatggttggcgggtgtgtgctccagtcgtccatgtgtgtatggtgcaacactcagttccagcattttggcaccgttgccgatcagcaggctgattcacttggcttcatctgtccggcgtgcaaggagaaaatctctggtcatcttagcatgctcaacaacagttcatcacagctttagcattcagtttcggtcgctcatttgatcttgcagcccgatctggcactgaaagcgattgttctcccgtttatccagaacaactaacttgtccacctctaggttctagataccctgcctcaaaattgcacggttatttatgtaggaattgttatgtatgtatccgtttgactttatgcaatgcatgaactcttcgagaaataacacttttaacactacaaacgtttaacatgttaaacaatggttatcgtaccattggttttcatatccgagcaatttatgaac

SEQ ID NO: 379 - DNA, 1808 bp, Oryza sativa
  ref <308>: DATABASE ACCESSION NUMBER: AK058515
  ref <309>: DATABASE ENTRY DATE: 2001-12-06
ctctccccccttcccgcgagggtttaggcgcggcggagccaaacctcgccgccggcgaccatggtgtcgcagcacgggatcctcctcgccgtcgccatcatctccgaccacttcggccccctcgtatccaaggtgtgccgctgcctgctccgccacggcgcgctgccgctgcaggagatcgtccgccgcctcgagctctcgccggggcaggtgaagaactcgctcctcgtcctcatccagcacaactgcgtgcaggccttcaatgcccccagaggaaatggtgataagacggtaacgcactacctggccatcttcgacaacatcgtgcacagacagcgtttctcaaagttcctttctatcatccgtgcagacatcccagagtcagaagcgctgcttgaaggattgcttcagaatggtaggctaacatttggccaacttgtggagcgaacaatttctaaagtaccagaaggcagtatcacaccagcaagggaggaaatacgaatgaacttcaacaaacttgtatttgcacattatgtggagcgttgcccgaaacctgaacctttctttgatccacttgtagatgaacaatctacctcgtcaaggaaacgtgctccaaaaactgtcgagattgctctttcaattgataagaaagttgtcaatactgcagctctttctgatgcagaaagattttctgagatcccatacatcatggaagatgcatccaatgctaatgattctccacgttcttctatttctggtgctaagaggaaacataatgccttagaaggagatgcagagctcgattcaacaattgcagagaacgaagtactttggcgggcaaattttgagaaattcacattctgtctaaagaagaagttttgtgcagaccgaaagaaacctaagttgaaggttggcacacatcctatctgggaagcatttttcgaggccagtttaatggaaagggacaacaactctgtgacatctccaataaatggtattatggagaggctaggacagaaggaaggaggtacatcgatgacacttgatcatataacaagagttttggaggagttgaattgtagtccttcctcagaggacccagattcattcattttggatttaagcagaattgttgaagcatctcgaaatgaggagatagagtcgcttgtgagaaagaaatacgggcaagaagcttttacaatttttaggctattggtcagagaacgcggtccagttgagacagataaaattattgacacaacaattcttgacaagcagattgttcatggaactttgtataagctttggaaggacgactacatcgatacagagagaatcctttctggaacaggaacagggaacacacaatattttgtatggagagtgaaaaatacattccgggaacagttcatcgataatctatgtcatgctgctttaaacctgcggcaaatggtcaattacatagctgaactcctactcgagggctcaaaggatgacacaaagttgcggaatagaaaaaatattttgatcttagccctgactagacatgacgattctctcatgctgtttcaggatttttgaaacgctgtagcaggtgttccagcatctttcttccatacttaatcatacttcttttgagctagatggtggaatatcatagtttattttgcacccaggcttttattgggtcaactggcttaggattaaccaacgctttccctaggccaatcgaaccaacctttccttttggcatttcgtttcaaaccaaagttcggaaatgaaatcctttggtatattggacccttgtg

SEQ ID NO: 380 - DNA, 544 bp, Oryza sativa
  ref <308>: DATABASE ACCESSION NUMBER: AK058516
  ref <309>: DATABASE ENTRY DATE: 2001-12-06
catgagttgtagggagggacgtatgtcaccacaaacagaaactaaagcaagtgttggatttaaagctggtgttaaggattataaattgacttactacaccccggagtacgaaaccaaggacactgatatcttggcagcattccgagtaactcctcagccgggggttccgcccgaagaagcaggggctgcagtagctgccgaatcttctactggtacatggacaactgtttggactgatggacttaccagtcttgatcgttacaaaggccgatgctatcacatcgagcccgttgttggggaggataatcaatatatcgcttatgtagcttatccattagacctatttgaagagggttctgttactaacatgtttacttccattgtgggtaacgtatttggtttcaaagccctacgcgctctacgtctggaggatctgcgaattccccctacttattcaaaaactttccaaggtccgcctcatggtatccaagttgaaagggataagttgaacaaatacggtcgtcctttattgggacgtactatt

SEQ ID NO: 381 - DNA, 1219 bp, Oryza sativa
  ref <308>: DATABASE ACCESSION NUMBER: AK058517
  ref <309>: DATABASE ENTRY DATE: 2001-12-06
ctctctctctctctctctctctctcctcacgccgacgcctccgtccgcttccgccgccgcgcgcagccgcagcgccgccaccaaccaccgccgccgggagaggggggggggtggtacgggatagggtaggccgcgtcgaggatggcgtcggggagctcctccggcgacatgggcagctcaggggccaaagatgtgatttggatgaaccactgctaacttcaggaagcgctgaaagttcacaacagaggtctactgatgctgacacaaaatcacgtgttgaggatatctggaagaaaatgaacagtggaatgccagctaaaatgcccaaacctgtaatgaataagctcagcacacctgctaaagaaaagaaaagtaccacgggaaataactggatgagtgttctgggactttcaccaagtaaggcttccacaaatgatcaaggctccaaaaatggccaaaagcaggcacaacaagaaacaagcgaggacgccaaaaaacttgcagcgagtgctcttgccgctgtcagagatgctgcttcagctgcagctggaagagggaaagtggagatcacggaggttagggactttgctgggaaggatatcgagatcaagaaactggtggacgccgattcaacagaagcgatagagaaggccaaggccgctggtgctgccccgtctgctctcgaccacatcctcgagcagataaagaagaagcagaagctgagcgtcctggacaagacgaagaaagactggggagagttcaaggaggagaacaaagggatggaggaggagctggaccagtacaagaagagctcgaacaaatacctggataaggtgtcattcttgcagagagctgattacagagagtttgagcgcgagagggatgcgcggctgtccatgatgtcgaagcggaagtcggatacgcgagaggattgatgtgtagaaggcctgaaaaaggaaaaaaaaagttccatcatcttgcagctccttgtggacattctttttagatgatcatgggaacatcattttgtctatgcattctcttctgtttctatctgttgattcaatgtgaatgaagaagaagaagatgctgtgcacattgatactggctgtatccatttcttgtatgtattgtttatgtatgccagtctgggcagtaatttttggaggagctaggcttggcaacattcatgaaggaaaaactccacatttggcctctc

SEQ ID NO: 382 - DNA, 1425 bp, Oryza sativa
  ref <308>: DATABASE ACCESSION NUMBER: AK058518
  ref <309>: DATABASE ENTRY DATE: 2001-12-06
aactcagaccgaacaaaaggatcaccagctcagagctcaccaccaccaccaccaacaacaacaacaacgcattgcaaagcaaggagaaatccgaagtccaacaacacccacaagaaaagagaagaagcggggaatggcgatcgccgtgagcgggcgctggacgcggctgcggacgctgggccgtggcgcgtcgggcgccgtggtgtcgctggcggaggacggcgcgtcgggggagctgttcgcggtcaagaccgcggccgcggcggaggcggcgatgctgaggagggagcgggggatgatgtctgggctgtcctcgccacacgtcgtgccctgcatcggcggcggcgatggccccgacgggtcatacaatctcttccttgagttcgcccccgggggatcgctcgccaacgaggttgccagggatgggggacgcctcgaggagcgcgcgatcagggtgtacgcggcggatgtcctgcgcgggctgacgtacctccacgggatgtcgctcgtacacggggatgtcaaggcggacaacatagtgatcggtgtcgacgggctcgccaagctcgccgacttcgggtgtgcgaaaaccatggattcggagcggccggtcagcggcacacctgcgttcatggcgccggaggttgcccgcggggaggagcaggggccagcggcagacgtttgggctcttggctgcacggtcatcgagatggccaccgggcgcgcgccgtggagcgacatggacgacgtcctcgccgccgtccaccggattgggtacacggacgccgtgccggaggtgccggtttggctgtccgcagaggcgaaggacttcttggccatgtgttttgcgagaaacgccggcgaccggagcaccgcggcacagctcttggagcatccgttcgtggcattcgcctgccacgaagtcaaggccgcgcagccgaagcccaggtgggtctctccgaagagcacactggacgccgcattctgggagtcggagaccgacgacgaggaggaggtcgacgagataacagagagcctctgcgataggatcaagtcactggcgtgccctgtttcggccttgccggattgggactccgacgaaggctggatcgatctgctcggcgagcagtgcgaggcttgcgattcggaagcggccagggaatcgattgatgtggcgcgtagcgcgccaagcaaagtgtccagcgcggcgacggtgccagctgctgaagtggtgcttgtcggcggcggctgctgtccaagcaatgaagcggacgctttcgatcagtcaattggtggcgatatccaagccgctgatcgttcaatcgagcgtcggaataaagtctgcgctggttcagacaatgatgtacttccatttcgattagtatgtaacggaatttgtgcaatggaattctttcagtttttcac

SEQ ID NO: 383 - DNA, 1608 bp, Oryza sativa
  ref <308>: DATABASE ACCESSION NUMBER: AK058519
  ref <309>: DATABASE ENTRY DATE: 2001-12-06
aagtccagcattttcatgttggtgacaatgtgacatttacacttttgagccgctcaaaaaattcactcactccttctattaagaacctcactgatgaatctactatagacgaagatccttgcagtgcattctccaagttcattttgacgtctgatgtggaactttctgttagagaggcaaaaacagatcttgttaattggttgcatatggcagatttaggccttgtggatgacttggagaaacttccatacgtttctaccgctttggagcagctagaagaacggatgaaatattggagtgagtacagaaattttagtgtcagccctcccctaaaagacagcttctcacctgtaactagttccaaatcaaggaaccctaataatgcacaatcttcacgccagaacagtgaacacaagctatctcctctatcagatgaagatatgattgctggtgtttcggagctctgtatttcacctgaatcaaataaaatctttaataaaggaatgccatcgaaaacagaagagagatgtatggctcccatagattcaaatgagaatgatacttataatttttaccaggtatctgatggccaacacctaattcttcatccgctaaacatgaaatgccttataaaccattatggaagttctgatatgctcccaccaagaatacatggaaaaatcttggagctagaaactgtaacacaatccgaagctacaagaaagcgctatcgttatctaagtcacttctcattgacaacaacgttccagttctgtgaaattgacctgggtgatatgctgcctcctagctcattagctccattcatggatgaaatcaagaagcgagagaaacagaggaaacgaactgccaagaaggaagaaagcgatagagtgaaagccgaagttgctgctgctgcacaggcatctgcaatgctgtttgaacatacaagcttctctcccagtagtgggccacatggcgattttatgttctctctggatgactttgaagctcttggaaacaatgctggaccctccacgagtccaccagccagcgaaagaaagcttttctccgatgttgcacggcttggctttgcgtctgcccaagactcgcctcctctaagagttgaatctggggatttgactggcaaaagtgaaagcacgggggaacaagggccagccgcaacacccgcattatcctttgccagcatcatttcctccactagagcgtcagacaatagcctggacacgcacaaaccaaatgtagtcgggaagaaaggcaagaaacccaccaaagtgctcttgtccactggcggtggccgccgatactgaaggaagagtgacactggaatggaagcagttgccagttggctgtttcctataagcagtgtgtatagtgcataacctggacttcacatctgtaacactcccaagtcccaagtagcagctttttctcccatgtggtttgatctaaatcgcctgactgttttagaaggtttttactgtgtatctacatcctgacccatgctaagggagtaagggtgactgccctgtcgcaaaatgagaagagctatgtaaaatttgataaataatgatgctaaggatcatgcgc

SEQ ID NO: 384 - DNA, 1157 bp, Oryza sativa
  ref <308>: DATABASE ACCESSION NUMBER: AK058520
  ref <309>: DATABASE ENTRY DATE: 2001-12-06
gtgcgtggcagcaggcaagcccgccgcggcggtggcagagcaagcggcgacggacggcggcgcagggcaagggaagaaacaataacgtcaggttcgtgcagccggacaagccgcgttccggtcgcagccgatccctggcggcaagccggcacgccgcgcgacatcgaaccgcggcggccggatgatgtcccgggacaggcgctacgactcgttcaagacgtggtccgggaagcttgagcggcagctcgcccatctggctggcgccgggccggagttccccgaggaggaggaggacggttgcgacgccatcagcagccaccacaccaagtccatgcctcaggttgatcgcttcttcgccgcactggagtgccccgaactggacaaactccggtcatcggaggagctggtgcttccgttggacaaaacgtggccgtttctgctccggttcccggtgtcggcgttcggtatctgcctcggcgtgagcacccaagcgatcctgtggaagacggtggcgacgtcagcgccgaccagattccttcacgtcactaccaagactgttgtcctcaaggtcggtatgtcatgccaaggttgtgctggagccgtaaggagagttctcacaaaaatggaaggcgtggagacctttgacatagacatggagcagcagaaggtgacggtgaagggcaatgtcaagccagaagacgttttccagacggtctcaaagacagggaagaagacctccttctgggaggctgcagaagccgcttcggattctgcagctgcagctgctcctgctcctgctccggcaacagcagaagctgaagctgaagctgaagctgctccacccaccaccaccgcggcagaagcacctgccatcgctgctgctgctgctcctcctgctcctgctgctccagaagcagctccggccaaggctgatgcttgatgatcacacataatgcttgcattgacatctggaaattgaactccaagcgattgatttactctctttgcatttagcctctagtaaacggggagtgcagtcttagcttgtgtgatctgcatcatagcagtgttgcaatatggttatctgttgccggccagtgtagcagttgaaatccgaattatgaataaatccagtccgatccgcatggtttcgaaat

SEQ ID NO: 385 - DNA, 1836 bp, Oryza sativa
  ref <308>: DATABASE ACCESSION NUMBER: AK058521
  ref <309>: DATABASE ENTRY DATE: 2001-12-06
atcatctcctccatcctgaggcggcggcgcaacgacgacgacgacgacgatggcgctgctccgcgcgcaccacctcctcctgatgaggccgcgcgccgccttctcctctcgccctccccctctctcatcctccccgtgccgccgcgcccttcccaccaccgccatcgcctcgcgcctcctctgctcccaccacgcctcgtcgccgcccgaagatgcctccgcctccgcctcgccctctatcgtcgccgacctgctcgactacctcaacgagtcatggacgcagttccacgccaccgcggaggcgaagaggcagctgcttgatgcgggcttcacgctgctcagtgagaacgacgactgggacctgcagcctggtggccgctacttcttcacgcgcaacatgtcctgcttgattgcctttgcagtaggggaaaagtacaaattgggaaatgggttcaatataattgcggctcacaccgatagcccatgtctcaagctgaaaccaaggtctgcctcctttaaatctgggcatcaaatggtaaatgtacagacatacggaggtgggctgtggcatacatggtttgacagggacctgactttggctgggagagttatcctcaaggatgctgatggctcatttaagcatgagcttgtcaaagtgagcagaccattgatacgtgtaccaacgctggctatacatcttgaccgcacagtgaattctgatgggttcaagcctaatctggagaatcatctagttccacttcttgcaacaaaacatgaagagactactgcaaattccagtgaaaaaaatagttcaagttccactaaagttgtccatcatccactgctcttgcaagttctttcagatgaaattggttgcaaatcaggtgaaataattggcatagagttgaatgtgtgtgatacccaacctagctgccttggagggggaaataatgagttcatttattctggtagactcgataatctcgcttcgtgttattgtgctcttagatctctcatggactcctccaagatgccagaagaattgtcaaatgagaaggctataagaatgattgctttatttgataatgaagaggtgggttcgaattcgatgcaaggggcgggtgcaccaaccatgttccatgctatgagacggattgtcgattccctgatgcatcaatctatgggagagggtgctttggaacgtgcaataaattcctctttccttgtttcggcagacatggctcatgccctgcacccaaattatccagacaagcatgaagagcaccacagaccagagctacagaaaggactagttatcaagcacaatgctaaccaacgttatgctactagtgctgtgacagcttttctgttcaaagaaatagcaagacttcataatcttcctgttcaggaatttgttgtaaggaatgatatgggctgtggttcaactattggccccatacttgcttctggtgttggcatacggactgttgactgtggtattcctcagctctcaatgcacagcgtgcgagaaatgtgtggcaaagaagacgtagatacaacatacaagcacttcaaagctctcttcgagatgttctctgatattgaccggaaactcaacgtagactaacttttagatcttatcagttcctcatgttcagtatttgaatttttttttcctggatcagaataatgaccgtatatcagagtatcagttttttcttgtcccaacatcccaatctaattctacgcatgaccaagaggggtgaaatcattttacatgtaaatatggtgacacatcgccaagctcacttttgagaagatggccttacacatatc

SEQ ID NO: 386 - DNA, 1306 bp, Oryza sativa
  ref <308>: DATABASE ACCESSION NUMBER: AK103978
  ref <309>: DATABASE ENTRY DATE: 2002-08-28
gtgtagttgtgttgtttgcggcgaaaccctaggattgtctccggcggcggcggcggaaggatcatggagcgggcggcaggcggcgtgtcgtaccagcggttcccgcgggtgcggatccgcgagctgaaggacgactacgccaagttcgagctccgcgacaccgacgccagcatggccaacgccctccgccgcgtcatgatcgccgaggtccccaccgtcgccatcgacctcgtcgagatcgaggtcaactcctccgtcctcaacgacgagttcatcgcccaccgcctcggccccatccccctcacctccgccgccgccatggccatgcgcttctcccgcgactgcgacgcctgcgacggcgacggctcctgcgagtactgctccgtcgagttccacctcgccgcccgcgccaccgactccgaccagaccctcgaggtcacctccaacgacctccgctccaccgaccccaaggtctgccccgtcgaccaggctagggcctaccagcacgccctcggcggaactgaacccttcgacaccgccgctgctgctgaccagaggggcatactaattgtaaagctgcgtcggggccaagagctcaggctccgagcaattgctaggaagggaattggcaaggaccatgccaagtggtcccccgccgctactgtgactttcatgtatgagcctgaaatacgtatcaatgaagaactcatggaaacattgacactcgaggaaaaacgaaatttggtggagagtagccctacaaaagtgttcaacattgatcccaacactcaacaggtggtagttgaggatgcagaggcatatacatatgatgatgaggtcatcaagaaagcagatgccatgggaaagcccggattgatagagatcaatgccaaggaggacagctttatcttcactgttgaaacaactggcgctatcacagcttatgagctgatcatgaacgctatcacggtcttgaggcaaaagttagatgctgttcgtctacaagatgacgatgctgaccttggcgagcttggtgcccaccttgttggaggctaagcgcagagctgcttgtcttgtgttacccacaaagtaggtttctctaactatcgtgctagaggcaaaacatgatggtttcttcgtttggatcaatctagtacatgtaatctccctgatctgtgccattaaatctgtgctggaactttgtgtggacgcaccagactactgttcaatttgatggcaaatcgacacaccagccagctcatctctgggacaaatgtggagctgctagtaatactgaatgctgttc

SEQ ID NO: 387 - DNA, 1888 bp, Oryza sativa
  ref <308>: DATABASE ACCESSION NUMBER: AK058522
  ref <309>: DATABASE ENTRY DATE: 2001-12-06
aggacaatcatttctctgcagcacgtacctcggaggctggatcacaagttgctgaacagccagtggtacaatcttgagaagcatgtaattgtggatggcgagcagaagaaagagaccaaattttcaagccggattcacttgagaatatgcctcgaaggtggatatcatgtcttggatgagtcaacacattacagcagtgatttgaggccaactgctaaacagttatggaagcacagcattggcattcttgagttgggtatcttgacagcacagggcctgttgccgatgaagaccaaggatgggcgtggaacaactgatgcttattgtgttgctaagtatgggcagaagtgggtgcggacaaggactattattgatagtttcacacccaagtggaatgaacaatacacttgggaggtgtatgatccctgcactgtgatcactattggtgtatttgacaattgccacttgaatggtggggaaaaagccaacggtgcccgggataccagaattgggaaggtccgcatccgcctctctacgctagaaactgatcgagtatatactcatgcttaccctctgattgttctgacacctgctggtgttaagaaaatgggggaggtgcagcttgctgtcaggttcacatgctcatcactgctgaacatggtgcatctgtattcacaaccattgctgcccaagatgcactatgtacacccattgtccgtgatgcaggtagacaatctaaggcgccaagccaccaacattgtatcaacaaggctgagccgtgcagaaccaccactgcggaaggaaattgtggagtacatgctggatgttgactctcatatgtggagcatgcggaagagcaaggcaaactttttccgtatcatgggtgtcctaagccctctgattgcggtggccaagtggtttgatcagatctgccattggagaaatccgctgaccaccatactgatccacattctctttgtgattttagtcttgtatcctgagctgatactgccaacaatcttcctctacctgttcctgattggagtgtggtactaccgctggcggccaaggcagccacctcacatggacactcgcctctcacatgcggagagtgctcatcctgatgagcttgatgaagagtttgacacattccctacttctcgtccgcctgacattgtgaggatgcgttatgaccggctacggagtgttgctgggaggatacagaccgtagtcggcgatctcgcgacacaaggagaaaggctgcagtccctgctaagctggagagacccaagagccacggcgctctttgtgaccttctgctttgttgctgccattgtcctctacgtgactccattccgtgttgtggtcttccttgcaggcctgtacaccttgagacacccaaggttccgccacaagatgccctctgttcctctgaacttcttcaggaggctccctgcaagaactgatagcatgttgtaagctcgactgcctcatgctatgctatcgggctgcccaggcgatggctgcaatgcataagaaattggagaaacctgaactcttatctattctcttttttgtagtctatcagttgcatggttatgtatgtcttcaggtggttttgaacctttcatgtaactgctgaacgcattatgtgactggatttgcatgtatggtgcgtgcgggaaatttgttcgtggtcatcacctgtcatcgggaggcttactgggcatgtcatctcatacatattgcattctgtataattccatcagatatgtgcccctgaatttaggctagttgtgttaaggatgatgactgacatttgggctgcaggaagaaatttgtgttaatctgtgctcggcaattctaagtgcaggcattaaccctgacc

SEQ ID NO: 388 - DNA, 457 bp, Oryza sativa
  ref <308>: DATABASE ACCESSION NUMBER: AK058523
  ref <309>: DATABASE ENTRY DATE: 2001-12-06
gataatgagtcattgcaaaaatgtgtctctgaagataagcctgatgaggaggatgtttgcccaatctgtcttgaagaatatgatgaagaaaatccccgctctatgactaaatgtgagcatcattttcatctttgctgcatacttgagtggatggagcggagtgaaacttgcccagtttgtgaccagataaccatgataaatgcgatgtatgaatagccttggtggccctggtggatcctctcttgaagctcatgcttattcagtcggtttggcagaagtcatttgatggggaagcacaatgagcaactgctctgctctcgacattggtttggtcttttttggtggaaggagtgaaattaaggagacaaatgacatgaaatgttctggccaacactgttttgtacctttgttgccaatctttggctaatttatagcaagtagcaacaggaggattagg

SEQ ID NO: 389 - DNA, 1522 bp, Oryza sativa
  ref <308>: DATABASE ACCESSION NUMBER: AK058524
  ref <309>: DATABASE ENTRY DATE: 2001-12-06
atagttgcccccctctctcttcctcctcctcctcctccgggttattacccggcttcctctcctccccttgccgccgccgccgcctcgccgtggaggagcagcggcagtgtgtgcctatcctagaaactttcttgaataggcgcaggtgaactttatcatgagcctcgaggtcgcaggtgcgggggcacctcaggctcaggggaagttcttgggtatacttgtctgctgggttttgggaaatggaagcctcttcgcttggaatagtatgctcaccattgaagattactattcaattctgttcccgacataccatccaacaagagttcttacaatagcttaccaaccttttgccttcggaataacctgcatcctgacataccatgaagcaaagctcaacacaaggaagaggaatctaattggatttgcacttttcttaattagttcttttgcattaataatgctggacattggtactaaaggaaggggtggacttggtccatttatcggtgtctgcataatcagtgccttatttgggacagctgatgccagtgttcaaggcggtttggttggcgacctttccttcatgtgcccggagtttattcagtctttccttgctggcttggctgcatcaggagttctaacatcagccttgagattaattacaaaagcagcatttgagaactcacaaaatggtcttcgtaatggagctatactgttcttttcgataacatgcttcttcgagctagtgtgcctactcctttatgcgtatgtctttcccaagttacccatcgtgaagcactaccgatcaaaggccgccgctgaagggagcaagactgttgcaagtgatcttgctgctgcaggaatcagcaatgaacattctatacaagccgaggaagatcccaaaaaatgcgatcgtttaagcaccaaagatctgttgatacagaacatagactacgcatttgacattttcctgatatatgtcctgactctatcaatcttccctggatttttgtctgaagatactggagcacacagcctgggaacatggtacgcgttgacgctcattgcgatgtacaatgtgtgggatctgattgggaggtacctgccactgatcaagtgcatcaagctgacctcccggaagggtctcacgggggcgatcctggctcggttcttgttcatccccgcgttctacttcactgccaagtacggcgatcaaggctacatgatcttcctgacgtccttcctgggcctcaccaatggcttcctcaccgtgtgcgtcctcaccgaggcgcccaaaggatacaaggggccggagcagaacgcgctgggcaacgtgctggtggtctgcctcctcggcggcattttctccggcgttgtgctcgactggctgtggttgataggaaaaggctggtgatcgtgttgtaatatctctggcatgagagacccattggttctccctgctcggatgagcggggctgttttaacatcagaatggcaggaaagaaaaaaagaatcctcctat

SEQ ID NO: 390 - DNA, 311 bp, Oryza sativa
  ref <308>: DATABASE ACCESSION NUMBER: AK058525
  ref <309>: DATABASE ENTRY DATE: 2001-12-06
aaggtcacccgcccgcacggcaactccggtgtcgtccgcgccaagttccggtccaacctcccgcccacctccatgggcaagaaggtccgcgtcttcatgtaccccagcagcatctaaaagcatccaaggtttcttgcctatgctgcgaaactgatagttgtcaccgtggagggttttatatcaactagtcacttggttaaccagtcagaaatttaagcggttttgaggagttttagcttttctttttatttcggactatttgctgtatcatgatgacaattatttgaaggctttttagcggatttgaagct

SEQ ID NO: 391 - DNA, 1378 bp, Oryza sativa
  ref <308>: DATABASE ACCESSION NUMBER: AK058526
  ref <309>: DATABASE ENTRY DATE: 2001-12-06
accgcgcacatcgaatcgcatcgcacacacggcggaagcaacgccactagcctgacgtacgtacggcagcaatggccatcgccaccgagtcgcagcaggcgcaggtgcaagccgccgccaccgacgccgtcgcggcggcggcggtcgggcgcaaggtggtggacgaggtgtccggctggctgcgcgtgttcgacgacggcaccgtcgaccgcacgtggacgggtccccccgaggtgctcccgctgatgcagccggtgcccgcctacgccgagccgcgcgacggccacacgctgcacgacctccccggcgagcccaacctccgcgtgtacctccccgaggtcgccctcgccgagcggcgcctccccgtcgtcgtgcagctccacggtggcggcttctgcatctcccacccgtcctggctcatgtaccaccacttctacgcgcgcctcgcgtgcgcgctcccggccgtggtggtcgccgtcgagctgcccttggcgcccgagcgccgcctgccggcgcacatcgacaccggcgtcgacgggctccgccggctccgctccatcgcgctgtccgacgccgccgctctcggcgacccggcggcggagctcctccgggacggccgccgacttctcgcgggtgttcctcatcggggacagctcgggcggcaacctcgtccaccacgtcggcgcgcgcgtcggcgaggacggggcggacagctgggcgcccctccgcgtcgccggaggcatcccgctccacccggggttcgtgcacgccacccggagcaagtcggagctggagccgaggcccgactcggtgttcttcaccctcgacatgctcgacaagttcctcgccatggcgctccccgagggcgccaccaaggaccacccgtacacgtgcccgatggggccgaacgcgccgccgctggagtccgtcccgctgccgccgctgctggtcgccgtcgccgagcacgacctcatccgggacaccaacctcgagtactgcgacgcgctgcgcaccgccggcaaggacgtggaggtgctggtcaaccgcggcatgagccactccttctacctcaacaagtacgccgtcgacatggacccggccaccggcgagaggacccgggagctcgtcgacgccatcaagagcttcgtcgaccgccactagacgtggagatcagagaagcgcatcttctccaccgtacgtgtagcaccttccaggttgtgattgtttctcgtctcgtgtcatgactgtccgccatacgttggcctgagcttgaccttgtgtgtggcttgctgtccatgtcaagccgatatcatgtacgcatcagtgtttaggtacgcgtttgagtagttacaaataaataattggatcattcccgaac

SEQ ID NO: 392 - DNA, 1872 bp, Oryza sativa
  ref <308>: DATABASE ACCESSION NUMBER: AK058527
  ref <309>: DATABASE ENTRY DATE: 2001-12-06
atctccatctcatctcgccacccaaaaccctaaacctccctcccatttccgccgccgccgccatgcagtcgcttgccctcacctccccctcccttccggcgccggcgaccgcatccggccgccgccgccgccgcctggagcgcatccgcgccaccgcggtgtccgacgagccgaagctgaacaagtacagcgcgcgcatcacggagcccaagtcgcagggggcgtcgcaggcggtgctctacggcgtggggctcaccgacgccgacctccgcaagccgcaggtgggcgtctcctccgtctggtacgagggcaacacctgcaacatgcaccttctccgcctcgccgaggccgtcagggacggcgtccgcgaggccggcatggtggccttccgcttcaacgccgtcggggtcagcgacgccatctccatgggcacccggggcatgtgctacagcctccagtcgcgcgacctcatcgccgacagcatcgagaccgtcatgggcgcgcagcactacgacgccaacatctccattcctggatgcgacaagaacatgccaggaacaataatggcaatggggcggctgaaccgaccaagtatcatgatatatggtggaactattaagcctggtcattttcagggtaattcttatgacatagtatctgctttccagtgctatggagaatttgttaccggatcaatcagtgatgagcaaagaaagaatgtgctccgcaactcatgcccaggagcaggtgcgtgtggtggtatgtacaccgcaaatacaatggcatccgccatcgagaccatgggtatgagccttccgtacagttcttcaacccctgctgaagacccactaaagctagaggaatgccgtcttgctgggaagtatcttttagaattgttaaagatggatttgaagcctaaagacattatcactgagaaatctttgcggaacgcaatggtcattgtcatggcacttggtgggtctactaatgctgttttgcatttaattgctatcgctaggtctgtaggtctgcaattaactcttgatgattttcagaaggtcagtgaccaagttccttcccttgcggaccttaagcctagtggcaaatatgtcatggaggatctgcataagattggtggaacacctgcagtaattcattatcttctggagcaaggtcttcttgatggtgattgtatgaccgtcactgggaaaactctagcggaaaatgctaaaatcttccctcctctgtccgaaggacagcaaataataaggcccctggacaacccaatcaaatcaactggtcatatacaaatactttatggcaatcttgcaccagaaggttctgtagcaaaaattactggcaaagaggggatgtttttctcaggccctgcactagtgtttgagggtgaagaatctatgattacagctatatcagaaaacccagcgaatttcaaggggaaggtagtagtgatacgaggagaaggaccgaaaggtggaccagggatgcctgaaatgctgactccaactagtgcaataatgggtgctggtcttgggaaggagtgtgccctgctgaccgatggcagattttctggaggatcacatggatttgttgtaggccacatttgtcctgaagcacaggagggaggtccaattggtcttgttcaaaacggtgacaaaattaccattgatgttgtgaagagagtaattgatgttgaactgactgaagctgagctggaagaaagacggaggaaatggacgccgccgccacacaaggctgcccgtggagcgctttggaagtacacgaagctcgtgtcccctgcatcaagaggatgcgtcaccgatgagtagatcctgctgctgctgctcgagtaat

SEQ ID NO: 393 - DNA, 1370 bp, Oryza sativa
  ref <308>: DATABASE ACCESSION NUMBER: AK058528
  ref <309>: DATABASE ENTRY DATE: 2001-12-06
acacgggaggaaaccgagcgccagcgccggcaaacggagaatcccggcggagatgccgaaccccaagccaccggccggtcgcgccggcggaaaccacgacggggctctgcctctggccggtttcgccccgtacaaccagatgcctcccccaaactggctgacacaccgatgccgagcggccggcgcgcgcggctacaaaggcagagcaggcagaggacgggctggattttcaaacgctcgccgcggcgcgcgccgatcgatcgatcgatcgaggaggagccctctacgagatggcggcggcggcggtgcggcaccgcgaggtggaggtggcgagcggggtgcggctgcacgtggcggagtcgggaccggagggcgggcccgtggcgctgctcgtgcacggcttcccggagctctggtactcgtggcgccaccagatgcgcgcgctcgccgcgcgggggttccgcgccgtggcgcccgacctccgcggctacggcgactccgacgcgccgcagggcagggactcctacaccgtcctccacctcgtcggcgacctcgtcgccctcatcgccgacctcggccggccccaggtgttcgtcgcggggcacgactggggcgccgtcgtggcgtggcagctgtgcctgctccgggcggacctggtgacggcgcatgtcagcctcagcgtggagtaccagccgaggcatccccggatgagcgtgctccaggccgtcagggttctctgcggggacgatcactacgtgtgccgcttccagaaacccggagtggctgaagctgaatttgctcgactcgatttaaaccatctgtttaaaatggtgtttggaatgcgcaaaccggcaactattattctaccccaggacaagacattctttgatgcaattgattcagatggtacttgccctccatggctatcagaggaagacatttcctactacgctgacaaattcggcaaaacagggttcacaggaggattcaactactacagatgcattgacctggattgggagctgactgcaccatggactggggctctgataaatgttccgataaaattcatcgtcggtgacctggatctcacatacaacacaccaggtgtgaaggattacattcacaagggtggattcaaagccaatgtgccgaatctggaggatgtggttgtcctggagggagttggccacttcatcaaccaggagaagcctgatgaggtttctgaacacatctgtgagttctttagcaagtttctgatgtaaacgaaatctggtggagtctagtacatgtctgtatgtcgactacagacatgaattccacggtactaaaaatctccaaataaaatatcatggccacttttttacagt

SEQ ID NO: 394 - DNA, 673 bp, Oryza sativa
  ref <308>: DATABASE ACCESSION NUMBER: AK058529
  ref <309>: DATABASE ENTRY DATE: 2001-12-06
atcagcaaccaaagcaagaagcaattcttgagctcaatcagcaacaacatctatctccttcttgcttagttaagtccttcgccctcccaagaagaagaagatgtcttgctgcggcggcaactgcggctgcggcagcggctgccagtgcggcggcggctgcggcggatgcaagatgttccctgatgtggaggccacagccaccaccaagaccttcgtcctcgctgctccatccaacaaggcgagctctggaggaatggagatggcggtggagagcggcgagaacggcggctgcggctgcaacacctgcaagtgtggcaccagctgcagcggctgctcctgctgctcctgcaactgaatctatcgtcgtcgtcgcccggctgcatgaggatttatcgtatggatgctgctactgtcgatcagagctttgatcgaggccttaatttgcttgcattagtacccagcttatatgtaggcaggccttgccttttgctctgacgcctaaataaaaccgtcgtcgtcgttgtcagtgtgtgcgtgtgtcgatcaatgttggatggatccctagctagcttggatggatcatctatcatcatggtgatctcatcatgtactcctgctccatctcctcatgcgtgccaggcttcttaatataatctacctctgctttcacccc

SEQ ID NO: 395 - DNA, 2044 bp, Oryza sativa
  ref <308>: DATABASE ACCESSION NUMBER: AK058530
  ref <309>: DATABASE ENTRY DATE: 2001-12-06
atcgtgaactgcatgctgagcgatgcgatacagagcttaaactatctgttgctcggaaaatgagagaggaggatggattttattatccccataatcttgattttcgtggccgtgcataccctatgcatgcacatctaagccacctaggttcagatctatgcagaggtgttctagagtatgctgaagggcggccactaggaaagtctggcttacgctggttaaagattcatttggctaacaaatatggtggaggaattgaaaagctttctcatgaggacaaggtagcatttgtggagaaccagttgcctgatatatttgattcagcaactaatcctgttgacgggaattgctggtggatgaatgctgaggatccttttcaatgtttagccgcatgcatggatctttctgatgccttaaaaagttcatcacctcagtgtgctgtttctcacctacctattcatcaggatggttcatgcaatggtttacaacactatgctgctcttggaagagactatatgggtgcagctgctgtcaatttagttcctggagacaaacctgcagatatctactcagagattgctgctagggtgctggatgttgttcgggaagactcgatggaggatcctgcaactaatccaactgcctcattagcaagggttttagtcgatcaggtggataggaagcttgttaagcagacagtgatgacatcagtttacggtgtcacatatattggtgctcgtcaacagataacaaaaagactacaagagaaagggctcattacagatgacaaattgttgtatgaagtgtcctgctatgctaccagggtaactttggatgcattaggacaaatgttccagtctgcccgtggtataatggcatggcttggtgattgtgcaaagatgattgcttcagaaaaccaccctgtcaaatggacgagccccgttggtcttccggttgttcagccctacaagaaatataagaactacatgattcgaacttcactgcaatgtctggctttacgacgggagggagatgcaattgcactccagcggcaaaaggcagcttttcccccaaattttgtgcactctcttgatagttcacacatgatgatgactgctattgcatgcaaaaaggctggtcttcattttgcaggggtgcatgactcgttttgggtgcatgcatgtgatgttgataaaatgaatcagatactgagagaacaatttgtggagctttacagcatgccaattcttgaaaatttgctcaaggagttccagacatcattcccaacactagaatttcctccctgtccttcacaaggggacttcgatgtgagagaagttcttgcttcaacctacttcttcaactaagcttaatggaaaagttttgcacattagcacatacgcagcaagtcagtaagttcggcagtagctgaatagccagccatattgctgataccatggtgatttggtgccaagtacgaaatgtggcataagcatcagagaagagcaacacaccgttgcaactgctgggagcctggaacagtatatgggtttttgtcattggcaaatcagttccccagattgccgattttggaggaagctaaaaagttccaagaaacctgagctgaaacaaaacccagtacttcctgctgatgtttttagattcatgcaggatctactaggatttcagttcagggaattcaccatgctacacccagccaatgaaggcgattttgcgacataacaggttatcaactacagaatactgatcgatactagtcctgctgaccaccctgaccaatttgatcataggcgacagttgaaccataatttcactgtctatacatgtaacattatcttttggcctcttagggctataattatagccgattgctgtatcggtgcggtgacctggtaataatgtgtagaataaagtgccaaagagaaatgtatactagtgtacatgattgctggatgctgttgatagcaagcaacctgaaagagagaaatgtacatgaaaacggctcgatcttgtcgattcgttc

SEQ ID NO: 396 - DNA, 1618 bp, Oryza sativa
  ref <308>: DATABASE ACCESSION NUMBER: AK058531
  ref <309>: DATABASE ENTRY DATE: 2001-12-06
agaaagcacaagatccgaggagcagatcgaccaaaagtttctgatcccctcttcttctcgcttgcttctctcctactcgatcaatctcgctagagcttcttgcttgctttgatctctcgagcctctagcctagcttagctagctaagctagctactcatcagtgtcctaagtagagttgctagctagctaagcatggcgagcaatggcgaggcgacgacggggagcgagacggcggcgccggcgccggtgccggagccgaccccgccgccgtgccaggggaggctcatcaccgtgctgagcatcgacggcggcggcatccgcggcctcatcccggccaccatcctcgcctgcctcgaggccaagctccaggagctggacgggccggaggcgaggatcgcggactacttcgacgtgatcgccgggacgagcaccggggcgctgatcacgtccatgctggcggcgccggacgacgaccggcggccgctcttcgccgccggcgacctcaccaacttctacctcgagaacgggcccaagatcttcccgcagcggagggttgggttcttgacaccagtggcaaacctgatcggcgtggtgagggggcccaagtacgatggctcgttcttgcatgacaagatcaagagccttacgcatgacgttaccatctcaaacacggtcaccaacatcgttgtaccggctttcgatgtcaaatacttacaacccatcatcttttccacctatgaggccaagaatgagcccctcaagaatgcccacctctccgacatctgtatcagcacgtcagcagcgccgacatacttccccgcgcacttcttcaagaccaccgacgtctcctccggcaagtctcgggagttccacctcatcgatggcggtgtcgctgcaaacaacccgacaatggtagccatgtctatgatcagcaaggaagtgttgcgtgagaaccaggactttaaattgggtaagccagcagattacaagcactacctggtgatctcaatcgggacagggacggcgaagatggcggagaagtacaccgcgccggcatgcgccaaatggggtgtgctccggtggctctatgacggcggcttcaccccactcatcgacatcttcactcatgctagtgctgacatggtcgacatccacgcgtccgttctcttccagtctctctgctgcgagaagagctacctccgtattcaggacgattcgctggaggggcacacgtcgtcggtggacatcgcgacgaaggagaacatggaggcactgatcaagatcggcaaggaccttctgactaagcgagtggcgagggtgaacatcgacaccggagtatacgagcccgttgatggagagggcaccaacgaggaggcactcgctcgctttgccaagaagctctcagaggagagaaggctacgcagaaacaacctcagttcctcttgagctgagctaaagctaagttagctagctagctcagttctagctaagctaagctaagatgtaaaattaagtaatacagcctgtgatgtagtaagtgtgatgtgggtgaggtattatgcatattgtaataatgttggtttggttttcaataattaatcagcatgtgtttatttg

SEQ ID NO: 397 - DNA, 285 bp, Oryza sativa
  ref <308>: DATABASE ACCESSION NUMBER: AK058532
  ref <309>: DATABASE ENTRY DATE: 2001-12-06
gtgtatacaactgcagtttgatcatccatatgtttctccattgtattattaattccctaatctatgtatagaccataccaatgtaattttgagggaaaattttgtttatgccactaatatatgaattcccaacttctgacgtactccactagttactgtgtgacttctcgtttatgtcactactatcaagccacataccattttttttcctgttttgctcccattctgtcaatttggactgtaagagaaaacattgcaaaatgacagatatatcttccctgtgtc

SEQ ID NO: 398 - DNA, 302 bp, Oryza sativa
  ref <308>: DATABASE ACCESSION NUMBER: AK058533
  ref <309>: DATABASE ENTRY DATE: 2001-12-06
ctagtatttatatggcaggatgatgccaggcaacacaagatctccaaactgtcttaaatttcctatttacattgtatagtgtacatttttgacaaatagacaggcacaatttattacattacccaagtgattctttttcagtcagtttagagataagagagggatgctagttgaggtgtttatttgcacattcgcagcatcattagctgagctgtgtattgaagagaatgctagaaaccatgtatcatatccactctgaagtcggatactattcattttgagaagaggcaaagcgattttac

SEQ ID NO: 399 - DNA, 1179 bp, Oryza sativa
  ref <308>: DATABASE ACCESSION NUMBER: AK058534
  ref <309>: DATABASE ENTRY DATE: 2001-12-06
tcatactatgctgatttcgctaattctcgtgtttatgaacccaataaacctacaacgcctgaacctgagactcagcgcctttccaccttgtataatgctgatgttggtctttacatgctggccaataagtggatggttgatgagaaagaacttagggtcattcactacacacttgggcctcttaagccctgggactggtggactgcttggcttgttaaacctgtggcagtatggcaggatatcaggaaaaatcttgaggaatctctccctggaactggtggagggagaaatcctcatgatcaatcagtggtcaaaattcttttctctctccctttattcatgctgatctgtggttattatggttcatgctttcagactaataaggagctgctgtgtataagatctctgtgtgcttttgctcgacgtgctcgctacaaatacaaatcagaggaagcgcttccttcttattcaacaattggagctgcttcatcgtcctttggtatatcacatcaaaagtcacataatggagcacatctgaagctgccttcttattttggtgccatcaccgtactagtctgcttcatttctgctttaatatctcttgcctttgcctttattattattccacggcaagtgatgccatggacgggtttgctgctgatgtatgagtggacctctgtgacgttcttcttgttgttcgggagctacctccgtgttgtatacaattggggaagttctagtgcaaatcatgtcgggcataacaatttagattcatcagaaaatcatgctggtgcaggacttcagcggaatacgtcggactgtgacacagatgcagctttctattggtcagggatggctatactatctagtatagcattattatcaccaacagtcctgggaataactgctctttttgcaaagcttgggttgatggtagcaggtggcgtggtgttggcatcgtttatgacatacgcttcggagcatctagctatctcggcctttgtcaaaggccaaagagataggaacgcctcgagaggtagcatttgttttatgtgctagtcattctttgaccgcggcaatttctttcaccttgtgtccgaaatgtgcctgttgtaatttgtatcataatgttgtaaaggaaaattttgatgatttatttagtagaaaaggttgtcagag

SEQ ID NO: 400 - DNA, 780 bp, Oryza sativa
  ref <308>: DATABASE ACCESSION NUMBER: AK058535
  ref <309>: DATABASE ENTRY DATE: 2001-12-06
agaagcctcccgcacttgctgctctccccttccactctcatccccttcccctcccaccacccttcgccatggccgtctccacctccgcctcctccaccctcccgctcctctccctccatcgcgccgcggggaaccccaacccggccgcactctccttcccgcctcccctccgcgcgcccccgctccgctcccgcgccgccgctgccgcggcctccgccgcagcaccgcccgccgagaccatccccgacatgcccgaggagacggaggggacggggattccgatgccgtcgtcgattggggatgatggggagcagttggcacccaagcagaagatcagaattaagctgaggtcttactgggtaccattgatcgaggactcctgtaagaagatcattgaagctgcaaaaacaacaaatgcaaagacgatgggtccagttcctctgccaaccaagcgaagagtatattgtgtgctcaattctcctcacgtgcacaaagattcaaggttccattttgagatcagaacgcaccagcgattgattgatatcatgtacccgactgcacaaacaatagattccttgatgcagctccagctccctgccggggtagatgttgaggttaagctatgatttcatgattcacgtggagctggagttttaaaatttgctggtgtaatgtaatgctcttttctgatcattttgctatccgagacttgaacaaatgtagagcaacagggaaaaaagttcgtatatgaagtattgaatgagaatgtcactttatgtt

SEQ ID NO: 401 - DNA, 1388 bp, Oryza sativa
  ref <308>: DATABASE ACCESSION NUMBER: AK058536
  ref <309>: DATABASE ENTRY DATE: 2001-12-06
gtgcccaacgcccaaaaaacacagccaaactccgcgagaaaccgagctgcgagcgagtgaaacgcaccacgcgccgagcggcaaagcgaagcgaagaagaaatggaggcggtggaggacaaggcgatggtgggagtgggaggagcggtggcggcggggtactcctcgtcgtcgtggaggttggggacgcgggcgtgcgactcgtgcggcggggaggcggcgcggctctactgccgcgcggacggggcgttcctgtgcgcccggtgcgacgcgcgggcgcacggcgccgggtcgcgccacgcgcgggtgtggctgtgcgaggtgtgcgagcacgcgcccgccgccgtcacgtgccgggcggacgccgcggcgctgtgcgccgcctgcgacgccgacatccactcggcgaacccgctcgcgcgcaggcacgagcgcctccccgtcgcgcccttcttcggcccgctcgccgacgcgccgcagcccttccccttctcccaggccgccgcggatgccgccgcggcgcgggaggaggatgcggatgatgaccggagcaacgaggccgaggcggcgtcgtggcttctccccgagcccgacgacaatagccacgaggatagcgccgcagccgccgacgcgttcttcgccgacaccggcgcgtacctcggcgtcgacctggacttcgcccggtccatggacggaatcaaggccatcggggtaccggtcgcgccgcccgagctggacctcaccgccggcagccttttctaccccgaacactccatggcccacagcttgtcgtcgtcggaggtcgcgatcgtaccggacgcgctgtcggcgggctcggcggcgccgcccatggtggtggtggtggcgagcaaggggaaggagagggaggcgcggctgatgcggtacagggagaagcgcaagaaccggcggttcgacaagaccatccggtacgcgtcccgcaaggcgtacgccgagacgcggccgcgcatcaagggccggttcgccaagcgcaccgccgacgccgacgacgacgacgaggcgccatgctcgccggcgttctccgccctcgccgcgtcggacggcgtcgtgccgtcgttctgaggaaggacgtacgcacggtacggcgagtcggcgacgtgcgccgtcgtaattttggcgcgccccgtgcgcgcgtgcatgcgtgcgtgtgtgcgacgcatggccccgtgtgacatgaataatatgtacagtagtttttcatccatggacgtagtattctattgtactccttgtactcctactactcctcttctgcctaaccaaggcttgtacattaccatgggagtagctgtttttgcaaccgtgaccatggttcagtgcttcaagttcaagggcgttaatgttactgtc

SEQ ID NO: 402 - DNA, 535 bp, Oryza sativa
  ref <308>: DATABASE ACCESSION NUMBER: AK058537
  ref <309>: DATABASE ENTRY DATE: 2001-12-06
tgcgcatatacaaggtcaaacccccgaagaataggtcttgaggagaggaatcatctcttggttagtatctggtgctattaccttgaggtacattgtgtcaagtcaaaacgtattggagttcctacaggagacgggcaattgatttgaaaatctgcatcagctgcccccaagtgcgatcttttgttttggtgagactgacggaagtagaccataggtcagtttgaagtaacgatcatccgtcttcccctatatcattttgttagatgtaatcaggtgccattcagaactagcaattgcgacgaccgagtactttttgattgctgagcatggtatgacagtactccagatgtttttgtaagcacaacagcttatttgcgtagtaactttagatcgggttacacgggacacttgcaattttctggtgttgaagacaacaatgaataacttaactgtggttgctctgttttcctctgtgagctctcatcatcttgtggcaatcgcagtagtcgtttttatgttaataaatgatgcctat

SEQ ID NO: 403 - DNA, 1051 bp, Oryza sativa
  ref <308>: DATABASE ACCESSION NUMBER: AK058538
  ref <309>: DATABASE ENTRY DATE: 2001-12-06
atcaccgacgccgcggcgatgaaggctctgttcacccagatcaagccgcacgcggtcattcacacagcctctccacacttcgacctgaagcccgagatccacgaaaaggtcaatgttggaggaaccaaggtcttgctgcaagcagcacaagaagctggtgtcaaggcattcgtgtacacgagctcagcaagtgttattcttgaccaccaaacagaactcatcaatgcggatgagagatggcctctggtcactggcgatgaccagcccgaatactacaccacgactaaagcctatgcagagacagccgtactccaagcgaaccgcaaccccgaaaacttcctaacctgcgccatccgtcctacaggcatctttggtgagggcgatgttcaattgcttcccaagatggtctccgcgtgccgcaagggacaaaccaaattccaagtcggtgacaacacaaacatgtttgacttcacgtacgtcgagaacgtcgcccacggccacgtcctcgcggttctggccctccttcatacccacaaggttctacccactattccactggacacggaacgcgtcgatggtgaggctttcttcatcaccaacggccagcccgtttacttctgggactttgcgcgtaaggtctggcatgaggcaggcgatcgggtacccttgagcagcgtctggcatctcagcgccgactttgcacgggctattggcgcagttttggaaaatgtgttctggctcatgggcaagaagccgaacctgacccgggctcaagtaaaatacagtagcatgtcgaaataccacagcatcaataaggcaaggcagcggctgggttacgagccgctcgtcgatttggatgagggtatcaagagaggtgtccagtacattttggagcaggagaagaaggcaggcgagaagaaggggcaataaatgcagctagaatttgcccaaaagtatcacgaagaacatgatgtagtggaattatttcccggttattactcgtagcagacgtagtagataatgtacataattaatgtagctcatggtttcg

SEQ ID NO: 404 - DNA, 1313 bp, Oryza sativa
  ref <308>: DATABASE ACCESSION NUMBER: AK058539
  ref <309>: DATABASE ENTRY DATE: 2001-12-06
gcttgatgcttcgcacgcgcgtgacggcgccgccgttcctcgcctctctcctctctcctctctccgccactccgcctctcccccatcccatcgtccacccggcccgagctgcggaggcgcagatctccgccgctgcgcccgcatcggcacagctacagaccaacgcggccgccggcgctgggagctcgggacgcgaggacagcggtacagccggacccccggctgactgacgcagtgccgcctgcctctgcccgtcgcggcgtcgccgttagcctcttctcttgctctctgccctctgcgctacggctgccggctcgtgtgactcagtggctgtgaagtccttcccagcgggcgagacggcgacccggctcctgcagttgagttgccatggatattgagcgacaagttcaagagacatttagtaaccactataaaagcgtggtgctaatcagaaggggatcagatggcatcggcactggctttattattggtaaaacaaggaaaagttatgttgcgatgacatgctaccatgtcatctcaggtaacccctctggtgctttaaaggtcagactacctagggacacaaaggattatgttgctgagctgctatatgagcatcagggttatgatcttgcaattattaaagttaatggagtgagtggagaatgcccaattcttcaatttggtgatttagaaggtgtggcgcatagggccaatgtcgttcagcttggatatatccttgggtcacagtttgctttaaacttggacccctcagtatctcctggatcagtcataagaccggcaaaccaaaatggaatgatgggcagccaggatgttgtctacagtgccgctgcaagacatggcgcctcaggatctgcagtgatgtttgatgataaagttattggagtactatattcaatgtctacaaatagccaagttgcgtatgctcgatcaagtactactgttcacatggccttgaagaattggttgcatccaaatgatgctgcaataaccactgagaagatgatagaacttgtagtaaaacctctaaatgattcagagttagacgattgattggactggctatggattgcaagggcatgtggactcaatgggtgtagactctattaatgtaatcgcccatggttgtttgttatttttattgatgtcctctttccatgggaatatgttgtctatgtaatttttaatgtttgaaattatcaatagttagctagctattagatcttgttcttttcagctgatggacagcttacggatagttattgcatgcttttaaagctagaattcctttc

SEQ ID NO: 405 - DNA, 788 bp, Oryza sativa
  ref <308>: DATABASE ACCESSION NUMBER: AK103979
  ref <309>: DATABASE ENTRY DATE: 2002-08-28
agcagcttggctttgtctcttacaattatgaggatgatggaaagagcatgagcacagaaacaaggcttctgattgagcaggaggtgaagagcctgctggagaatgcctacaacaatgcaaagaccatcctcacaaaacacagcaaggagcaccatgttctagcccaagcacttcttgagcacgagactctcaccggagcccagataaagaagatcttggcccaggcaaatagcacacagcagcagcaggagcatgctgttgaagctccacggaagacgccagctgcgccgtcgtctccagctgcgtcggcggccgcagcggcggcggcgacggcggccgccgcagcaaaacaagctgcggcgaaagccaagggtgttgctggtattggatcttgagcgcatggaacatccaccgattggcagcataggagtacaatctaagtagcagctaaggtaggagatttgagcaaaatgtgtagtgttcacctgctcttctgcgcaagaaatgtcttttggtacgttctcaccaggtcagagctgttttgttgctggagaccttcccttccaggctccagcgaggggcctatgtagtgttgatatattgtagtaataatttgatagctaaccgtagtccatgtcctttgtttatttatctttatttaagaaactgacgactattaaaaatagaggggacataggaccaatattcaggaaatattattaaggttcaggcaattatattggactagtctagggtcgcacgtataattcgagttaaattatcggttg

SEQ ID NO: 406 - DNA, 1718 bp, Oryza sativa
  ref <308>: DATABASE ACCESSION NUMBER: AK058540
  ref <309>: DATABASE ENTRY DATE: 2001-12-06
ctagtcttctcgcgccacgcgaatccacgccgccgccgcctcttgacctagcgccgccgccgctgccgctgccccttctcgccgccggcttcttcttcttcttccttgtgtagcgcgtgcgcctctcctctcctctcgtcggcgagtgatatggcgggacgtgggaaggcgatcggcgcgggggccgcgaagaaggcgacgtcgaggagctccaaggccgggctgcagttccccgttggcaggatcgcgaggttcctcaaggccgggaagtacgccgagcgcgtcggcgccggggcccccgtctacctcgccgccgtcctcgagtacctcgccgctgaggtgctcgagctcgccgggaacgcggcgagggacaacaagaagacccgcatcgtgccgcgccacatccagctcgcggtgcgcaacgacgaggagttgaccaagctgctcggcggcgccaccatcgccagcggcggcgtgatgcccaacatccaccagcacctcctccccaagaaggccgggtcatccaaggcatccaccgtcgacgacgacgacaactaggccgcccgggcgccttctgcattagtaggatcttttgctagctgttcgtctggatttgcattgtgttgttgcgctgagcagtaggaaggggaaaaagctgggcggcggcggcggtggacatgtcgccggtgcggttcgacgccgcctacatgccgctcttcggaggggacaacctcgttccctcgcctcacgcccgcaccgtcctcctcaaactcgaccgcttcaccggttctggattcgtgtccaagtcggcgtaccaccatggattcttcagtgcttccatcaagcttcctcatgactacaccgccggcgtcgtcgtcgccttctacctgtccaatggcgacgtgttcccggggcagcacgacgagctggacttcgagctgttgggcaaccggcgaggccacgcatggcacgtccagaccaacatgtacggcaacggcagcaccgggcgcggccgcgaggagcgctacctcctccccttcgaccccaccgccgccccgcactcgtacgccatcgcctggacccccgccgccgtcatcttctacatcgacgccatccccatccgcgagctcgttcgctgctcctccggcgactaccccgccaagcccatgtccgtctacgccaccatctgggacggctccgcctgggccaccgacggcggcaggcacaaggtcgactacgcctacgcgcccttcaccgccgtcttctccgacctcgtcgtcaccggtggtactgacgacgaccactgcgccgccatgggcctgatgacgtcggaggtggccgtgatgacgccggcgaagcgcggctccatgcggcggttccggtcgcggcacctgacgtacagcgcgtgctacgacacggtgcgctacaacggcaccggcgtcgtcttcccggagtgcgacgagtcggagcaagacaacttccacgcatggggcgagtccaagcgtgtcatcaacagcagatccagttccagcgccacatacgccactggttcaggcgtgcgcatcgactaatttatttactagtactgtgtaatctcaatcatgcattattccaccagttgatcctgcttctagatgatcgatgatgagtttgtacgtacgtgcacactgacacattttccagttcatatatatactcgtatttccttcggtcgttcg

SEQ ID NO: 407 - DNA, 1646 bp, Oryza sativa
  ref <308>: DATABASE ACCESSION NUMBER: AK103980
  ref <309>: DATABASE ENTRY DATE: 2002-08-28
cttgttcttgcagtcagctcagctccggacgcagcaccagttttctcggagtgccatcagctcgcgggagagttgccggaagagaagctcgccgccggcgtacgacggtgaagggggaacgtacgagcgcgagtgcgggggtgtggtgcgccgccgctgtcgaggtagctgacgcggcctctggaaggctctcagcctctcaggcaggcacaatagtttgtagggagtacaagtagcagaactggtgtgtttgggatccaatcatacgcgatggccttcttccctaacattcccgaggcaaagcaggagattcagtccttgtacagaaattatgcacatttgtttgacatgtcatcggataatgccggtgtagactcccgcataatgcggcgccagcctgccatgttgatagatcgttctgttttcctcactggaagcgcgatttggactattgccctccactacaaggctcacatttacagatggttactgcagaagttttctgccatccagggcgcaccaatttattgtgccatgatattgcgatccttatgtcgacgtagctccttgcctttctttgttggcattagtgttctgacagccaggatatataactacgttacgattcacaatcatatttattccccacaactctgcgctggccatgacgctaaccttcggagggatttgttcattcaagacactgaattgtgcaataagcaaaccctcgattcaggtttccttggcagcaagcatgattgtatccgtctagcacttcattttatttgcagcactgccaatttaaaggtttatacaacaccaaaacagatcggtttcgatgggaagtgcaaacaaaagaataccgagagaggccgattttggaggatcttatcaacaaatgagcaatatctgacttatattggggcactagtgacactacaactgtttttacaactgagcagagcgaacattaccactctgctcctgccaatgctatatcagacaacaagctcccagcgcaatgctgcagttgtcggtaacatcgtgattgttttggtgaactcctttggcattcttgggtctgacttcacaacaaagcaccacggacgggaggtcacattcaccgtgagcgccattctgatggtgttttgccagatcacaatcccattgcttgtggaagcgcaaatcgggctgggcggtggaactcggatactgacgggctacaccacggcgacattcctgctcacatgcgtcgtctcctatggtctcagctggtcatggggctcattgttctgcactattcctggtatgaagattcagtcagctgggcaggttatcggcatgggtctctgtttcgggctctgcttcgtgcaaatgcagtacttcctgctgatgctgtgccggctgaagaacgccatccttgcatactacgcaatgtggatttggtcttgatttaaactaggatctcaagagaagagatgggacagatggctagatgtctgcccgttttactgctagcgtttgatggatgtaaatatgctcattttctttgcctgttctgtacagtttttgtattggttgctatctcagtgtagattctcccaagcagtttctgcgactatgaggcaattaacaaatgttatgct

SEQ ID NO: 408 - DNA, 531 bp, Oryza sativa
  ref <308>: DATABASE ACCESSION NUMBER: AK058541
  ref <309>: DATABASE ENTRY DATE: 2001-12-06
aaaggccctagctaagcaggttcgtcaaagtcacaagcgagtacgtgttgtccgtttagagacaacaactgacaatcagcgaatcgttggactactcattccgaattcagctgtggagtcagtattaacaggcttacagtgggtccaagatattgatgactgacatggataggcttgatttgttttgttcacattcatattggtggtgtcgatcgctttctgatgttagatgcagcagctcagaggtgcggcacatttgattttgtttttttattgagccagcaagctaatatgactaatgtgacagtgtcaacttagaaattaggcaggtaaatacaccctcaacttctgtatgtaaaagatgtggtgtaccctacccccctcttttctatttccttgttatgttgtatattgggatgtaaaacaactaaaccccagcttatatcagaaaaaagaaaaatgcgagggcgcacccaccaatatggcgccatactgtttcggaggaataggccacggttgcttattccctgc

SEQ ID NO: 409 - DNA, 813 bp, Oryza sativa
  ref <308>: DATABASE ACCESSION NUMBER: AK058542
  ref <309>: DATABASE ENTRY DATE: 2001-12-06
cagatgaaattacagctcttatcaaccagacctttgtttggaatgttagcttcacagaggataccctcatgaaaaaccaggaaacattacaggtcaatagcatcatttcatctagcggtacagcacaacccctattgtcttcctcatcagatacagcagtgcagccattggctattatgccatcggcctcagtgagttgtcttcagtcagcaccagcagcaagtgaaaccagcattgagtcaaggatggacacagctacaggaaaaagcacatctgcagagcaggctccgatgacgccaacaacataccccataaagcccccatcggattagacaccaactagtgcatacagcgcgcaatcaacaagcaaaaagagctatgttctacccatatctacacccattcaggcaaaacctgtgccagatgttacaggggtagctgcacagcctccaccatctgtcaacctgtccaccaaaaaaatcaccgaaaaaagggccatgcctacagcctcggccccacctgctaagaaattgttcaaggatgatagccccagcaagggcgacaacaagtgaatcaaagaaaaagtatgctgctacttttgtttccccctacaatatcgtttgcaccagcggatgtactcctctgctagccaggccttttgttcaagacctcttccttatcaatttgcataagtagtctttgtttcctgcagtcgtttttctgttcgtctatatctatctttggaccttgaaaatccactgttactccagaacatggcactcttgtgtaatatgcaatgttcccctaccactc

SEQ ID NO: 410 - DNA, 1798 bp, Oryza sativa
  ref <308>: DATABASE ACCESSION NUMBER: AK058543
  ref <309>: DATABASE ENTRY DATE: 2001-12-06
agcgaggcaccaccctcctctttaagatccgatctcctcccctcctactcctcctcctcctcacgttcccccatctccgaatcccgccgccgccgccgccgccgccgaccatgcctccggcgatcccgacggccacaatgccggcctcccccaaggaggcgcagagccgcgccggcgccggcgtccgcatgatctcctcggaggagctccgcgcgcacgcgtcgagggacgacctgtggatctccatctccggggacgtgtacgacgtcacggcgtgggtgccccaccacccgggcggcgacatcccgctcctgacgctggcggggcaggacgccaccgacgcgttcgccgcctaccacccgccgtcggcgcgcccgctcctggggaggttcctcgtgggccggctcgaggactacacggtctcgccggcgtccgccgacttccgccgcctcctcgcgcagctctcctccgcggggctgttcgagcgggtggggcccaccccgaaggtgcaggtcgccgggatgctgctcctcctctgcgccgcgctctactgcgtcctcgcctgcgcgagcgcgtgggcgcacctcctcgccggcgggctcatcgggttcatctggatccagtccgggtggatggggcacgactcggggcaccaccggatcacggggcacgccgcgctcgaccgcctcctccaggtgctctccggcaactgcctcaccggcctcagcatcgcgtggtggaagtgcaaccacaacacccaccacattgcctgcaacagcctcgaccacgacccggacctccagcacatgccgctcttcgccgtctcctccaagctgttcggcctctggtcctacttctaccagcgcaccctggtgttcgacgccgcgtccaagttcttgatcagctaccagcactggacattctacccggtcatgtgcttcgccaggataaacctccttattcagtcggccgtcttcttgctgtcgagcaggaaggtgccacagagggggctggagatcgcgggcgtcgccgcgttctgggtttggtacccaatggtggtgtcctgcttgcccaattggtgggagagggtggcgttcgtggtcgcgagcttcgtgattaccgggattcagcatgttcagttctgcctgaaccacttctcctcggaggtgtatgtcgggccgccaaaggggaatgactggttcgagaagcagacggcgggcacgctcgacattcagtgctcgccatggatggattggttccacggtggcctgcagttccaaatcgagcaccatctgtttcctcgcctcccgcggtgccaccttaggaaggtttcgccatttgttcgtgacctttgcaagaagcatgggctgccttatgccgccgcctcgttctggcaggctaatgtgttgacatggaagacattgagggctgctgcattgcaggccaggaaagccactagtggtgctgcgccaaagaatttggtttgggaagctgtgaacactcatggatgaattggagcctgaggcaactgcttgtgtgcatgcaatcacctcaatgcttcttaattgtgtagggagattgatctttttacctttacccgttggagttggatcggatttttcgtgttggcaagtgtcttgtctttgcagctgaagagtgggtttatgcttcaattgtctacctgttcttcatgtattagattgtccgattcttcgcattatcacggtaactatatctatagtacttgcattatattatgaacttgtggcttcagtaaaatccatttcattttgcttgc

SEQ ID NO: 411 - DNA, 1222 bp, Oryza sativa
  ref <308>: DATABASE ACCESSION NUMBER: AK058544
  ref <309>: DATABASE ENTRY DATE: 2001-12-06
ttccaacgccatttcttggttttccatccgccgatccactcgcccgatcccctgccgatccacacgcgcgaacgcgcctctctcgccgatccccctccttcgagagcttcgtctccgaggcatttcggagcattgagcggcacaggcaaagggaagtggcttctatcaccctacaaaattgcgttgtttgctgaaatggggggcatagtcgggcggggtgattctccaaggcacacttcaccagcatcaaagttagagagaaagatggttgaagccatgcagcagagagcacagaaaggaacttctgttaaatcattcaatagtgttattatgaagttcccaaaaattgacgagagtttgagaaactgcagaattatctttcagcaatttgatgaagattccaatggtgaaatagatcaacaagaacttaagcattgttttcaaaagttggatatctcattcacagatgaggagataaaagacctatttcaggcatgtgacatttatgaaaacatgggcatgaaatttaatgagttcattgtcttcctgtgccttgtttatcttctgaatgatccgcttgtgtcagaagcaagaaaaagaatgggactaggtagtcttgaaccaactttcgagacattggttgattcattcgtcttcttggacaaaaacaaagatgggtatgtcagcaagaatgagatgatacaagcgatcaacgaaaccatcggaggagaacgctcttctgggcggataggcatgaaaagatttgaggaaatggattgggacaagaatggaacggtgaccttcaaggagttcctcttcgcttttactcgttgggtggggattgatgataacgaagatgacgacgatgaggagggagtgtaaaatgaagatttactcatcctgaattaggccaagtcagcagccctcaggagcactcaagcagtcctcctattgtggcttggagtactcaatgataaaccggagattagttcatgttgtttatgttcttgttaatataaagattggacccaagttatttctagttgtggcgaaagtttagtggtataaagctgctttggtcatatggcatttgatccaattgatcgtagataattaaccctgtcattcaaaaaaaattgtaagcttggatgtttcagagataaaaaattgtaaagtgtgaggaagtgtcattttctttgaaattaaatgtttgttcttgtat

SEQ ID NO: 412 - DNA, 421 bp, Oryza sativa
  ref <308>: DATABASE ACCESSION NUMBER: AK058545
  ref <309>: DATABASE ENTRY DATE: 2001-12-06
tgtgcaagtatgaactaattcgaactgtgaaactgcgaatggctcattaaatcagttatagtttgtttgatggtacgtgctactcggataaccgtagtaattctagagctaatacgtgcaacaaaccccgacttccgggaggggcgcatttattagataaaaggctgacgcgggctccgcccgctgatccgatgattcatgataactcgacggatcgcacggccctcgtgccggcgacgcatcattcaaatttctgccctatcaactttcgatggtaggataggggcctaccatggtggtgacgggtgacggagaattagggttcgattccggagagggagcctgagaaacggctaccacatccaaggaaggcagcaggcgcgcaaattacccaatcctgacacggggaggtagtgacaat

SEQ ID NO: 413 - DNA, 1494 bp, Oryza sativa
  ref <308>: DATABASE ACCESSION NUMBER: AK103981
  ref <309>: DATABASE ENTRY DATE: 2002-08-28
catcaacgaccggctggacaagcggacgtggacgtacatcttcggcgcgtgctgcgccaccacggtgttcatcccgtcgttccacaactaccggatctggtccttcctgggcctcggcatgaccacctataccgcttggtacctcgccatcgccgccctcctcaacggccaggccgaaggcatcacccacaccggtccaaccaagctggtgctgtacttcaccggcgccaccaacatcctctacaccttcggcggccacgccgtcacagtggagatcatgcacgcgatgtggaaaccggccaagttcaagtacatctacctgctggcgacgctgtacgtgttcacgctgacgctgccgtcggcgtcggccatgtactgggcgttcggggacgagctgctgacccactccaacgccttctcgctgctgcccaagaccgggtggcgcgacgcggcggtgatactgatgctgatccaccagttcatcacgttcgggttcgcgtgcacgccgctctacttcgtgtgggagaaggtgatcggcatgcacgacaccaagagcatctgcctcagggcgctcgcgcggctccccatcgtcgtccccatctggttcctcgccatcatcttccccttcttcggccccatcaactccgccgtcggcgcgctcctcgtcagcttcaccgtctacatcatcccggcactcgcccacatcctcacctaccgtacggcctccgcgcgcatgaacgcggcggagaagccaccgttcttcctgccgagctggacggggatgttcgtgctcaacatgttcatcgtggtgtgggtgctcgtggtgggcttcgggctcggcggctgggccagcatggtcaacttcatcaggcagatcgacacgttcgggctcttcgccaagtgctaccagtgtcccaagcccgccccggcgttggcgcagtcgccggtgccattgccgcaccactagcgcgcgcccgttccgcaccaccgccgccgccgcggcggaccgtgacaacgtgcaccgccgagcccggagcaaggaacctcgctctcctggccggcacggctgcaaaaattcagtgttgcttaggttttggtcgccttgtaatatacaaagcctctcctcctgtgctagggtgtcacaccaaaatggtagaagaagaagagggcatgggtccctacgatcttgccccgggccgtccgctgccgcgttgctttcccccgatcctcgatggtgtccttgtgtttgtttggcttgcccctccctctggcgatatatatgtgatggtcgtcatggcttataaagattttcagctcatgtcacattttcatatgatatgatgtagcatatcactatagggttatttgttttctacctggatggagcttggtccatgttgtctagcgcgagcaattgtaatcggcgattcctcgtgctagctaaaggcaaaacacggaggcctttgtttattgcgttccgctttggatgttctt

SEQ ID NO: 414 - DNA, 785 bp, Oryza sativa
  ref <308>: DATABASE ACCESSION NUMBER: AK058546
  ref <309>: DATABASE ENTRY DATE: 2001-12-06
ccctttcgatggctcccgtgttgaacaccaagatgctttgagacaactttggaggttagcataccccaaccgtgacattcctccactgaaatcagaactatggaaggagatgggttggcaaggcactgatccatcaactgacttcaggggtggaggattcatatcattggagaacctcatatttttcgctaggaactatcctggttcctttcaggcgcttctgaacaaagtacaagggcagagagcagactgggagtacccttttgcggttgctgggatcaacatttcatttatgctgatccaaatgctggatctacagtcaagtgttccatcttcaaagtcaggagttcgctttgttgaactgcttggacgagatgagaatgcatttgatcacctctactgcatagcctttcggcttctcgatgctcagtggcttgtgaaacgtgcttcttacatggagttcaatgaggtattgaaatctacaagaactcagttggagcgtgaactagtactagaggatgtattggaggtgaaggacctgccgtcttacacaatgctggacaaataatccaaataagtaagggactgtatgtggcattcaagtgaaaaaagttatccggatctgcaactgatttatgttggcggggccttttgttgtctgaccatctgagtgcatatttatcttttccttgttcaagagaaaaattcaggcctgtgtacatagtgttcattttctgtaacttatgactcgccatttcaaggcaataataagcatcaagttgatc

SEQ ID NO: 415 - DNA, 514 bp, Oryza sativa
  ref <308>: DATABASE ACCESSION NUMBER: AK058547
  ref <309>: DATABASE ENTRY DATE: 2001-12-06
agggctgttgaccaaggctctcatcttcggtgttgcacggaaatttgtagggcagaggaacacattgtagcattacctgatctctgtcactaatcctctgagccaatctgcttattggatgaacactggcacattcactgtcttggcatggaggaattgaggaggagatgatgatccaatggctgacattggcctgtggcacatgccatgatgccattgagggcagatgaaggacttcgatgtatatacaacgccggctgttggataatgagaaagagaggcaatggagtaaaaaatctgtacttttacatttggaaaaggaattccagctatatattacgtggagcctttgtttcttgtaatctgctactatgtggagtaaatcagaggactcgcaaagtcatatataaacatttacttttgctctttacgcagaatcgagatgttgtaatggtgaaaacgaatgaaacaccatttcgatcaaattcatatacaattttcaaattctaacatg

SEQ ID NO: 416 - DNA, 613 bp, Oryza sativa
  ref <308>: DATABASE ACCESSION NUMBER: AK058548
  ref <309>: DATABASE ENTRY DATE: 2001-12-06
atttcagctaggtagcaaccctttagaacagcttggtttgtatatgaaaaatgatgatgaagaggatgaggaaggtgagtctgcagatgaaccaacgattgatgttgaggagggcgaaatagattgacatcttatagaccatttttggatacataaggaggtcaagcatgactggggcggatgcttctaacgtttcctgtctgcacagaaatttgtgaactgcactaattttgggagccaaatgataggttggcaaatgtgtgtgggaaactagtccatcatgcgtttcactatcaaatgaagtgaaagctttcttggaatgagtttatggccagccatgaagtgatggtcgtccgcaagtgcttttctcgatcaaaataatgggttgttttgagggcgatggtctttttgatgagagagagggagagggggtggaggttccatggcttcaacaccttatgtgtgagccatttttgagatagtcttttagtggcatttgctgttgtgaatgtaatcttggaaactgtacaaaaaggatgactgatagatggaaaacattgtcctgagctatcttgtgcccattctttgagaacttgaatgattagtctgtctg

SEQ ID NO: 417 - DNA, 1466 bp, Oryza sativa
  ref <308>: DATABASE ACCESSION NUMBER: AK058549
  ref <309>: DATABASE ENTRY DATE: 2001-12-06
cattggatgggctagaagtcactatttatcatcagtgacgtgtccctctataaagggtaacaggctgatcattccccgtgagagtctggacctagcaattggaaggttaaaggcacaggaggcttcatcgaggaagtcttctgaaaaaattaagattttggcaaaagatgaattcgagcgcaatttcatttcagcagttgtacctcccaatgaaattggagtaaaatttgatgatattggtgctcttgaggatgttaagaagacactggatgaacttgttactcttccaatgaggagaccagagcttttttctcatgggaacttgttaaggccttgcaaaggtatattgctttttggacctccagggacagggaaaacacttttggcaaaggcacttgcaacagaagctggagcaaattttatcagcataactggttctaatcttacatcaaagtggtttggagacgctgagaagctcactaaggcccttttctcctttgctagtcggctagcacctgttatcatatttgtggacgaggttgatagcttacttggtgcaagaggtggtgcatttgaacacgaagcaacaagaagaatgcggaatgaattcatggcagcttgggatggtttaagatccaaagagaaccaaaggatccttattcttggtgcaacaaaccgtccatttgatctagatgatgcagtaattcggcgtttacctaggcggatatacgttgaccttccggactcacagaatcgaatgaaaattctgaagattttacttgcaaaagaaaacctggaatctgatttcagatttgacgaactagccaatgcaactgagggttactctggtagtgacttgaagaacctatgcatcgcagctgcgtacagaccagttcatgagcttctagaagaagaaaagggaggcgttagtggcacaaaaatatctttgaggcccttaaagttggaggattttgtgcaagcaaaagcaaaggtaagtccatccgtcgcttttgacgccacgagcatgaacgagttacgaaaatggaacgagcagtacggggaaggtggaagcaggagtaaatcaccatttgggttcggcagctaacattgttctgtcagtatttttagttctcacattgtatcatctgcatcattagcgagctccaactttagccataggaagccagcaataggcgcttctttctctgatgtgcccgcctcctttccttttcacctatatcctatttcagagttatgtgatccctgtatcaatagagaaacacctaatcacaccaaattttcctgagcctttttgaacaagtgctccgtcctcctgttgtaattttgatgcatccctctgttgaaacctgaccaaactgtaaatagccgaagaagaaattttgtcccgagacaacagataatatgctgttacaacaaaataaatcccatattctttccgttttgtc

SEQ ID NO: 418 - DNA, 1257 bp, Oryza sativa
  ref <308>: DATABASE ACCESSION NUMBER: AK058550
  ref <309>: DATABASE ENTRY DATE: 2001-12-06
aaacttacgaggattcccctagtaacggcgagcgaaccgggagatgcccagcttgagaatcgggcggccgcgccgtccgaattgtagtctggagaggcgtcctcagcgacggaccgggcccaagtcccctggaaaggggcgcctgggagggtgagagccccgtccggcccggaccctgtcgccccacgaggcgccgtcaacgagtcgggttgtttgggaatgcagcccaaatcgggcggtaaactccgtccaaggctaaatacaggcgagagaccgatagcgaacaagtaccgcgagggaaagatgaaaaggactttgaaaagagagtcaaagagtgcttgcagagcaaccagagaccagcagaggaagagagattgtgagacagagaaagatcaggagaggaagtagtagctgaaatggtgaagattccgagcccgaggaggctgttcaggagcaggtccaagagcatcggcggcgccggcggcggcgtcggcgcggacatctgcgcgatggtcgcggagcacgagaagatcgagtgggaggtgcggccgggcgggatgctggtgcagaagcggcgggcgccggaggagcaggacgacggcagcagcagcatgtccgcccactccggcgcggacgccatcgtcgtcagggtctccaccgggtggcaatggcacgacgtctccatcgactccaccgccaccttcggtgatctgaaggtgatgctgtcgctggtgaccgggctgtggccgagggaccagaggctgctgtacaaggggaaggagagagacgacggcgatcacctgcacatggtcggagtccaggacaaggacaaggtgctgctgctggaagacccggccgtcaaggagaggaagctccggtcgaccaccctggcgcagctcatgggagtgccctgccattccttcatcgaagtctagaaattaaattaaacccgccattttgacttgttcttttttggtctgcttgcaagagtgacaccacgcaaagatccttttttgcttccagctcaatcgtctaactgcattgttcggagtcactgttccatttctcgagttcgagggtagtctggattcagccgattgaatcgaatcgtctgcaccaatagtccaatacgacacaaagacataatgtaaattaatgtaattagataatgtcagtgtgtgttgtgtattatttcagctgtaatacttcttaccccatgtatattctcctactgcaatttgcaatacagattatatg

SEQ ID NO: 419 - DNA, 317 bp, Oryza sativa
  ref <308>: DATABASE ACCESSION NUMBER: AK058551
  ref <309>: DATABASE ENTRY DATE: 2001-12-06
taatgtgaagataatcaatgttgacaatgtccaagaagctgcaagagagactgatggatactttatcaaaagtggcattgttaccgtgatcaaggatgctttgctccctagcggaacagttatatgaagtagctgcgtaatatgtgatggggcatcggcgacgagcaccaggcgggcattataagaagaataaaagcagttcaaggcactttattccctttttttttcttctgttcttcctctattgtgttaggataaatgtaatggtagaagcaactgtttttcagatgttttgggagtgaatgataccgtgcttg

SEQ ID NO: 420 - DNA, 1195 bp, Oryza sativa
  ref <308>: DATABASE ACCESSION NUMBER: AK058552
  ref <309>: DATABASE ENTRY DATE: 2001-12-06
ctcatatcaacacgatatcgagcaccactaatgatgaccagaagcagagtgaagaactctctgttggccctagttccgatgagattactgtgccgcatggcgaattcagtgttaaggagaagactgaggagactgtgtcagaccctacatccaacaaaactgatatggtaagcactagtggcggcgttgaagaacagaaccacggtgatgaagtaacttcaggcacgaatactcatgaggaaagtgtaatattagtacacaccaccgataatgtcgaaaagaagatgaacaaagatcttacttcagaacctgcagacaatgttgaagaggaagtgcagagtgaagatatcgcaacagaccctacttctcatgagagcagcacgctacatatcacagacggtgctgaaagcaagaaacaggatgcgaaggtcgctgcagatctcgctgctggcaaaattgatgtgccacggagcgcagatgatgctgaagaacagaagcatgaggcgaccgtcagcacggatgatgatctcaaaggagatgatccgagcgaaagcaactcgccgcagatcatagacggtgctggagacaaggaacaggacgcagaaaccgctgcagatcctcctcctggcaaaaccgacgcgccacccagcacagatgacgctgaagaaacgaagccgaaggaggaggagttggagacggtcggcacggtggtcgacgatcctaaggaggagggcaaggaggagatcgccgacaaggaagtgatcgtgaattcagacaagaaccacgtctcactgaagcccctcctctccgagaaggccgcagaaaccaaggagtcgaagaagccgagcaccaaggatcgcgtgccgtcgttccggcggcgggtgtcgaaagacggcggctctccggcgaagccaggctctcccaaagcggcggtttcagggcagcagcaggattggaactctccggcgaggttaccggtggagaagaagcctaaggggaagaagcagcagtgggtgcccttcatttgctgcccctccatgagctgatcgatcgatgatgttatatatgaatataaatctttagtgtgccacattcttgtttcgttttttttttacccattttgctcgtggactaagaagaattgcattttgtttatgcacgctacatgctattctgcctctgcatttcatgcaag

SEQ ID NO: 421 - DNA, 1522 bp, Oryza sativa
  ref <308>: DATABASE ACCESSION NUMBER: AK058553
  ref <309>: DATABASE ENTRY DATE: 2001-12-06
atggggcgcggtctcctctgcctgctgctgctgcagctcgtcggcctcgtcgtcgccggcggtgggcggtggcggtggcaggaggagttcctccggctgccgtcgtcggatgagacgacgaggtgggcggtgctgatcgcggggtcgaatgggttctataactaccggcaccaggcggacgtgtgccacgcgtaccagatcatgaggaagggaggcgtggaggagcaaaacatcgtggtgatgatgtacgacgacatcgcccacaaccccgacaaccccaggcctgggctcatcttcaaccacccttccggccccgacgtctacgccggcgtccccaaggattacaccggcgacgacgtcaacgtcaacaacttcctcgccgtcctcctcggcaaccgctccgccctcaccggctccggcagcggcaaggtcgtcgccagcggccccaacgaccacgtcttcgtctactacgccgaccacggcggccccggcgtcctgagcatgccagccgacggcgagtacctgtacgccgacgacctggtcaaggcgctcaagaagaagcacgccggcggcgggtacaagagcctggtcgtgtacgtggaggcgtgcgagtccggcagcatcttcgagggcctcctgccttccgacatctccgtgtacgccaccacggcctccaacgcggaggagagcagctggggcacctactgccccggcgacgaccacgacgccccggcggcggagttcgacacctgcctcggggacctctacagcgtggcgtggatggaggacgcggaggcgcaccaggaggggcgcctcgccgagacgctgcggcagcagtacaggacggtgaagaaccggacgtccgacgagggcacctacacgctcggctcccacgtcatgcagtacggcgacatggcgctcgcaccgcagagcctggacctctactacatggatacatcacctgcgacggcgaacgaccacaaattagctgctgctggcgccaaaggcagccactcctacactgtgtctgtgaatcagcgcgacgccgatctgctctacttgtggcgcaagtaccggagagccggcgaggggacggcagagaaggtggaggctcgggagcggcttgtgcaggagatgggacggcgatcgcgcgtggacagaagcgtggagatgatcgggggcctcctcttgggcggcgccaagcacaagcagcaggttgtgcgggagcgggctgcgctggttgaggactgggagtgcctcaggtcgatggtgcggacgttcgaggatcagtgtgggtcgctgggacagtacgggataaagcacatgcgctccttcgccaacatctgcaacgccggcgtcccccaccacgccatggccaaggccgcctccctggcctgtccatccccccctccgttacacttatgatctctaattgatctccatcactagctgcagcctgcaataacaatgatcgatgtaatgtgcatcaccaaatcaaatatatgtcatcatactactgcct

SEQ ID NO: 422 - DNA, 777 bp, Oryza sativa
  ref <308>: DATABASE ACCESSION NUMBER: AK058554
  ref <309>: DATABASE ENTRY DATE: 2001-12-06
agtgatagatgatgctaagtcccagttggaagccgtgtgctccggggtggtatcctgtgctgatatattggctctcgctgcacgcgatgccgttgatttgaccggtgggccaagctggtcagtcccactgggacggagagatggaagaatttcatcagcttcagatgccaaagccttgccgtctccggctgatcctgtatctgttcagaggcaaaaatttgcagctcaaggcctgacggaccgtgagctcgtaacactagttggtgctcacaccatcgggcagacggactgcatctttttccggtaccggctctacaacttcacggcgacggggaacgcggacccgacgatcagcccgtcggcgctgccgcagctgcgggcgctgtgcccgcccgccggcgacggctcccggcgcgtggcgctggacctgggcagcccgggggcgttcgacgtgagcttcttcaagaacgtcagggacggcggcgccgtgctggagtccgaccagcggctgtggggcgacgccgcgacgcaggccgccgtgcagagcttcgccggcaacgtcagggggctcttcggcctccggttcagctacgagttccccaaggccatggtcaggatgagcagcatcgccgtcaagaccggcagccagggcgagatcaggaggaagtgctccaagttcaactaggtgcagtagcccagtcgacagtgaattttgtgatcgatcgagtcacctgtcctgaatgatattgatatatgtacacatgctgttcttctccc

SEQ ID NO: 423 - DNA, 249 bp, Oryza sativa
  ref <308>: DATABASE ACCESSION NUMBER: AK058555
  ref <309>: DATABASE ENTRY DATE: 2001-12-06
gaagctgattttacaccccttaagccgggactgtatcccttttgtttgcgacttaaaaaatgctactcgtatctagtaatagctggctacgttttactatgctgtgagactcgtagagttttacctcctaaaaagaaactcggtatgttgtgaatgctacaactgacactgcaccgtgtgcagtggctcaacattttttgtggtcagatggctatgcttgcaccgtgagactcgtagagttgtgcatct

SEQ ID NO: 424 - DNA, 685 bp, Oryza sativa
  ref <308>: DATABASE ACCESSION NUMBER: AK058556
  ref <309>: DATABASE ENTRY DATE: 2001-12-06
aaactcacttcatccatccacaaacacaagcattgcaaactcaaggtagagttttcaagcttccatttcaattattcttgcaaactcaaggaagagaaatggccatgatcagcgccaagaggattgctcagctagcaaagaaatggcgaaggatggcagcactggggaggaagaggcttacaatgtcgtcgacggcgatggcgacggaagaagcccaaggttgctccacggcggtggccggcaagggtcactgcgccatctacaccgccgacggcgcgcggttcgaggtgccattggcgtacctcggcacggcggtcttgggcgagctcctgaccatgtctcgggaggagtacggcttctccggcgacggcaagatcacgctgccgtgtgacgccatggtgatggagtacgtgttgtgcttgctcggaagaaacgcttcggcagaggttgagaaggcgttcttgagctccatggtgatgccgtgccactatgcaagctgtgtgacaccatctctgggagcttgtcagcaagttgctgtttgcagtaactagcattaccaactgttgtttgtttgacagttagcagtattgtgtgtagagtagttcagacgtagatagaattgaaaaggaagctgtacaatctctcagatgatcaaatcataatgaaatggttcgcattcctcatt

SEQ ID NO: 425 - DNA, 1064 bp, Oryza sativa
  ref <308>: DATABASE ACCESSION NUMBER: AK058557
  ref <309>: DATABASE ENTRY DATE: 2001-12-06
actccgccattcccggacgcctccccacctcacgctcctcctccttctaataaccccagcgatgggtgggagccgagcccttcccctctcctccctcctcgccgccgccaccaaatcccccctcctccaccaccgccccctcccgctccgcctcgccgcctccatgtcgtcgtcgtccccttccccctctcccgctgccccggcctccgcctccgccatcgacttcctcacgctctgctaccgcctcaagacgacgaagagggccgggtgggtgaggcgcggggtgcaggggccggagtccgtcgccgaccacatgtaccggatgggcgtcatggcgctcgtcgccgccgacctgcccagcggcgtgaaccgcgacaggtgtgtcaagatggcgatcgtgcacgacatagccgaagctattgttggtgatatcaccccttcagatggcgtgccgaaggaagaaaagagccgcagagagcaagaagcattggaccatatgtgcagtttgctcggtggtggtccgagagctgaagaaatccgtgaactttggatggaatatgagcagaatgccactttggaagcaaaggttgtgaaagattttgacaaggttgagatgattcttcaagcattggagtatgaaaaggagcaagggctggacctagaagagtttttccagtcaacagcagggaaatttcagacagacgttggaaaagcatgggcagcagaggtagcatcaagaagaaagtgaaattaaccaatcacatgacatttgacaggccccctttggtgtttcttttccaaagataacctcaaggtttctgttaaacttcacccttaaagactttgttagctctgggccatttggacccgatgcttagagcttgagaattgagatcagctggtttcagaggctagttgtttttttttgcttaagctgggttcttgtagctcacctgcctgcctccgggatgctgattcactaggaaagccttattggccgtcctcgttgttgtgatgtaaaatcaactaattcagtttttatggcaatcgagtttcctcgtctc

SEQ ID NO: 426 - DNA, 606 bp, Oryza sativa
  ref <308>: DATABASE ACCESSION NUMBER: AK103982
  ref <309>: DATABASE ENTRY DATE: 2002-08-28
aatgctgacagactggatgagaaacttggaagttggcatcccagctctacttgaggatgggatcaatgtgcttatatatgctggagagtatgatcttatatgcaattggcttggaaactcgaggtgggtccactcgatggaatggtctggccagaaagactttgtatcatctcatgaatcgccatttgtagtagatggtgccgaagctggtgttttgaagagccacgggccactcagcttcctcaaggtccacaatgctggtcacatggttccaatggaccaacccaaagcttccctggaaatgctgaggagatttactcaagggaaactcaaggaggaatggcttgccgagcttcctgagcaaccgatgtatgctgcgatgtgataaaaatacaactgaaatagtctaataggtagtttgagttgccgtttcacggagtgcctgaagcttcatgtttccttttttaccctctttctttttcccaatgtatcaactgaatgcataattctgaaaataacgttggaaccgcgatgtaactaaagttccactcatgtacactgcaaatgaaaaatcaaatacatggaggggaaatgtttcaaaggccg

SEQ ID NO: 427 - DNA, 972 bp, Oryza sativa
  ref <308>: DATABASE ACCESSION NUMBER: AK058558
  ref <309>: DATABASE ENTRY DATE: 2001-12-06
tagcgaaagagaggtactccaatgatgtggcattgaagagatcacctgggagaggccctctgatgttgttggcattagccttgagaagtctaagggcagaacatttacctattccaggggggatgttgccactgaactggttgtacccaagatcaagaacagcaaaagatggcgaattgctgcagaaggaggaaggtccccgttgaggcgattgaagctgacatcaaggacgacaatgctgccagaagacatcagctctgctggaaggccgccagatagggagttgtacgacaggttgaggcgcgacaagctggtgatgccctcccacacacagcagttcgtgccattctgccatgacatggcgatgccaccgtcatgcgacagctcagcaaggaactggaggagagaactcttctcctgctcgacgcaagccatggcggaggtggccacgatgagaagcagcagcaataatgcagcagtagcgaggccagagtacggcatcgctagcctgcttctccacggagaatgtggtgtcatctgcatgaactctctcatcccagcaagtgtttggagttgaatgtggcaatctggcagctaaaatgctcgcgaaaacggcactgtttcaggagcataatgcacatggttgccttgttgacctagcgcgtttgagtctttgcgactggcatatttgagtgtacgtggtagtgatgtgccataccgctggcgctatctatcacattttgtggcctattgactaaatgagacagctggagtactcatgggccacactgctattctatcacactatttccgtttattgttttattctcgtttcagtttgtatagtagaggtccccgtcttcccagtttgtatagttctctgtcgttttactctgaaatttcaacgatttagtgtgaaatgtttcatgctaagaacgcaggttccgtctgatgtcgattccagtctagttc

SEQ ID NO: 428 - DNA, 1706 bp, Oryza sativa
  ref <308>: DATABASE ACCESSION NUMBER: AK058559
  ref <309>: DATABASE ENTRY DATE: 2001-12-06
acacacagaaattcacacccaagccgctgtcacaagcaaggcatccacacacacacagagaggtagagagggcgagatgaaggtggaggtggtggagacgacgctggtggcgccgagcgaggcgacgccgcagcacgcgctgtggctctccaacctcgacctcgccgtgcccaagacgcacaccccgctggtctactactaccccgcgccctcgccgccgccggcggatgcgggggcggaggcggaggcggaggggttcttcgcaccggagaggctgcgggaggcgctggcgagggcgctggtgccgttctacccgctggcggggcggctggcggcggggcccggcggccggctcgagatcgactgcaacggcgagggggcgctgttcgtcgtcgccagggccgacttcaccggcgacgagatgttcaccgacttcgagccctcccccgaggcccgccgcctcctcgtccccttcgccgcctccggcgagcccccctgcgtcctcgccatggtccaggtgacgttcctgaagtgtggaggcgtggccgtcggcacgggcatgcaccatgtcacgatggacggcgcgggcgcgttccagttcatccggacgtggacggggctgtcgcgtgggctcgacgccgcggccgcgtcgccgtcgccgccgtcgcacgaccgcaccctcctccgggcgcgctcgccgccgcacgtcccgttcgagcacccggtgtaccccccgagctacctcaacgggctgccgcggccgttcgtgacccgcgtctactccgtcccgcccaagctcctcgccgacatcaaggccgcctgcgcccccggcgtgtccacgtacggcgcggtgaccgcgcacctgtggcgcgccatgtgcgtcgcccgggggctcccccacgacgccgagtcgcggctgcgcgtcccggccaacatccggcagcgcgtccgcccgccgctcccgtcgccctacttcggcaacgccatcgtgcgcgacctcgtcacggtgcccgtccgcgacatcctgtcgcagccgctggggttcgtggcggagcggatcaagcacgcggtggcgcgcgtggacgacgcgttcgtccgctcggtgatcgacttcctggagctggagtccgagaaggggaaccaggcggcgcgcgggcagttcatgccggagacggacctgtgggtggtgagctggctcgggatgcccatctacgacgccgacttcgggtgggggcgcccggcgttcgtggcgccggcgcagatgttcggcagcggcacggcgtacgtgacgcaggcgccggacaaggacgacggcagcggcggcggcgtgtccgtgctgttcgcgctcgaaccggagtacatccagtgctttgagaaggccttctacggcacagagtgatatgatgcggcggcggcggcggtggccggagtttagagctggaggacatcgagcgacctgggatgcatgatgacgccgaggtggtgtcgacgtctgctgactctgtgtcatgctcaatacataacataatatgcgttatttgatttgcggtagaagtatttagtgtatgctggtactgtgcaacagtgcaagtgtaatgagctgctgccttgttggttgcagctctctctacacagacactttggtctgtcttaagttcgtatgtacaaaaaaaaaatcaaatggaaatgaaaatgactatggaagc

SEQ ID NO: 429 - DNA, 1208 bp, Oryza sativa
  ref <308>: DATABASE ACCESSION NUMBER: AK058560
  ref <309>: DATABASE ENTRY DATE: 2001-12-06
agacgcatcgatcgaccggtgttcgatctttcttgctgtggggatttcgccatgaacgccttcttcacgtcgctggcgagagggctggacgacctgagcagcggcggcgggctgtcgtcgctgccggcgctgctgcgggcggcggcgctgctcagggggctgcactcgcagctcacgctgctggtggggcagctccacctgccgcccggtgggcggtggctcgacgagtacatggacgagaccgcgcggctctgggaggcttgcctcgccgtcaaggtcggccttgccgccgtcgagcggtattgcgctgccgcgtcttgtgctgcggccgccatggatgactggctccaggacccttcccctctctccactcgccaggtgatgagggcgatctctgcgtcgaggagggaggccatggcggcggaggaggagaaccgtgcgctgtcggaggcgaggatcgcgccgctgtcgctgcagctcgacgagcggctgctgctgcgcgccgcggacgccaggttgagcggcttcaacggcttccgcggcctgctctacgcgctgcacaacgccagctcgctgctgctcctcgtcctcgcctccggcgccgtctcctgcgccgccgccgcagcggggccgtgctccgcggatggcgccgcggacgccggcgggttcgtggcgtccatcgcgatgctgcagcagaggatggcggaggaggccgacgccgacggtagcgccggcgcggcgcgggggggcatccggatgtacgagttccggtgcgcgcgcgccgccgtggaggcggcgcacgaggaggtggagcgcgccgtggcggcgggcccccgcaagcagcagtgcgaggacggcgacggcggcgtcaaggacaaggtcgacgagctcaaggcgcggctcgacgtgctccggaccggcaccgacggcctcgtctgccagctcgacgacttcctcgacgacattgtcgagggcaggaaggagctctccgacctttgcagccactgatcgatcgactgcaacaccatcatcatcgccatggatgatggcatgaaatgcttcatgcttcgcgtggtagagtactcgtactgtacgtagtagtagcaagcataatcttcagtagcgagtacgagtagtagttagtggtactcgatgagacagagtgtgtcgctgtcacagcattttgctcatgatgttgttgttgctgc

SEQ ID NO: 430 - DNA, 728 bp, Oryza sativa
  ref <308>: DATABASE ACCESSION NUMBER: AK058561
  ref <309>: DATABASE ENTRY DATE: 2001-12-06
attgtccaagagcttgttatctgaaagcacgtgccgtttgaaggatttatttattcatccttctacaaacagctgatatactacttgtttttttgcttttcacaataccaagataacattcctgaatgcaactgtcccctataccattcttgacctctaaaagaacacctcagttccttagcgttcggaatacgccaagttagtaataataagcaaaattaccaaatttagtgcttaacaaatggaattaccgcttaacttacccttcccctgagagaccaataccgcttgacttgataaaaacttctatttttatttattcttgaggttcacttgtttaacagattacacctagttagctttctgtttgggttgatgtaatattgttcctaaccagtcatgttcggtgtcacagttttttgatgaggatgatgactagactatgaggatttcgtttcgtcttggcctcgacgttctgattggttgacatgtagcgttttaggtgcgagattcgtaatgtgattctttttttttcacacgctaaatccaaactggtggtgcggtgttgcacagtagggaattgaagagcatggccgcgtcgctcgtgtggcgctaatacaaaccttcctgttaacctgagatgtacatacatgataacatgagtgacccttcgattggcaagggcactgtttgatttttatctagacatgcactgtttgatttttttt

SEQ ID NO: 431 - DNA, 1388 bp, Oryza sativa
  ref <308>: DATABASE ACCESSION NUMBER: AK058562
  ref <309>: DATABASE ENTRY DATE: 2001-12-06
acccacaccacacactcccccgcaccacctcagagtgctcgacgatgtcgtcgtcgacggcggcgctcgccgcggcggcggcggcgtcggcggcgcttcttgttctggccgcgttcgccggcggcgtggaggcccgcgaacgcgagtcggcgtggttgcctgcggcgaagaagatggcggcggcgcctaagaaggtggcggcggcggcggcggcgaaggtgccggcggtgatcgtgttcggggactcgacggtggacacggggaacaataacgtggtggcgacgatgctgaagagcaacttcccgccgtacgggcgggacctgggcgccgccacggggcggttctgcgacgggcggctgccgccggacttcatgtcggaggcgctcggcctgccgccgctcgtgccggcgtacctcgacccggcctacggcatcgccgacttcgcccgcggcgtctgcttcgcctccgccggcaccggcctcgacaacgccaccgccggcgtcctggcagtgatcccgctgtggaaggaggtggagtacttcaaggagtaccagcgtcggctccggcggcacgccgggcgcgcggcggcgcggcggatcgtccgcgacgcgctctacgtcgtcagcatcggcaccaacgacttcctggagaactacttcctcctcgtcacggggcggttcaagcagttcaccgtgggcgagttcgaggacttcctcgtcgcgcaggcggcggggttcctcgccgccatccaccgcctcggcgcgcgccgcgtcgccttcgccggcctcagcgccatcggctgcctgccgctggagcgcacgctcaacgccctccgcggcggctgcgtcgaggagtacaaccaggtggccagggactacaacgtcaagctcaacgccatgatcgccggcctccagagctcgctccccggcctcaagatcgcctacgtccccgtctacgacgacatgctcaacctcatcaacaatccttccacacttgggctggagaacgtagagcaggggtgctgcgcgacggggatgttcgagatgagctacctctgcaacgagaagaaccccctgacatgccccgacgccgacaagtacttcttctgggactccttccatccgacagagaaggtgaaccggttcttcgccaattccactctgcagatctgcttgagggagctcctctcttgaatgcacaatattcacacatccaatgtggatgtacaaaaaatattcagacattcagatcaaatgtactatggtctctgtgtcgatgaccgcccgtcgtagataggttttcgtcgaggacgatctaacttgtacaccgttccaatgtgatgatgatcaattctttgggtggttttaaagagagggagataaaaattt

SEQ ID NO: 432 - DNA, 835 bp, Oryza sativa
  ref <308>: DATABASE ACCESSION NUMBER: AK058563
  ref <309>: DATABASE ENTRY DATE: 2001-12-06
gcatctaaaccctcccctcccgtggatcatcgccgccgccgccggtatctcgctgacctttcctctcgtcggaccaagttttcgcgcgtcccaatctgcggatccgtcggtcgtcgccgtcgtgatgctgtccttgtcgagggcgctggggaggcggctcttctcctcctcctccgccgccgcatctgatgccaccgccgcggccgccgcggtggtgaggaaggcgcagaacccactggaggagttcttcgaggtcgagaggagcaccgaggaagacaagccccctccgcactacggccgtagttggaaggcttccgagttacgcctaaaatcctgggatgaccttcagaagctatggtatgtccttctgaaggaaaagaacatgcttatgagtcagcgccagatgctacattcagagaatatgcgttttccaaaccctgaacgtgtttccaaggtgaagaagtcaatgtgtcgaataaagcatgtcttgactgaaagggccatagcagaacctgacccaaggagatccgcagaaatgaagcggatgatcaacgccctttgatcagctttcatgtttcatgttggattaacggttgaaaggacgagtagctatttttagaaatatctgcttcttttctgttgtatgctattctttatctcggaaagcggtacaagactggatccttttgatacccatggaatgcttgaaagatcctactatactattgacattaatagctccagggctaataattttgatgtcatctagaatccatgcaatgtgttttgcatgtccatgtttctgcctcactagaaacgaattcgttcctctgtc

SEQ ID NO: 433 - DNA, 741 bp, Oryza sativa
  ref <308>: DATABASE ACCESSION NUMBER: AK058564
  ref <309>: DATABASE ENTRY DATE: 2001-12-06
aaggaaggcctctcctcctcgtggccatgaccatggaagcctccatgtccaggacagtgtccatgctcttctccgccaggaggtgcatcgtcgccagcgccgccaaggacatcgagatagcacaaggaggaagaaggagaagaagcaacgatgtgaagcagcagcgagggtcacacggccagctcgccgtggccgcggcgacgacggcggcggccatgaccggccaatgccacgctgctgctgctgctgctgcaccggagcgtcagtggcaggaggtggcggagtgggtgtgcagggcggtggcggtggtaggggagctggacccagcgacggcgaaggcggcgatcggggtggccgggccggcgctgtcggcgttcgggttcctgttcatcgcccggatcgtgatgtcgtggtacccgaggctccccgtgagggagttcccctacgtggtggcgtacgcgccgacggagccgctcctcgccgtgacgaggaaggtgatcccgccgctcggcggcgtcgacgtcacgccggtggtgtggttcggcctcgtcagcttcgccagcgagatcctcgtcggcccacagggattgctcgtgctcctctctcagcaaaagccttagcaaactctgtttcgttcgttcgtttccatgtgaaaagtgaagcaaattaatacgctgtgattcggactttacacgatctcctgtagtattaatcgtcggctacaaaaaccaagttctaacg

SEQ ID NO: 434 - DNA, 1596 bp, Oryza sativa
  ref <308>: DATABASE ACCESSION NUMBER: AK058565
  ref <309>: DATABASE ENTRY DATE: 2001-12-06
gacgcgaagaggaagccgcagcacaagaaaaccaaaccccaaccgcggcgacgcgaacggcaagcaaaacccccacacttcccggcggcggcggcggcggtgacggcggcggcgatggagacggtggagacgctggtggcgcacatccagggcctctccgggagcggggaggagctggcccacctccacaaccttctccggcaggccgacggcgagcccctgcgcgcccactccgccgccctcctccccttcctcgcccagctccacccgagcgcccactccctcggcttcctctacctcctggaggcgttcgcgtcttcggcttccaacctgagggcgcagggcggcggggacttcctggtcaccacggccgatttcctcgtctcctgctcggcggagcagatacgcttggcgcctgataagtttctgagtgtgtgtagggtgttcaagaatgaggtcatgcagctcaacgcgccgattagagggattgcccctctgcgggcggcaatccgcaagattcagacttcgtctgaagagctgaccccgatccatgcggattaccttctcctgtgcctgcttgcgaagcagtacaaggctggcctaagcgtcctggaagacgacatactcgaagttgatcagccaaaggacttattcctctattgctactatgggggaatgatatacattgggctgaagaagttcactatagcactggattttcttcacaatgctgttaccgtcccaatgtcatcattgaatgctattgctgttgaagcttacaagaaatacatcctagtttcgctcattcagaatgggcaggttccatcatttccaaagtacacatcttcaactgctcaaaggaacctcaaaaatcatgctcaggtttatgttgacctgtcaacatgctacagcaaaggtaactactctgaattagaggagtatatccagctgaatgctgagaagtttcaatcggacaacaaccttggacttgtgaagcaagtgctctcctcaatgtacaagcgaaacatccagaggttgacacagacctacttgactctttcgcttgaggatattgccagctctgttcaacttaaaaccccgaaggaggctgagatgcatgtgcttaggatgattgaagatggtgagatccatgcaaccataaaccagaaggatgggatggtcagctttcatgaagatcctgagcaatataaaagctgtgagatggttgagcatattgactcgtctattcaaaggttgatggctttgtccaagaagctgtcttctattgatgagaacatctcgtgcgatcctgcatatttaatgaagactggaagagagcgtggtggaagattcgattacgatgacttcgactcagttccgcacaaatatttttgagacgacctctgcattatgtgactcgaggtagtacattagtcaaactagttgttctcatgattgccagtttgatccgtacattccgcccatcaaaatttaaaccctgtaaattctggcgttaaagaatggtgcttttgaaccagagactgaatcagttggtagtttattcaatcagctatcctcttggatgcattttgctgc

SEQ ID NO: 435 - DNA, 358 bp, Oryza sativa
  ref <308>: DATABASE ACCESSION NUMBER: AK058566
  ref <309>: DATABASE ENTRY DATE: 2001-12-06
gagtagaggtcgcgagagagcagagcgtaccgccctgccatagtcgcgaggatcttaatagtcggtcgcgactgttgtcatagtcaacgacggttgaaacttccaggaaaaaacttcgaattgggagggcgatcctcccggtgagctgaccgtaccccaaaccgacacaggtgaacaagtagagtatactagggcgcgtcgagagaaccatgtcgaaggaactcggcaaaatgaccccgtaacttcgggagaaggggtgctctcctatcttttgattaggaaagcggcacataccagggggtagctacatataaaatttagctcaaattggaatggacttatatatcaatgttgtgac

SEQ ID NO: 436 - DNA, 1133 bp, Oryza sativa
  ref <308>: DATABASE ACCESSION NUMBER: AK058567
  ref <309>: DATABASE ENTRY DATE: 2001-12-06
aacgaacgacacgcgagtcggcggcgacaacaaatcgaaaatcgaacgggagaaattctctctgattctctctcgcgggcggcggaagcaatcgtagttagcagaggccggcgagcgagccgccaccggcgatgggcgacagccagtactccttctccctcaccaccttcagcccgtcggggaagctggtgcagatcgagcacgcgctgacggcggtcgggtccggccagacctccctcgggatcaaagctgctaatggagtagttattgccaccgagaagaagttgccttctattttagtggatgaaacatctgtgcaaaagattcagtcgttgactccaaatattggtgttgtctacagtggcatggggccagacttccgtgttttagtgaggaaaagtcgaaagcaagcacaacagtattatcgtctgtacaaggaaactatacctgttacacagctagtccgagaaactgctgctgtcatgcaggagtttacacaatctggtggtgtaagaccatttggtgtatctttgttgattgctgggtatgatgacaatggtccccaattgtaccaggttgatccatcagggtcatacttctcctggaaagcatcagctatggggaaaaatgtgtcaaatgcaaagacatttcttgagaaaagatacacagaagatatggagcttgacgatgccattcatactgctattttaactctgaaagaaggatatgaaggacaaatctccgccaacaacattgaaattgggataatccgatctgaccgtgaattcaaggttctgagccctgcagagatcaaggatttcttggaagaggtggaataatttgtctcaacaatctcatgtttcaaaccagtggacacctgagcagctgcctcgaagttatatcccctttcattcatgaactgattggcaccagtgacacgagacaaatgtttattcagattctcatgaatgaaaatgtgtttttaggaacgtatttgatttggcacggtgtcttctgtatcctcttgtgcccatcctagtctcctcggccagtgctacaactatttggcgtctccttacttttgtagtctgttttacttcttgccaaatgaagcacatgccatcttttgctct

SEQ ID NO: 437 - DNA, 567 bp, Oryza sativa
  ref <308>: DATABASE ACCESSION NUMBER: AK058568
  ref <309>: DATABASE ENTRY DATE: 2001-12-06
attgccacagggtttccacaatcctttcagaagtcccttttggccgatcccaagggtgcaagaataatggaggccaaagaaaaggcagcgaacctcacctataaagcagtggcagcggcgacggtacaaccagcgcccgccgccacttggtctcggaggctcttttcctgaacacggttcaataggaaaactagtagtttgtgtaccttagattctcatggaattactgagttggcgctccaatcaggcttctatgtgttattctttttggatatgtaaacacttaacagttacacatagtgattagcttcacttttattgtatgtatcatctagatgaggttgaggtcttcaggagttcagcagccgtcacgaatttttattgtatgttcaagacgacacttggtagttgttcgttgtaggcgcgacttgctggccaaatctattgagttgtagatgtggatgaatttgcacttgattgatcttgcatttttactcatacggagacgccacgtgactacatgatcgctctggtgtcttgagaaatccatttattcattcttgttgg

SEQ ID NO: 438 - DNA, 1398 bp, Oryza sativa
  ref <308>: DATABASE ACCESSION NUMBER: AK058569
  ref <309>: DATABASE ENTRY DATE: 2001-12-06
attatgctgaagtggtatccctcattaaggatgaatctggagaaaggattattggtgcacggatccgtgatacgctatcaggtaaagaattcgatgcatttgcaaaggtggttgttaacgcagcaggaccgttctgtgactctgtgaggaagatggctaacaatgacgtagtgcccatgatcagtccaagcagtggagtgcacattgtacttcctgattattattcccctgatgggatggggctaattgtccctaaaaccaaggatggtagagttgtatttatgctgccatggttaggaaggacagtagctggtacaaccgactctagtacagcaataacaatgcttcctgaaccacatgaggatgagatacagttcatattagatgctatctgtgattatcttaacgttcaggtaaggcgttcagatgttctttctgcctggagtggtatacgtccactggctatggatccatcggcaaaaaatactgagagcatttccagagatcatgttgtatttgaagactacccaggactaataactatcactggtggaaaatggacaacttatagaagcatggctgaagatgctgttaatgcagccataaggtcaggtaatttgaagcctgccaatggctgtgtgactgatcatctgcatattcttggtggatatggttgggatcctgcttcgtttactgtccttgcacagaactataaacggatgaaaaggacatatggtgggaagatcattccaggtgcaatggacagtgctgtatcgaagcatctgtcacatgcatatggaactttggctacacaagtggcttcaattgcccagaatgaaggcttggggaagcgacttgctcatggatacccatttttggaggctgaagtagcatactgtgctcgccacgagtactgtgaatctgctgtggacttcattgcaaggagatgccgtcttgcatttcttgacacagatgctgctgggagagcattgcctcggatcatcgagattttagctctggaacgcaagtgggacaaggcaaggcagaagcttgaactacaaaagggtaaagatttcctggaaacattcaagtcatccaagaatgcacaattcagggatggcaaacataatggtcaatgagtgaaacataatttctgtgaataagcgtgggtcatacaataaaagcaaagtatgaaacttagacaatcaggctagtgcaagaataattcggtgcaagagggctggggtcctaaaatgttctcagttgtccttttgtgcactttattacttctatctgatttgtggtgaaataacatctcatcggcatgatgtagatcgatggatgtaccacggaagattactctttctaaaaagtaatagaatggtaggccacattttc

SEQ ID NO: 439 - DNA, 1609 bp, Oryza sativa
  ref <308>: DATABASE ACCESSION NUMBER: AK058570
  ref <309>: DATABASE ENTRY DATE: 2001-12-06
gtgcgtgcttgctctgcccatggagctgtggggttcccatggccactgtatcttttttccctctcatcaggatggcgagctgagctgagctgagctgagcttggcaaaccccatgcaggaatagaatttagcttcttgttttaattttcgctcttctcctttccggttaactgtgggtgagagggagctcaagctggaggaagacaagaaccagttgtccaagggcttagacccttggacgagcaaccctaccgccagcgcgagcaccttgcactacctgctccaggagaaggagagggcgcagcaagcgcatgagcagcttcagatctaccagcagcagcagggattcggcagcttcctgcaacaccggatcaggcagccggcgagccgggggccgggaggtggaggcggcggcggcgatggcggcggcagcagcggcgagtcgacgcccgtcgaagcgctggccactgcattcggggcaggccgcatcgtgcggtccgcggccgggcgcaaggaccggcacagcaaggtgtgcacggcgcgcgggctgcgggaccggcgcgtccgcctcgccgcgcacaccgccatccggttctacgacgtgcaggaccgcctcggctacgaccggcccagcaaggccgtcgactggctcatgcgcaacgccaaggccgccatcgacgagctccccgaccgcgccgaggccccgccgccgcccgccgcggcgtcggcggagcagcccgaggccaccgagcaggcgacctcgacgtcctacgggttcggcaacactaccagcggcaccatgaccagcgccgcgtcggccgctgctggctccttccttccacattcgctgggggcagatcgagtctccgacagcgtcaagtccctgttcccctcctcgtccacagccagcggcgccgcctccgccggacacgacgagtacaggggatccccgccggacctcctgtcgcgcacgacaagcaaccagcagccgcaggagctgtgcctcaccctacagtcgaaccagcaccagatcttcagccatgtctcgtcgaaccaccacggtatgatctcgagtgcaggcgttccaggttggcccgaccacagccagagaatgcaggcatggcatgccccggagaacagcacaggagacggccgcggcggcggcaatggcgacggctacatgttcgccatgccgtcgcggcaagggctggaccagagccagctcttctcgcatggggaaccccttcagtccagcggtcgcgggtgggcgtcagcccgcgcatggctagaccccctcgcagtcgcagccatccaccaccagccgtcgacaatggctgccggacaggtcggcttcggccatctcgttggcggcgccggtggcggcggcgggtttatggggtttctcgcgccggcggcgcagcggcttgagggcgaggaggagcacggaagtgaggtgatcaggtgatgagaagagactgaagaattgatgcatggcgcgcatgcaggaggtgtgtgctttctattaattaacacacttcactgatctgcttaagggtacgtgtatgtcatttcatgtaggattttggctgatgaaatttccctcattatt

SEQ ID NO: 440 - DNA, 1921 bp, Oryza sativa
  ref <308>: DATABASE ACCESSION NUMBER: AK058571
  ref <309>: DATABASE ENTRY DATE: 2001-12-06
actcaccacgctctccactacacgactcgtcgccgtcttgctctgctgcctctcgcgcccgcgcagcagtgagcagcagcaagagcagcaaaatggctctacccgggcgcctccgcgccctcatcctcgccgtcgcattgccgctgctcttcctgtccgcttcagaggcgggcacggtggggatcaactatgggagggtggcgaacgacctgcccaacccggcggcggtggtgcagctgatgaagcagcagggcatcgcgcaggtgaagctgtacgacaccgagccgaccgtgctgcgggcgctggccaacaccggcatcaaggtggtggtcgcgctgcccaacgagcagctgctcgccgcggcgtcgcgcccgtcgtacgcgctcgcctgggtgcgccgcaacgtcgcagcgtactacccggccacgcagatccagggcatcgccgtcgggaacgaggtgttcgcctcggccaagaacctcacggcgcagctcgtcccggcgatgaccaacgtgcacgccgcgctggcgaggctcagccttgacaagcccgtcaaggtgtcgtcccccatcgcgctcaccgcgctcgccggctcgtacccgccgtcggccggcgtgttccgggaggacctcgcccaggcggtcatgaagcccatgctcgacttcctcgcgcagaccggctcgtacctcatggtgaacgcgtacccgttcttcgcgtactctggcaatgccgacgtcatctccctcgactacgcgctgttccgccccaacgccggcgtgctcgactccgggagcggcctcaagtactacagcctcctcgacgcccagctcgacgccgtgttcaccgcggtgagcaagcttgggaactacaatgccgtgcgcgtcgtggtgtcggagaccgggtggccgtccaagggtgacgccaaggagaccggcgccgcggcggccaacgccgcggcctacaacggcaacctggtgcgccgcgtcctctccggcaacgccggaacgccgcgccgccccgacgccgacatggacgtgtacctcttcgctctcttcaacgagaaccagaagcccggaccgacctccgagcgcaactacggcgtgttctacccgaaccagcagaaggtctacgacgtcgagttcgtcctcggcggcaactccgctggcggcggcggcagcagcggcaaggacaacggcgggctcggctggcaggacaacggcggggtaaacgccggcaatgcgccggccggcgcaggcggcggcgtgaaggcgacgtcgaccggtgaggcgtggtgcgtggcgaacgccatggccggggaggagcggctgcagaaggcgctggactacgcgtgcgggccgggcggcgcggactgcaaggccatccagcccggcgcggcgtgcttcgagccgaacaccatggtcgcccacgcctcctacgccttcaacgactactaccagcgaaagggccgcaccattggcacctgcgacttcgccggcgccgcctacgtcgtcaaccaagcgccaaagatgggcaagtgtgagctcccgtcgacggtctgaaccgaagcaacagtagcgaaagactgaagaagagcagcggcagcagccatctcgggatgcgaggatttatgaaagaaaatcgaacgccggacagaggaaggagggaaaagaggcagagatgttggaatctttgcttttcttttccagttttcctccctttctttacctgtggtgctgtgcccgctgcttgactcctgctgcatgtttgctgcggcgtagaaacagattactgtagtagctgtacctctttctttttgcagctttggctaatggtgggggatatctttgtttagtccatgtaactacgctggagtatggagtattactatatgattaacctaaatcactactattatagactg

SEQ ID NO: 441 - DNA, 714 bp, Oryza sativa
  ref <308>: DATABASE ACCESSION NUMBER: AK058572
  ref <309>: DATABASE ENTRY DATE: 2001-12-06
ctacatgctgtgcggcgtgctcggctacgcggcgttcggcaaccgcgcgccggggaacttcctcaccggcttcggcttctacgagcccttctggctcgtcgacgtcggcaacgtctgcatcgtcgtccacctcgtcggcgcctaccaggtcttctgccagcccatctaccagtccgccgaggcctgggcgcgctcgcggtggccggacagcgccttcgtcaacggcgagcgcgtgctccggctgccgctcggcgccggcgacttccccgtcagcgcgctccgcctcgtctggcgcacggcctacgtcgtgctcaccgccgtcgccgccatggcgttccccttcttcaacgacttcctcggcctcatcggcgccgtctccttctggccgctcaccgtctacttccccgtccagatgtacatgtctcaggccaaggtccggcgattctcgccgacgtggacgtggatgaacgtgctcagcctcgcctgcctcgtcgtctccctcctcgccgccgccggctccatccagggcctcatcaaatccgtcgcacattacaagccattcagcgtctcctcatgatcaaattaataattatttgttaatactgatgatgatgatgatatgatccatcgatcgatgaagaacaaatatatatatatagcgagatcgatcgatcgatcaagatcgtgaatgatatatataatacatagttaatc

SEQ ID NO: 442 - DNA, 2119 bp, Oryza sativa
  ref <308>: DATABASE ACCESSION NUMBER: AK058573
  ref <309>: DATABASE ENTRY DATE: 2001-12-06
atatgctaccacacaagcactgaattaaatccagtcatccaagttccctaccctcctaccgtgacagaagaaaggaacagcaatggcgaagaagaactacggtcaagtgtacaacatcctcgggtggggcgacccctacttcaccgtgaactcccatggccacctcgccgtcaagccccatggccgcgacaccatgtccggccaggacatcgacgtccactccgtcatccacagagctctcgccaccaccatcaccaccaacgacggcgacaagaagccccagttcccgatgatcctccgcttccccgacgtgctcaagaaccgcctcgactccctccacgccgccttccatggcgccgtcgacagcaccggctacgcgtccaggtaccagggcgtgttccccatcaaggtgaaccagaacaaggccgtcgtccaggacctcgtcaccttcggccatggctacagctacggcctcgaggctggctccaagccggagctgctcatcgccatgagctgcctcgccaaggccaagcccggagcttacctggtctgcaatggctacaaggacgccgactacgtcgcgctcgcgctctccgcgcgcgccatgggcctcaacgccatcatcgtgctggagatggaggaggagctcgacatcgtcgtcgagcagagcgccaggctcggcgtcgagccggtcatcggcgtccgcgccaagcttctcaccaagattccgggacacttcggctccacggccggcaagcacggcaagttcgggatgctcgccgacaagatctacgaggtggccggcaagctgaagaagatggggaagctgcactggctgaagctgctgcactaccatgtcggctccatgatcccgaccaccgacatcgtgtacaacgcggcggccgaggccgcaggaatctactgcgcgctggtgaaggagcacggcgcgacggggatgaccacgctggactgcggcggcgggctcggcgtcgactacgacgggacgcggtcgggcagctccgacatgtcggtggcgtacgggctcgagcagtacgcgtccagcatcgtgcaggcggtgcggctcacgtgcgacgacaatggcgtcccccacccggtgctctgcaccgagagcggccgcgccatggcgtcgcaccactccatgatcatcctcgaggcgctctcggcgatcccggagccgcaggacgaggaggacacccatcaccggctgctcagcaagatccaggacctctcctccaagcagccaagaactgctcataccgtcaatggcggcggcggcgtggacgccatgcactcgcacgccgtggagctgaagaagcacgggatcgagatgtacaagctggcgaagaagctgtccaagagggtgaccggcgacgccaacggcatctacaactaccacatgaacctctccgtcttctccctcgtccccgacttctggggcatcggccagctcttcccgatgatgccggtgagccggctgaacgagaagccgaccatcaacggcacgctggtcgacatcacctgcgacagcgacggcaaggtagagaagttcatccgcgacgccgtgacgctgccgctgcacccactcgacgacgcggcggcggagcacggcggctactacgtggcggcgctgctgtcgggggcgtaccaggaggccctggcgtgcaagcacaacctgttcagtggccccacgctcgtgcgcgtcgagagcgccggcggcggcggcgcgttcaagatcgtctccgttgagctcggcccgacggcggaggaggtcatcggcacgatgaggtacgacgtgaagaacgacattagcgatgtgatcgagaaggttgcgacggagaatggcgtgtggccgatggttgagccgctaatgaagaaagggctgaccaccatgccctacctcaacgattacaagccccccaaaaccaccttttaagcttgtttagaagtagtctttatcgacatataaataagagtgcctcgaccatgatccatgcctccatggacgagcacacggagcacagtctgtatgactgtatatttgcctgcttcatactagtagtttggtgttgtattctcgaataaataacagggaattgct

SEQ ID NO: 443 - DNA, 1344 bp, Oryza sativa
  ref <308>: DATABASE ACCESSION NUMBER: AK058574
  ref <309>: DATABASE ENTRY DATE: 2001-12-06
gtgtggctgccgttttggcagcgaagcgctatccacccagagcggagccttggcatccctacaatggcggcacactcccacgtcatccccttcctctccccggcggcgacgtccgcgcgctgctccccctacggccaccgccgccgcggccgcgcggggctcctgcggtgcgcggcggcggcggggcaggcggggttcttcacccgcctgggacgcctcatccaggagaaggccaagagcgacgtcgagaagctcttctccggcttctccaagacccgcgagagcctctccgtcgtcgacgagctcctcacctactggaacctcgccgacaccgaccgcgtcctcgacgagctcgaggaggctctgctggtgtcggattttggccccaagatttcgttccggatcgtggacactctacgcgaggaaatccgcgatggcaagctcaagtctggggctgagataaaggaagcgctgaaaaggtgtattcttgaactgctgacgagcaaaggcggcaatccggagctgcagctcggtttcagaaagccggcagttatcatgattgtgggagtgaatggaggtggaaagactacctcattaggaaaacttgcttacagattcaagaatgaaggagtgaaggtattgatggcagcaggtgataccttcagagcagcagctcgtgaccagctagaagtttgggcagagagaacaggttcagagattgttatcgataatgataagaaagcaaaacctgcatcagttctctcgcaggcagtgaagcgcgggaagcgtgaaggatttgatcttgttctttgcgacacgtcaggacgacttcatacaaattatggtctgatggaagaattggtttcctgcaagaaagtcatagctaaagcccttccgggtgctcctaatgagatcttgctggttctggatggcacgactggcttgaatatgctacaacaagcgagggagttcaatgatgttgttggagtcacaggattcgtcctaacaaagcttgatggaactgctcgtggtggttgtgtggttagcgttgtagatgaacttggaattccagtaaagtttattggtgttggtgaagggatggaggatcttcagccttttgatgctgaggcatttgttgaagccatttttccttgagctaggacgctttgttttttgagatggagaatttgaagtttcggagagagcatgtttgcttacttgtacatcattctggtttttcactcctgtgacaatttcactatgtgtccatcctttcatgtaatatatatttgctaacatgctaggaaattagaagcaaaattttggaccatcacagttttgttc

SEQ ID NO: 444 - DNA, 1256 bp, Oryza sativa
  ref <308>: DATABASE ACCESSION NUMBER: AK058575
  ref <309>: DATABASE ENTRY DATE: 2001-12-06
aaaaagcgaaaggaggagacggccaaccaaaaccctcctcctctcatcatcgcccaaaaccccccaagaaaccagaaagaaacctctcctgctcctctctctctcttttcaccggcagagggagaggaagtggagagacagagaggaagaagcagagggaagaaaagaaaaggaaggagtttgctgcagctgtgaggagtagaggaggggggaagggtataaaggtttttgattggaatgcagcagcaacacctgatgcagatgaaccagggcatgatggggggatatgcttcccctaccaccgtcaccactgatctcattcagcagtatctggatgagaacaagcagctgatcctggccatccttgacaaccagaacaatgggaaggtggaagagtgcgctcggaaccaagctaagctccagcacaatctcatgtacctcgccgccatcgccgacagccagccgccgcagacggccgccatgtcccagtatccgtcgaacctgatgatgcagtccggggcgaggtacatgccgcagcagtcggcgcagatgatggcgccgcagtcgctgatggcggcgaggtcttcgatgatgtacgcgcagccggcgctgtcgccgctccagcagcagcagcagcagcaggcggcggcggcgcacgggcagctgggcatgggctcggggggcaccaccagcgggttcagcatcctccacggcgaggccagcatgggcggcggcggcggcggcggtggcgccggtaacagcatgatgaacgccggcgtgttctccgacttcggacgcggcggcggcggcggcggcaaggaggggtccacctcgctgtccgtcgacgtccggggcgccaactccggcgcccagagcggcgacggggagtacctcaagggcaccgaggaggaaggcagctaggtggtttaacttagctatagctaagctaggcagctaggtagcccatgaggagggtagcaccgtggtagtagcagtagtagctaggagacggcggcaatggcggtgacggtgacggcgatgtcggtggcggtggtggctaaggtttaggtttggtaggtcgatccatggaacctgtgtggtggtggtggcctgatgcatgttgcatttggtatcatgcagaagtctcacttgttttggaaaacggattggcaggttcgtctaattaagatgtgttattagtaagggaatatatgtgtgtgttgctgcactgcaatggatgggttggttggtttgcg

SEQ ID NO: 445 - DNA, 1895 bp, Oryza sativa
  ref <308>: DATABASE ACCESSION NUMBER: AK058576
  ref <309>: DATABASE ENTRY DATE: 2001-12-06
acgccaccaaaaatggaggccaccagtagtactacactagcgctctcctcgccgcccaccgccgccgcccgccgctcgccggcgaaggcgatcgtcgcctcccaccacctgcgccactcctccgtccccgcccttcacctccgcgcggtccccggcccctccttccgcgccctcccctcacccggcttcccgggatggaggaggaagaggggaagcgggctggttgtgcgggcagagatgtttgggcagctcacgaccgggctggagtccgcgtggaacaagctgcggggaacagatcaactgacgaaggacaacatcgctgaaccaatgcgggatatcagaagagcacttttggaggcagatgtgagtttgccggtagtgagaagttttattgagtccgttactgaaaaagctgtaggcactgatgtgattcgaggtgtcaagcctgagcaacagctggtgaaggttgtgaatgatgaacttgtacagttgatgggtggggaggtatcagatttggtgtttgcaaaaactgccccaacagttatcctattggcgggtctacaaggtgttgggaaaactactgtttgtgcaaagcttgcctattatctaaagaaaatggggaagagttgcatgctgattgctgcggatgtctacaggcctgctgccattgatcaactcactattctggggaaacaggttggggttccagtttactctgaaggaactgaagctaaaccttcacaaattgccaagaatggcataaaggaggcaaaaagcaagaaaactgacgtaatcatagtggatactgctggaaggctgcaggtagataaagccatgatgagtgagttgaaagaggtaaaaagggcagtaaatcctacagaagttctacttgtggtggatgccatgactggacaagaagctgcatcattggttagcaccttcaatgttgagattggtattactggtgctatactgacaaaactggatggtgattccagaggtggagcagcactaagtatcaaagaggtatctggaaagcccatcaagtttgtagggcgaggagaacgcatggaagatcttgagcctttctatcctgatcgtatggcacaacgaatcttgggaatgggagatgtactttcatttgttgaaaaggcacaggaagtgatgcgtcaagaagatgctgaggaattacagaagaagatcctgagtgcaaaatttaacttcaatgacttcttgaagcaaacacaagctatcgcacaaatgggttcatttagtcgtataattggcatgattccaggcatgaacaaggttacccctgctcaaattcgtgaagcggagaaaaaccttaaatttatggagtccatgatcaacgtaatgacccctgaggaaagggaaagaccagagctacttgctgaatcacgcgagaggaggataagagtggccaaggaatccggaaaaaacgaacgacaggtgagccaattggttgcgcagctcttccgaatgcgtgctcaaatgcagaaaatgatgggtgctatgcaagggcaagacacccctgatatggaaggcctcatggattccatcaaggcagaagagcaggctgccgctggtactggaaagcgaaggagaaagtatggcaatctgaggcggcgagacctggatgcaatgcgcggtttccgtcgacgatgaatgttcattggctctttctgaaccaaagtgttttgatgccagttacatgtataggaagcgagaatttggatgcttttggggagctactggtttgctgtgatcaccatgtagtttctgttgtaatttttttctttttttgaaaagacgtactagtatatcggtatatgttgtatttttggccatcaatttagctcataagttgtgttcct

SEQ ID NO: 446 - DNA, 979 bp, Oryza sativa
  ref <308>: DATABASE ACCESSION NUMBER: AK058577
  ref <309>: DATABASE ENTRY DATE: 2001-12-06
gctggaagattgttccctggtgatcaaatcaaatctatctgtctatctctacatatgagtgagggaggtttatggaataataagaggcgcctctgatcgatggaggggccggcaggtgtggtcgctcgactggccctagctaagtgttttgcgaaagaagaaaaaaaaagctgtgtgggaaatggaggaggtaggcgtacaaggttacgctctcccgcccactctcgcttttataatttatcattttcaaatggtgatgatatgatgattaatcaaaaggattatattgctacttaaaaaaaaaaaaaaaaaaaaaaaaaaaaaaagacgttgtgtggggagagactgctggtgttgaaggtcaattgttgctactatgccctgtcctctttctgttgcagggttttgagggttacgttggatttttacttcttcgtactgctcatacaggcatcgtccctgagtggcaggttgtggtctgtggagtcctactgatcgcaatggcgataggtaattttgcaaatacagtggacacgctgatggccaagtccaggttcaaagcaaagaagagatccaggggcaaacgggatcctgacacatgcaactcaccgactggcctatcaccaacaaactcaactgccagagcttgatatggatccggggaaaaaaattctccattctatgaacatttcccatgttcaagcagggcttgttactaccattgtaaagcattagtttcttggccaccagctcctagtcctgactgtctctgtcaaagatcatactcatgtaatcagctgatgattaggttgctgatggtctcaggttgaggtaatcaagaataaactgctcatgttttgtgtattttttttcttttgttctgaacatcagccatcaggtggactagatgaacttaggactgtaacatgtagcaaaattttcccagtatagttattgtgagatttgcaatgtcagaacc

SEQ ID NO: 447 - DNA, 1249 bp, Oryza sativa
  ref <308>: DATABASE ACCESSION NUMBER: AK058578
  ref <309>: DATABASE ENTRY DATE: 2001-12-06
actccattccttccaaaagaaaactcgaaacctccccctctccggccgccggcgagcggctcatccatccaccccaccttggccggagacggcggcaatggctcaccgccggatcgcgctcgccgtcctcgtgacgctgctcttgtcggcgttccgcccttgcctggcgcaacagagcaacgacgacacgagcaaacaccaccggagcgccacggccggcgggttcacgccgaccaccgtcgtcgtgctcgtggctctcatcaccgccttcgtcctcctcaccgtgttctccgtcctcatcaaccgctgcgcccaggcgcgcgctcccccgcgccgggcgttccgcagcacggcgtcccatcagcccgtcggcggcgccgccgccgcgtcccgcgcctcgcgtggcctcgacaaggaggtcgtggaggcgttccccacggcggtctacggcgacgtgaaggcgcgcatggcggcgaagtcggggccgctcgagtgcgccgtgtgcctcgccgagttcgcggacagcgacgagctacgggtgctcccggcgtgctgtcacgtgttccacccggactgcatcgacccctggctcgccgccgccgtcacgtgcccgctctgccgcgccaacctcacggcgccaccggtgtcgctcgccgccgccgagagctccgacctgacggcgccggaggaggcggtgcaggaggaagagtcggaggagctcgacgaggcgtccctgatggccaccttcacgccggaatccgtcatcgacttcggcgcgacgcacgaccatgaattcgacagagcagggtaccctcactaccggaggacgcagtcggccatggacgccgcgccggaccggcacacgctgaggctaccggagcacgtcatgaaggagctcgccgccgaccgcaggcaccggcgcgccgcgagcctcgccgggtacccggacagcgtggagaggacgccgaggtggctgacgtcgctctggcgatcggtgtcgtggcagaggcagagccgggcggactgggacgccggagaggagcacggcggcagcaaaagggttcacccggtcgccggagctcaggacgagacacccagcgggtccggctccgatgggagcaaggagaactccgattctgacgcgttaaaccgagtttgaattttgttttctcctcttctttttttttcttgtgcttcgttctaattgtgcagcggtgtagtaatacaaattaacgataaactaccttgc

SEQ ID NO: 448 - DNA, 195 bp, Oryza sativa
  ref <308>: DATABASE ACCESSION NUMBER: AK058579
  ref <309>: DATABASE ENTRY DATE: 2001-12-06
gagatttttttttggttatgttgatttagaggttgatgatgtgcttccaagatgttagtttgtagcttctactattgtacaccaatatggcgaaaaggaaaattgatgcggttgatgagagactgaaagtctgaaattgtacacgaggggaagatttttccccaaagatgcaatatgcacagatcctcttgttag

SEQ ID NO: 449 - DNA, 1908 bp, Oryza sativa
  ref <308>: DATABASE ACCESSION NUMBER: AK058580
  ref <309>: DATABASE ENTRY DATE: 2001-12-06
gagagtgaagaagaggctcccatggtaaaaatgaataaggcagaggatgtcttcaatgttaagaggaagatcggaggggaggtttcaggttatacgcactgtgagctggatctttcttttctgctaggattaagttgtggtattatcccttttgcgaaccacaattttgctcggagggttctttaccaatctgaaaaacattcacagcaagctattggatactctacaacaaatccgcacatcagagttgataccctttcccatcaactttactatcctcagagaccccttttcaaaacagtgatagctgactgcattggtagatcagaatatacttttgggagaaaggatgactttgccagaccagagtatttcaatggccaaaatgcaatagtggcagtgaatgttcatcaggggtttaatcaagaagattccctggttatgaatagggcttctcttgagcggggtatgtttaggactgagcacttcaggaactataaggctgaagtagagaacaaaggtgggccaggtggcaacaaacgactaaaaatgaaggataagattgacttcggtaaaatgcaaagcaagagaggacgtgttgacaatcttgacgatgatggattaccatatgtcggtgcaagtcttcagagtggtgacattgtcattggaaaggtctcagaatctggtgaagatcatagtattaagctgaagcatactgaaaagggtatggtgcagagggtattactttcagctaatgatgaggggaagaactttgcagttgttactctaagacaggttcgatcaccttgccttggagataaattttccagcatgcatggccagaaaggtgtcgttggttttctagaatctcaggagaatttcccatttacttaccaaggaatagtaccagatattgtgataaatccacatgcatttcctacccgtcaaactccaggccagcttcttgaagctgctttggggaaaggaattgccctcggtggtacaatgagatatgctacaccattcacaacagcatcgtttgatgtgatcacagaccaattacacaaggctggattttcaagatggggagctgaaagtgttctcaatggccggactggtgaaaggatgcactcattgattttcatgggtcctactttttaccagaggctgatacacatggcagaagataaggtcaagttcaggaacacggggccagtgcaccccctaacacggcaacctgttgctgacaggaagaggtttgggggagtgaagtttggagaaatggagcgtgactgcctcctcgcccatggtgcagcagccaacctccatgagcggctcttcatgcttagtgacttctcgcagatgcacgtctgccagacgtgcgaacgtgtggcgaatgttatcatgaggcctgtcccaggaggaaagaagatccgggggccatactgtgggttctgccgctcttctgaaaacatagtaaggatcaatgtgccctacggcgcaaagctgctctatcaagagctattcagcatggggatctgccttagatttgagacggaagtctgctagaactccacatctactatcgactcaccatgtatatatatcctcgttgtcccttggagattctgttatgggcattagtgttgtagccacatgacttctcttccggttggacgatggcatagctaggaggggtgaatctgaagtcaggtgaaacctttcttttgctatttatttgggtgaagactcaattcccatcacctgcctttgatgtcctgtgaccaaccgatggcatagttagggatggggtgaatcagaggtcaactgaaaacccttttgctatagttcgatgtttcaccttggcactgtactatgcatatttggatgaaaactcatttcccatct

SEQ ID NO: 450 - DNA, 1479 bp, Oryza sativa
  ref <308>: DATABASE ACCESSION NUMBER: AK058581
  ref <309>: DATABASE ENTRY DATE: 2001-12-06
tgatgcagaagcatgaaaccagtggggaaaacattgacacaattcttgaggagataactcgtgcattggatcagagtgctaataatcagaaaggagatgatttgaatggatcatatgactggagcataatgaaggaaatggtgttcagcctgactgaaaagatcacctctgttattggcatatctgaagaaggcaatgttgcaagttctcaaaaattgctgcttgacaggtctgaattttgtgctcgccttgagcatttggtccatgtctgtcatgatctactgcatggtaaaactgaccttgaaaagtttgtgcatgaggtttgtttggttctagagtatataatcaaccagtacaagaatatatcattccaagaacaaccagacactgtgaataataatacagagaatttggatggagaggaatcatttggtaacatgaatggtggatgtgacataaaaagtccgaaatcatcatctgctccagacatacaaactgaagcactggaagaatcaattcagtcggtagaaggccgaaaaacagatcatattttggttaaccaagaagagagtcaacttgatgaagaactcacaagagttatactagaccaggacgagaaaatcagtcaggagaactcagcatcctgtgagatagaaagcccccatgatcatccaagtgctgaaaccctggcagagaaagaggaaaagcatttagcatcaagttcagagatatcagcagcggctgagaagcttgcagagtgtcaggaaaccatcacaaatctaagcaggcagctgcgagctctcaagagtccggcggtttcaggcaatctagacagcccaatgtccaactccagaccaagctcatctgactacaagccccagtcacttgcatgcattcttgctgaaggggaggactccagcactgaggatgccatttctcctgcaaccaaagaggtgcactccaagaaagagcctgatgctgcatcacggaaaagcgtagcacaagatggtagtgttaatgctgccctcaaagctgtcgaagaggaattaacacaaaccgttgttcatccgatcttcccagagccatcccaagagattatttctgctgatctcaagaagaagagacggagccccagcttgctgggcaggataatgttcagaaagaaagtggaaggcagctaggtcatgctgctgatctggtggatgcactgtgctggtaaaagcttgcaaaatctagtagcgctccaccactatgctgtcactggagatttcgactttgaacgaacgagcttgttctgtttgttgagcattcctgttccttagggtgcaacctttttggacacgtattctgtcacagagactgatgacttgtggtaagagactctgagcacatgatctgtatcggttttccttgacatggacaaattttctttttgtatttatggcctccatggttgtgtaaatgttaatttaataagtt

SEQ ID NO: 451 - DNA, 885 bp, Oryza sativa
  ref <308>: DATABASE ACCESSION NUMBER: AK103983
  ref <309>: DATABASE ENTRY DATE: 2002-08-28
agctggtggtgggtgaggcgagggagcctcgcgccggctttggatttttcgttctgcctcgcgaccgacgataaaaatcgtgcgtccgatgaggcccttctcccctcatctccggcaagccgcggcggcggcggctgctgcggccactggcgctcctcccctcgccgcagctctcctcaagaattcttctgctccccttatccatggccggctcagcttcagccacacgtcgctgcagtcaccgaacaaccgcgggaaacgaacaggctgggcggtgcgtgtgctgccgctgacggaggagaacgtggagatggtgctggaccaggtgcggccgagcctgatggcggacggcggcaacgtggcgctgcacgagatcgacggcctcgtcgtcgtgctcaagctgcagggcgcctgcggctcgtgccccagctccaccatgacgctcaagatgggcatcgagacgcgcctccgcgacaagatccccgagatcctcgccgtcgagcagatcgtcgacaccgagaccggcctcgagctcaaccacgacaacgtcgacaaggtgctggatgagatcagaccatacctttccggcaccggaggtggaagccttgatcttgttcagattgatgaatccgtcgtcaaagttcggttaactggacctgcagcgggtgtaatgacagtacgtgtagctgtaacacaaaaactgagggaaaagataccatccatcctggctgttcagttgacagagtagaaacatgagttcagttatgcagcaactcaagagaaaacaaaactttgatttcagtgattttgtggtattcagtctcagtcttgtggttttgaatcaaaactgaagtactgaacgtctgaacctatcataccatcttt

SEQ ID NO: 452 - DNA, 1412 bp, Oryza sativa
  ref <308>: DATABASE ACCESSION NUMBER: AK058582
  ref <309>: DATABASE ENTRY DATE: 2001-12-06
acttctcacatcgccagcccattcggacccctctgcagaacacgattgctctgtactgggcactctctgatcgccagcttgtgactgttcgggacctcttccggttcataatgcacctgcttcatcaagcacgcaagaagaacgagacatcaaaacccacaactgatgaacacaaagaagttgcatctaatgtgctctgcaagtggacaaaggaagatattgatcgggcagaaactgcaatgctcaaggtcctacgggttgttcagcctggacagtgggtatcatggcgtgcacttcggggagctgcatcgaaggctgttgattcacaggagctacttgactattctcttcgaggactgggtggaaaactgatggacgatggccatttcatagctgtccgctgcaatgctgagacgagtgcaattgaatacaggctggaagataactccaaccagtcagttgatgcggctgcgtttgggccttctgttgatcatcttctgcacgatctgaagttcctctataacgctttgctgaacccagaaaccatgttggcttcacagccagaggttataggtgcatcatcacacagtgcagcagcaaagattctcgactgcaagcagttcatcaaacattacgatcagcacaccccacgggctcctttgaacccattcctactttctgtgaggtgttccattgaacttcttgatcacccaaaagactacactgcaccaccggtggaactagtgcttttaccagcaagtgctacccttgctgaactgaaaatacaggctacaagggcctttcaagaaacatacctcatgttccaaagctaccaggttgaacagctccctgacttcccaaattttagtgacacaaccctcgtgaagcatgtgcttggctcaagccagctcgtgagggtaagaggaaggtgcactggggataaccgaagaattgtgcaattcaggatggaaagggggttggagaactggacggtcgactgcacctgtggagccaaggacgatgatggcgagaggatgcttgcatgtgatgtttgtggagtttggcaacacaccaggtgttcagggattagtgattttgatgatgtccctgagaagttcatctgcaggaagtgtgctagtccacgcagaggaaagggtcgtggtggtggaggtggcaatggtggtagcagaatggatgtgagcgctgcagggaggtgcaaggatgagataggatcatctgttggcggtgcaggcaaatttgggcgcatggtaactgttggatgactgtacataatgtgtgaaatgtaaatactgaggggagagtggggagtagcacctgaggcctgtgtgaaccttcatggaatcttgtctttctgaccagtgatatgatgttaatctatcctccttggaagc

SEQ ID NO: 453 - DNA, 750 bp, Oryza sativa
  ref <308>: DATABASE ACCESSION NUMBER: AK058583
  ref <309>: DATABASE ENTRY DATE: 2001-12-06
acacagcaaatcactccactcctccactcatacaccaccacactgcacacacacccaacaaagatgaagcttaccatgaagctttccatcgccctggcctgcttcctcttcttcctcgcggcggcgaccaccgcctccgcgcagtgcacgttcgagatcctcgtcaagaccgacggccggaggaacgccggcaccgacgcccgcgtctcgctgcaggtgcgcgccgccagcgggccgacgctgacgatcaccaacctggagtcgtggggccagatggccgccggccacgactacttcgagaaggggaacctcgaccggttcaggggcgccggcgcctgcatgccgtcggagccctgcaacatggtgctcacctccgacgggtccggcaacaagcccgggtggtacgtgagctacgtgatggtgacgcagctcgggcaggggagcctcccgtcgatgacgcaccggtgggcggtggatcagtggctggccattgacgaggcaccgcacatgctcaccgccgagcggaggggctgcggcattggcgcagcggcgccatgatcatcgaggtagctgcctatagctccatcgaccagtgttgtctctgcgtgcatcagcatgctagtaacttaaattaataataagttccaggtctaagccctgtactatgtgtggggcacagtgtctgctttgccaatgtaacgtgatcataataagtcaattcaattcagagagtgaattgcagtttgtgcc

SEQ ID NO: 454 - DNA, 1211 bp, Oryza sativa
  ref <308>: DATABASE ACCESSION NUMBER: AK058584
  ref <309>: DATABASE ENTRY DATE: 2001-12-06
atgtggtcagcttgcacctccttccttcctcacatctgaactaatggccgcctgggaggttctcgttttattgatgcagcgccatgtcggttcttggtggatgccgaatccttcaagatactccttccccgttccatgttcaccgaggacaaggtcaccttgctcaagccctttttcctcattttgataacgcttgttggtgctgtgtagttgcttgtgtgcaagttctagacaaacaacaccatgagcgattccattcgcccggcatcacctccagcttcgatatgttctgctccctttctccagttcctctttcttttctacacttctttcacgcccatggttttcgcagtgatcaaaaccatggttgcatgatcaggtctattgatagtgttgttttcacgatgcaatcagcacccccttctttgctcccatctgaattttcttttgattcgtgaattcactttattatgttcaggaagctgggaaaaggaacaggaggatatattgcatacagttaagtgatcgaggtcctaatggatgccagtggtgatggcgccacaggaatgctgtcttgttcgccgtccttaatctggcctgaaatgcatgaactgaactgtaggtgggcggtctgattcagatgcttttccagtggcgatgcactctagttagttaaaggaactaacagcaattatgtaattagcctgtgcaaggggctgggctcatatcagtagatttttttccattgtctttttatttgtgattgtctttttctaatatttttactgtacgatggtgaaatgcgcaaaataccctgttgtgccctgtgtcacgactcacgcctctctgcagcaccttcccgccgacatggtcgcagcaaggaagcggatacacttgagcacaaggtgcgggacagatacgatctacaatacctgacggtgacgagaggtacgcacccacttgatttctgcgtcctcagcggaataaaagatggaccgagaattttcgttcagagaaattatattcagagccctgagtgtcatgttctctcgatttgcatgtgcagcccttttcatatttttttagtttgatcggctggacaatttgatacttacagttgtgtcaaaagctctgaaacgttacgaaaattatggtgcttatagacatcatgctctaaatgtcaattagaaatatgccatttgcaattttgc

SEQ ID NO: 455 - DNA, 919 bp, Oryza sativa
  ref <308>: DATABASE ACCESSION NUMBER: AK058585
  ref <309>: DATABASE ENTRY DATE: 2001-12-06
ctcttctaccattcttgctttctccttgtagtctcttctgttctttcagagaagagaaaaacatatctgtgctagctttgccttcttccatggcagtggctatagaggctccgttccatgtcctggctgtggatgatagccttcctgacaggaagctcatcgagaggctactcaagacctcttctttccaagttaccactgttgattccgggagcaaggctctggagttcttggggctccatgatcatgaggacagcccaatttctactcaatcagatcagcaggaggttgcagtgaacctgatcatcacagactactgcatgcctggcatgacaggatatgatcttctcaagaagatcaaggaatcgtcttatttaagggacatcccagttgtgatcatgtcatcggataacattccttcaaggatcaatagatgcctggaggaaggagctgatgaatttttcctcaaaccagttcggctctccgacatgagcaagctgaagccccacatactgaaaagcagatgcaaggagcactaccagcaggaacaaaacctgcaaagcaacagcgaaagcaacaacagcagtaaccccacaagcgagaacagcagcagcagcactagcagcaacagccacaagagaaaggcagtcgatgaagaaattttgccccacacaataagaccaaggcatagttgatttagcatctgactggtcatttgacactgattttttttcttgcttctgtctgatcggtttttgacatacagattcgtaaaagggatactaacatctagtttacaaaatagaatggaatccgttaacggatactgcttgaattcgaatgggtgattctcagttcatcacattgtgattttaagccagttaagccttcaaattcctgctgagattaagggccactg

SEQ ID NO: 456 - DNA, 334 bp, Oryza sativa
  ref <308>: DATABASE ACCESSION NUMBER: AK058586
  ref <309>: DATABASE ENTRY DATE: 2001-12-06
atcaactcttcagctgctaaaggtgccacctgtgatatccttgaattccaaacctctagtgataagaagagtgccaacacagtccagtttgctaacaacaaagcaaggtacaagatcatcactcaatctgatatgcatcaaggaaaggaaaaatgcctttgctacacctctctcgtgaatgtacagattgatgtttgtaaatgttgttcgagagtatggtgcagcactggttttttgtgcttctacctgatgcttctacaatgacatcttatcatggcaagagttgtgcattgttttctgagcacttgcgaaatgaaaagtgagcatttgtgcc

SEQ ID NO: 457 - DNA, 1565 bp, Oryza sativa
  ref <308>: DATABASE ACCESSION NUMBER: AK058587
  ref <309>: DATABASE ENTRY DATE: 2001-12-06
tttccttgtagcattagtgttctgcttgatgaagagtgggggacggcgaccgagaggaagagggttggagcagaatgaggaagggattcgttcggggcgcaggagtagcagcgttaatcctgtgatgctgtcatccatggcagcatcaccggcagcaaatggtgctgtgaaaggtctgcctaccattgtagatgagttcacctatgagcagttgcataatgttactgggggttttggggatgacaatcttgtcaagcatgggcactctggggccatttaccttggtgaactggagagtggcttcaatgttgttgtcaaaaaggttgatctgaagagcagtaataagaacttgggggaattgggcttccttgcaaagaattcccatgggaggattgttccattgctggggcatttggccacagatgaggaggaattgctggtctacaagtacatggcaaagggagacttgacttccgcattgcacaggaagtcagtggatgctgaggaggggctgcgctcgttggattggataacaaggctgaagattgccattggtgttgctgaggcattgtgcttcctgcacgatgagtgtagtccaccattggttcacagagatatccaggcaagcagtgtgcttcttgatgacaaatttgaagtgtgtcttggaagtttgagtgatgtatgcactcaacaaagtgagggaagcaggagtttcttctccaggatgttgagatcatcgaagtctcttgacaagaacgcatcaggtccaccagctagctgctcgtatgatgtatactgctttggaaaggtgctactggagctaatcaccgggaattttggtgtgagcggctcaaatgacactggttcagaggagtggttggcaagaacactggattttattgacgcccatgacaaggagggtctttcaaacattgtagacccttcacttgtagtagatgaagaccacctagaagaggtatgggcagtctccattgttgcgaagacatgcctgaacccaaagccctccaggcgtccactggctcggtacatcctgaaagcattggagaacccgctgcgggtggtgagggaggaattacagtcgaattcatcactcacgagtacttcatctcgaagctcttggcattttgcttttcatggggactcgcgcaggagctcggagctcaggccaacattggggcagtcagccaggaagcagtcagtgaagtcacaaggaagtgacgaggatgaggacgaggaggaggattcattctccttcaagagggcttcaagggagattctccctgacccggtagagttggaaaaggatgcagttgtgtagaattcaccacagattagcaatacatgctactgagatttcatctcagtgtgtataattcatcctctgatgcgcatctcctgatgcctctaggtgaaaaaactgtgcatataggagttagacttgtttctctttttccttttcatttcagtgttgtgtaatctgtaactgagattttgagaataagtggagcacaagggtgcgcggtgcttgaaatgcaagcggccag

SEQ ID NO: 458 - DNA, 1517 bp, Oryza sativa
  ref <308>: DATABASE ACCESSION NUMBER: AK058588
  ref <309>: DATABASE ENTRY DATE: 2001-12-06
aaatccagatgaatttgctgaaggaattactttagccaagtatgaaaagacctgtttttttccccgtgtaactctcctaaattagatagaagtggatgcaatgggctgattgttcatacaaatttaaatggatttgcttttcctgaaagtatctgaatttgtatgagctgtcaggcataacaattcaattgcaatttcaagctattcaggattcttagatacagatacttcaattatatcacaacttgggtttttttcttctgatatcttcaattctgcatcttcttttttttgggggttttggtgcagttatatactttccttagtgcttactaggtgtctcttttgaatgcaatgtgagttgtgattatagtacctttgtgttgcaactagactctttcttcatgtttaatttagtgattaacccacttggcaatgttggttatagtaaaaacttgatttccatcattaactgtctactgtcttcgctgacaggatgttgcttcaaaaattatggccttctcacagcaaggccctcgcacagtttgcattctctcagcgaatggtgcaataagcaatgtaacacttcggcagccagctacatctggtggacttgtgacttatgagggccgatttgagatcatctctctatcaggttctttcctgcttgcagaggatggcgacactcgcagcaggactggtggcctgagtgtcgcacttgcaggatctgatggccgagttcttggtggatgtgtagctggaatgctgatggccgcaacccctgtccaggttgtcgtggctagcttcatcgcggaaggtaagaaatcgaagccagtcgagacaaggaaggtcgaaccgatgtcagcgcctccacagatggcaacctacgtgccagctccggtggcgagcccgccatcggagggcacatccagtggatcgtccgatgactcgggcagcccgatcaaccacagcgggatgccgtacaaccactccgggcagcagcagcaacaccagcagcaccagcacatgccccctgcttacgcatccggtggctggtcgctctcagctcatcatcagaacaggcacgactctgacatgaagatgatgtcgaactaacactctgctcggcctcgaggcgccccatttgtttggttgggctgaagaaggagctgatgatggatggtggatcgtgttcgtacccccctctgctagctaagagatttaggaccatggtgatgaatgatctcagagagatgtgttgttgctgttgtttttccttggagtaagattaatttaggcgctgttgtaacgctgtagctgtcataattaagccgcctctaacgcaagagtttattatgtgttgtactaccggtggatatgccttctgcttgtctgtcttgctgagatcttcacctccttagtaggctagtagtagtctacatacagacttgtatgaatttacctgaatgctttgatttcaattcgagaacttttactaggttgtttcaaaaaaaaac

SEQ ID NO: 459 - DNA, 1690 bp, Oryza sativa
  ref <308>: DATABASE ACCESSION NUMBER: AK058589
  ref <309>: DATABASE ENTRY DATE: 2001-12-06
accacctaccacactcactgatgagtgatgactgatctatcaaccaaaccaactcccaactcctccctccctccgccgcgccacgcccacccacgcatccatccatcgatcgcagccaaattctactcgagctgagcgctccgagctctctcgatcgatcatggcgtcctccccgcgccattccacccaccaccccaccttgctcctccgccgccactaccccaacttctgcgccctcgcccccctccgcccgaccaggcaactccccagccttccccagcagcagctgcagcagaagcagcacgttggccatgatccgtcgccgtcggagcccaccaccgcggccgcctcgccggcgacggcggcggcggcgggggcgctgcgtgtggggatcgtcgggttcggcaacttcgggcagttcatcgcgggggggatccagcggcaggggcacgcggtgctggccacctccagatccgactactcgggctactgcgcccgccacgggatccgcttcttcgccaccgccgacgagctctgcgaggccgggcccgacgtcctgctcgtctgcagctccatcctctccaccgaggccgtcgtccgcgccatccccttccgcaagctccgccccggaaccctcgtcgccgacgtgctctccgtcaagcagttcccccgcaacctcctcctcgagatcctccctccggggttcgggattgtatgtacgcaccccatgtttgggccggagagtggaaagcatggctggagtgggctaccttttgtctatgacaaggtccgtgttgccaaggaaggggatcaggcggccaagtgcgaacagttcttgagcatctttgagcgggagggatgtaggatggtggagatgttgtgcgaagagcatgatcgctatgccgcgggaagtcagttcatcactcacactattgggaggattttgtcacagctaaaccttgagtccacaccaatcaacaccaagggttatgagacccttctgcaacttactaagaacacgataagtgatagtttcgatctgtactatgggcttttcatgtacaatgtgaatgccacagaacagatagacaacctggacagggcatttgagaaggtgaagcagatgctctatggtaggctgcataatgtactaagaaagcagatagaagagagggtcccaatcccgtagccccttcagtaaatatcaaatgaagcccagtccagtgctgctggggcctgggagcctgggacccctctcttctctcctgtaaggttgtatccacacagaagaagttgcacatatcccatatctctgctacacccacccctacacttgacaaaacagagaattaggctaataccatggcaaataggtgacaattggaaaaaccatcacatatgtgaataacatgtgggtcctaggttaaaatatcaatgtcataggcaataattttttcaaaccctgttgtgatattttcattggtaccaagatactaattctagatgtctttctcagtgttgtgataggagctgtatgcattcaatgtttctcttaggtgttagctaaatatgcaaggaataagatgtaaccatgtcctctgtttttgttctttcatgagttgtaacgaaattcttttgttcttttacactgagcatgaaacaagttatgatataagagaatgcttgtttg

SEQ ID NO: 460 - DNA, 1017 bp, Oryza sativa
  ref <308>: DATABASE ACCESSION NUMBER: AK103984
  ref <309>: DATABASE ENTRY DATE: 2002-08-28
agacaggacaggcggacgcgagcgtcgtcctcttcgtttcgcttctcctcctcctcctccgcctccgctctcgcgagatctcctgatcgactcgctccgccatggctggagaagctgatggaaaagccccactgggatcaagatacccccctgctgctctcaacgagcgcatcctttcttccatgtctcaaaaacatgttgctgctcatccatggcacgatctggagataggtccaggagctccagcagttttcaactgtgtggttgaaattcctagaggcagcaaggttaagtatgagttggataaggcaactggtctaattaaggttgatcgtgttctttactcatctgttgtttacccacacaactatggtttcattccacgcacactttgtgaggacggtgaccccatggacgtcctcgtcctgatgcaggaacaagttgtccctggatgtttcctgcgagctcgtgctattgggctcatgcctatgattgatcagggtgagaaagatgacaagatcatagctgtttgtgctgatgaccctgaataccgccacttcagggacatcaaggaaatcccccctcaccgccttcaagagatccgccgcttctttgaagactacaagaagaatgagaacaaagaagttgctgtcaatgagtttctcccagcagaagatgccatcaacgcaatcaagtactcaatggacctctacggcgcctacatcattgagagcttgaggaagtgatctccagctgatcaactgcagaggctacatgattcactgaacagtttctcatcaatagtacgacatatgttaacatacatggtctaaaaccagtacttcggggatatataccttctactattcatgttaagacaagaagcagcaccttttctttccatgtatgccatgtcagatactcgggtcccaagcacctgacccctttgctgaactctctgctgcccaaaccgacagtttgctgaacggttacctaatagaaatcaaccatttacat

SEQ ID NO: 461 - DNA, 686 bp, Oryza sativa
  ref <308>: DATABASE ACCESSION NUMBER: AK058590
  ref <309>: DATABASE ENTRY DATE: 2001-12-06
actcgagtagagtagcgacagctcgcgaggcagagacaggataggattatctctcccacactcgctccccccagccatggccatggccgcggccgcctccctcctgccggcgagcgccgccccaaccctccccggacgcgccttccgcccgccccgcaactccaccccgacggcctccctctcctgcgatggcggctcccgctgccgcggcgtcggcctcggcgtcatcctcggtgggtgtcgcgcgcaaggcgttcgacggaatgccgcagccgagacctacgtcccaggctccggcaagtacatcgccccggactacctcgtgaagaaggtgacggccaaggaactggaggagctggtgaggggggagaggaaggtgcccctcatcgtggatttctacgcgacgtggtgcggaccctgcgtcctcatggcccaggacatcgagatgcttgcagttgaatatgaaaacaatgccctgtttgtgaaggtggatactgatgatgaatatgaacttgcaagagatatgcaggtaagaggacttccaacactgtatttcttcagtccagatcaaagcaaagacgccctaaggactgagggactgattcctattgatatgatcagaaatatcattgataatgaattgtgatcgctaggatatagggacatagttgagattttgatgtttg

SEQ ID NO: 462 - DNA, 2490 bp, Oryza sativa
  ref <308>: DATABASE ACCESSION NUMBER: AK058591
  ref <309>: DATABASE ENTRY DATE: 2001-12-06
tgaagatctcaatttagctttgtcgaagaggcacatgaaagttaataatgaaaatattgtacagaaactcaccctttcacaggcaatcgacacaagagatgcgttggccaagtcactctatgccagtttgtttgagtggcttgttgaacaaattaacaagtctctttcagttggcaagcgtcgaactgggagatcaatcagcattcttgatatctatggctttgaatcattcgataggaacagttttgaacagttctgtattaactatgctaatgaaaggctccaacaacatttcaatcgccatttgtttaagcttgaacaagaggaatacgttgaagatggcattgactgggcaaaggttgagtttgaggacaatcagaactgtttgaatctctttgagaaaaagccactggggttgttgtctctgctagatgaagaatctaccttccccaatgccacagatcttacttttgcgaacaagcttaagcaacatctgaacaataattcttgcttccgaggagaaagaggcaaggcttttgcagtccgtcaccatgcaggagaggtggcttatgacacgtcaggttttctagagaagaatagagatttattgcacatggactcaattcagttccttgccaaatgcaaatcctcactaccacaaatgtttgcatccaaaatgctttctcaatctgataatccgttacctgttccatatagaaatagtgctgctgactcacagaagttaagtgttgcgatgaagtttaagggacaattgttccaacttatgcaaagactcgaaagtacaacaccacactttatacgttgtattaagccaaacaatttgcaactccctgcaatttatgaacaaggacttgtgcttcaacaactcaaatgttgtggggttcttgaggttgtccgaatttcaagatctggatatccaacaagaatgactcatcagaaatttgctcgacggtatggctttcttcttcttgaggatgtcgcatctcaagacccacttagtgtttcggttgcaattcttcaccagtttaacattttgcctgagatgtatcaagttgggtacacaaaattgttctttcgaactggccagattggcaaacttgaagacactcggaaccgtactctgcatggtattttaagggttcaaagctgtttcagagggcatcaagcccgtcgccatgcaagggaacgaataagaggagttttgactcttcaatcatttattcgaggtgagaatgcaagaaaaatgtattcgtctctggcaaggaaacacagggcagccattattttacagagaaatctaaaatgctggcttgcaagaagatatttcgttaacatacggaaggcttcagtagtaatacaatctggcattcgtggttgtcttgttcgaagatgtgctggcaatgttgatctattgaatgtgctaagagaattcgaatcaaagaaggaggcagagggtgaccaaattttgattaaggcatcattcctggctgagctacaaaggcgaatattaaaggccgaggcgacagtccgagaaaaggatgaagagaacgaaatgcttcagcagcgacttcagcaatatgaaaaccgatggtcagaatacgagcagaaaatgaaagcgatggaggaaatgtggcagaagcaaatgcggtcattacaatcaagcctatccgtagcaaagaagagccttgctcttgatgagacgcctaggatgtccgactcatcggtcgaccagagctgggagagcaatggggttcacattggcagcgcgtcgcagctggttccacgcaccgttggacgggagatgaatgccagcatcagcgtcatcagccgcttggccgaagagttcgagcagcgcagccaggtcttcgctgatgatgccaagttcttggttgaggtcaagtccggacaggccgatgccagcctgaaccctgacatggagctccgcaggctgaagcagaacttcgactcatggaagaaggacttcggctcgcgcataagggagacgaaggtgatcctcaacaagctggggagcggcaacgaatcgtcgcccaactcggtgaagcgaaaatggtgggggaggctgaacacatccaagttttcatgagctaccatgtaatggtgtagaagatgcggcgctggtattttacaaagccggcgaggttggttgctagtgctagagtttcttctcaactgagtattggtgaaagcccagcgttttgggctggatttgtgatttgtggagggcgagtttgtatagttcttccactgaggccttctttgcaggggccaaaagaaccactgagttgtgatgtaattacttgttaagatagctgctaaacgggaggagattggagattgttcagtgccgtttccttctcttgtccgatctcagcttgtaggtctgtagttttgtagtttgtatcaggtattatcatcactgaataatgggaaaatgtatctgcctgtgcc

SEQ ID NO: 463 - DNA, 1048 bp, Oryza sativa
  ref <308>: DATABASE ACCESSION NUMBER: AK058592
  ref <309>: DATABASE ENTRY DATE: 2001-12-06
agcgcggagacgcaagatatagcagcagctagcaagaattgcctcgagttgggtggttaattcttggttttggttcacgtagaagcagatagcttggttggttggttagacggccatggcgaagccgcaggacatgcgcagcgtcgactcgttctcgcagctgccgttcatccggccggcgccgccgccgcagcagcaggcgcgggacacaatccggctgttcggctgcgaattctccaacgacctgcagctgcggcccacggaggccggtgcaggctcccccgacgcggccaacggcagcacggtcacgtcagagggcagcaacggcggcgacggcggcaccaagaacggcggcgccgcgacggcggcggcggagcgcaagttcgagtgccactactgctgccgcaacttcccgacgtcgcaggcgctgggcggccaccagaacgcgcacaagagggagcggcagcacgccaagcgagctcacctccaggcctccctcgccatgcaccgctacatgccggggcacatgtacggcctcttcaactaccaccaccacatcggcggccgcttcgaccaccacccgccgccgccgccgccgccgccaccgccggcgcactacccgatgtggacgagcgccgccccgggcgccttcgccgggccaggttccatggcgcagcccatcaacggtagccccgtgcaggccgggctgtggagcgtgccgccgccgacggagaatttcggcagcacggccggcaggcagggcgctgacaagctggctactacggtggcgggcacgccggcggcgggggaggtggcatgcaaggacgagatggtgccgatgagcttgctgtcctcgtcgccttcgttgtcgtcgtgctcgtcgacgtcgccggagatgctaggtaggtgtgaattggggcagaaggagggtgtcagcttggacctccatttgtaatccatgtctaattaggttttcttcttgtggattagcagtcgcaagaaagggtatgttaattctcatagcttaaataatctactctttttgcct

SEQ ID NO: 464 - DNA, 715 bp, Oryza sativa
  ref <308>: DATABASE ACCESSION NUMBER: AK103985
  ref <309>: DATABASE ENTRY DATE: 2002-08-28
agtagacagtctgtgataattttgttctcttcttgttggggtcttggggaaaggagcaaggaggaggaggagaccaagaacacggagtgaaagggagagggttctgttcttgcttcttaggccatatggagatccagcagcagaagggggttggcaattccaaagttgtgaaggttgagaaggaggagtcatgggatctgttcgtcaatcaagcaagcaacgaaggccaccctgttgttgcccactttggggcttcatggtgtgtgacttcgctgtccatgaactacaagtttgaggagctagctcagacacaccctgagatactgttcctctatgtggatgttgatgatgtccagagtgtttcgtccaagcttggagtgaaggccatgccgacattttttctcatcaaggacaaggaggtggtgaacaagattgttggtgccaacccagatgaggtcaagaagatggtggacgcttctgctgagtcctttggagttactgctcctcctgatatagtggtggaatagatatatagatgttgcctttatcttcagaaacttctctgtgaccgtgggtgcttcttggtcaggtccggaaaaatgcgtccatgtgtacattctagctttgctcctgtgactctgaatggtgtccctttgaactgataggcttgtgccttgcggtagtttgttctgcaggctgcagctgtggctttacc

SEQ ID NO: 465 - DNA, 610 bp, Oryza sativa
  ref <308>: DATABASE ACCESSION NUMBER: AK058593
  ref <309>: DATABASE ENTRY DATE: 2001-12-06
agtttgttgacttttcatgcttatgtaagctaccatgtgaagtgttctgaaggattcatgcacaccaggatgagacgtagagttgagacgctgatccaggctttggatcgtgcaaaatctgatgcagagaagttgaagaagttggtgaatggtggatctttcaaaaggctgagcttgaataatgacggcaactagcgtcagcgaagatgctgtcggtgtgtcagtagaagaccttttatatcctgggaccatagagccgcagctggtgaaacagaatcagcatccggctgttcatcgcttgtttctttttttccgggaggatattctaccttgctgaattgagggtgaggaatagattaaactgaattgaccttagtgacttgcgacaccataacggcgtatcacctgaggacgctcatttcttgttggccctcctacatcgatccatctttctacacttccttctatgtttgttgattgatccatcggcccaagtcagtctaggctattatgagttcgattttgtaaaatattgttttctatagcctgtcagatgattgttattttcattgtagctgtgctgaaatggaaactcaagagcagttttatt

SEQ ID NO: 466 - DNA, 1271 bp, Oryza sativa
  ref <308>: DATABASE ACCESSION NUMBER: AK058594
  ref <309>: DATABASE ENTRY DATE: 2001-12-06
aaaaaactccccatcctgcaccaaaccaaacccccgcgacccacacccaaacccgccaccgattccgagcgcgccgcggcgagcgagcgggagagaggggggtcgcaagcgcagcttcctccccggccatggatctcctgcacggggagagcgtccagaccacggtggccatcgccgtcgccgtcgtcgcggtcgccgcgggcggcgccttcctcctcctccggtccaggaagcccaagggctgtttggatcctgagaacttcaagaagtttaaacttgtggaaaagaagcaaataagtcataacgtggccagattcaaatttgctcttccaactccaacctctgtattgggccttccaattggtcagcatatcagttgcagaggacaagatgctacaggcgaagaagtaatcaaaccttatacccctactacattggattctgatctagggcattttgagcttgttattaagatgtaccctcaaggaagaatgtcacaccatttccgtgaaatgaaagttggtgattatatgtctgtgaagggacctaagggtcgtttcagataccaagttgggcaagtgagagcttttggaatgctagctggtggatcaggcatcactcccatgttccaagttgcaagggcaattcttgagaaccctaatgatatcacaaaagttcatttagtctatgcaaatgtcacgcatgacgacattcttctgaaggaagaactggacaacatggccaaaacctaccctgatcgctttaagatctactatgtcttgaatcagcctcctgaagtctggaacggtggcgttgggtttgtgtcacaggacatgattaaagctcatttgccagcacctgccgaggacattcaaatcttgaggtgtggtcctcctccgatgaacaaggcaatggctgcgcaccttgatgagctcgggtacaccaaggagatgcagttccagttctaagctctcctaatggcggagtaccagaataatggaccccatggcctacgctgtcttacgctctcttgtgtcatggagacgtcgtctgacctcttttgttagttgatagcaatacatgattagtcgtgacccaacaattcatgtatcactccatttttatgggcaaatgttatctgcaattggcagaagccctgtgactgccatctggtttacaaactgaacattggatgctgcaccgcggggaaactattcaatccctcgaggggatgttctctcgtttgctcaaaaaccatctaaacggttatg

SEQ ID NO: 467 - DNA, 1635 bp, Oryza sativa
  ref <308>: DATABASE ACCESSION NUMBER: AK058595
  ref <309>: DATABASE ENTRY DATE: 2001-12-06
cttcggccccaccacgcccgaccgggtggcgtcgtcggcgtccgcgtgctcctcctcctcctccgccggggcgtcgcccgtgggctcacccgccaccggcaacatattcaggttcaaggcggaggtgccccggaatgctaagcgcgcccttttctccgacggggacgacgagggcgtgctcttccccggggtgttcacgacgaggggcactggccccaggaagatccctaggtcaccttataaggtgctggatgctcccgcattgcaggatgacttctacctgaaccttgtggattggtcttcgcataatatccttgcagttggattggggaattgtgtctacttatggaatgcatgcagcagcaaggtcaccaagctatgtgatttgggggtggatgacaatgtctgttcagtgggttgggcacagcgtggcactcaccttgctgtagggacaaaccaaggcaaagttcaggtatgggatgccactcgttgtaagagaataagaaccatggaaagccatcggatgcgagtaggtgctcttgcatggaattcatcattgctttcgtcaggcagtcgtgacaagagcatccttcaccatgatatccgtgcccaggatgattatattagtagacttgctgggcataaatcggaggtctgtgggctcaagtggtcttatgataaccgtcagcttgcatctggtggtaatgacaacagactttatgtatggaatcaacactcggcgcacccggtactgaagtatactgagcatacagcagctgtcaaagctattgcgtggtcacctcatcttcatgggctgcttgcatctggtggaggaactgcagatagatgcatacgattttggaataccaccacgaatatgcacttaaattgcgtcgacacaggcagtcaggtctgtaatcttgtatggtcaaagaatgttaatgagcttgttagcactcatggatattctcaaaatcagataattgtttggcgatacccaacaatgtcaaagctcgccacattgacaggccatacatatagggtattatatttagccatctccccagatggacagactatagtaactggcgctggtgatgaaacgcttcggttttggaacgtgtttccatctcccaagtcccagagttctgacagcctaagtagcatcggggccacatcatttgttaggagctacatccggtgacactgagatgtggtaatctaataacacttggctcataagtcataacactactgcagcagagtgttgatgatcatcaatatcattccatttgtaccacttgcatcaccagttcatgaaccatcaaacctagccaaattttagagatagtaggatgcagaatggtgaaactggctcgcagacctcggagtggctcatttgctgaatgctgtatatatttattcattggctttgtaggagcgaagatggcaaacactgaccatccgcaatgtaccattgataagttcacggcctcctgtttttgtttttgctgagtcaacttggagctggagctcttatgtataccatgctagggcttaacaacattggccaactcatgatgctcattgcatccaagttggaatatgctaaggaagctggagaatttctggtgc

SEQ ID NO: 468 - DNA, 612 bp, Oryza sativa
  ref <308>: DATABASE ACCESSION NUMBER: AK058596
  ref <309>: DATABASE ENTRY DATE: 2001-12-06
tacttcgtgatgctaagaggattcatccaagactaagcagggttacatatcacacacttattcgtggttactgcaagatggaggagtttgagaaggccttggagtgcctaaaggagatgaaggaagatgggatggagccaaatatggatgagtacaacaaacttgtccagtcactttgtctcaaggctttggactggagaactgctgagaatctcctgaaggaaatggaggatggtggattatgccttaaaggcactactcgaagccttatagcagcagtcaaggaattggaaatggatgagctgtcaaaagccagccaagaagcatagtttctttttggtacgcttgcagtgacacagctgccaatcaattttggggcagtgctttcttttgctctctgcttctctggtgagcttgtgagaaacatcagcttttgtacttgtgtctgtttgttgttagatgctacaataatcttgcaattatattgtaagtgctagactgacaggaagagatttaattttggtctagaattcctacttctttagaactgagagaattccatattttattttccatatggtctcatgccttgcaaggagagagtacagagct

SEQ ID NO: 469 - DNA, 1027 bp, Oryza sativa
  ref <308>: DATABASE ACCESSION NUMBER: AK058597
  ref <309>: DATABASE ENTRY DATE: 2001-12-06
ccgcaacatgcatcagctattattttctgcatcaatgatgaggttgaaggcttccaaggcaatggttggtggctaggggtgattactgatgttcatcctgaatttagatatacatttaaggcagcacactcaggaaaggagattcaattggaccaaaaggcacttagacttcggtatgactggacccatgatcagtggcaacaagttacacagaatgtgacaaaaaaatttgccaaaggcagcaaggtcgaagtcaccagtaatgatgatggttttcatggagcttggttccaggggactgctctaaaatatgttaacaacaagattttagtggaatatgacgcattgaaggctgatgatgaaatcactcctttgacagaagccatagaagtgcagcacgtcagaccctgtcctccagatatccctgtaaccagtggattcaatttacttgatgaagttgatgcttgttggaatgatggatggtgggttggtgtgatatccaaggttaacagtggtgacaggtacatggtatacttcaggtcttctacagaagagactgagttcgggcatgaacagttaaggcttcactgcgattgggtgggtggaaggtggatgcgggcttcgctgggattggaggcataaggcttacgaggtgcacgcacaattttgtgcagaagtgtgggttagtacccaaaagaatgtgcttcgctaacatcatccttgttattgaagttgtctgatagtacatagaaagttgtctgaatgacctttcttcgtctgcaactccaccagcagttgatctgaatgtttgtcaatgggagatcctcagcgtcactaataagctttggcattttctgtagatctgaacatgcttctataataactgactttggggaacagaaattctaatttagggtgacataactcttatttcatgactacatgagcatatgctttctatgtttgagatatgtttttagttctgcattcaaaagtagtgggattgaattgagagtaacctgcattg

SEQ ID NO: 470 - DNA, 1142 bp, Oryza sativa
  ref <308>: DATABASE ACCESSION NUMBER: AK058598
  ref <309>: DATABASE ENTRY DATE: 2001-12-06
aaggaagcccggccgcggagagcatcgcgtcccaccccccaccgccgcggcggcgatggccgccgccgccgccgccaccgcgcgctcctcggtggcgccgcacgcatcgcccacccttcgccgctcgggctcatcagcattctaaataggttcaggcgacagacaggtgcaatagacagcgacaactaaacagaagcctaccagtcttctcttatccttacgaccttacaagtcatggccggtaattatgatttatggagtggatcgctgcacttcctgagagttcttttaaagatattaccgtctctctcaacgcttaccggaattgcagattcgatctatttgcttcgactgcaaaagcaggctagagctgcggctgggtgcatcccatccactcatttttcagtggccatgctagcctgctagggatcacattgggaagggaaacaatcaaataatccgcggtggtctcagctcagctgcatgtgtggaggacaagcaaattgccaataacacaccacatggggcaacatcgcgcagacatggcatggaccctgcttgccatctacccctcaccgtttcaatgcaccagagttacagcggcagcaaggaggcccccccattgcaattgaaatggccacatgtggagactgccatatgtttccatcagagatgatctctcagttacagtaagacacatccaatttcgacttgttaccctgatgaaggaacaagaagaagagaaagaagtgagtgtggcagacagagacagcagcaacccgggcagacagctccacgcacatttcacacaaaagtccacactccaaacagctccgtgtgcagcagcagcaagcagcaggccagcagcttccttggtcagatttttccatctcgtccaattccatcgcgttcagtttactgaactttcgactgctacttcggttcaggctttgtttcgacgccctatcggacctttgactgacgtgcttgcttgttaggtcgttcagaacactgcaactactgtatcgtcacgtcgggttttcgcttcgcttgcacctcagctaagaatgatcatagcttcatctgtagttacctaaattaccgaactgtaaatttcatgagattgcaggttcttcgacagt

SEQ ID NO: 471 - DNA, 1372 bp, Oryza sativa
  ref <308>: DATABASE ACCESSION NUMBER: AK058599
  ref <309>: DATABASE ENTRY DATE: 2001-12-06
aaaaatacaattaatctggttgacaagttctttgagatgcaaagaagtgatgctgttagggcacttgatatatacaaaagagcaactaaccaggctgaaagactatcagagttttatgaagtgtgtaaaacgatacacattgggcgtggtgagaagttcttaaaaatcgaacagcctccagcttcattcttagtaaccatggaggaatatgtgacagaagctcccactgtagctcaaaaagataaggtactggcaatcgaatacaagaaagaggcagaggaggaagaaaagccggcatcgcctcctcccgctccagagccagaaccagaacaagaaccagagccagagcctgaaccagtaaaagaggaagcacctaaagaggagccaacagatttgctgggtctgaacgaaccgaaccctgccgcagccgagatagaggagaagaatgctttagcccttgccattgttccgatagatgatgtacctaaagttgcacctgctcaaaatggagtcactggctgggagctggcccttgtcaccacacccagctcaaacgaaactgctattacttcaagcaagaagctggctggtggactggacttgctcacgctcgacagcctgtacgacgacgcgaaccggagagcgagccagccgacgagctacaacccatgggatgtcaaccccggcgtcgccggcgccggcgccgccccgatgatgcagcagccgatgatgcacgacccgttctacgcctccagcggctacgcggcgccgcacaacgtgcagatgaccgccatggcgcagcagcggcaggccttcatgctccagcagcagatgatgatggccgccgccgccgccgccgccgcggcgcccccgcctcaggtgttccaccaccaccagcagcagcagcagcatctccaggccaacccggcgaacccgttcggcaacccgttcgccgccgccgcagccgcccaccacccttacggcgccgccgccgccgccggcaacggctacacggggctcatatgatgatcatcatccagctccggcgatgtcggtcgtcgtcgcactacttccaatgtcgattcttttttggctggaaaaatttgtagctttctctcattgttgatggtttgtagcacacacaggtagaagaagaagaagaattcggtggtgttcgtccgattcggacacgtcacacgtaggtgcttggggtaatgtatgtacgtatgcatgtatgtatatgggtatgggtatttttggtatttcttcatgtgggtgggtgattcgggataagattaattattggattattcatggacattgatcgagtacgattacataataatcaagatgtgtcaattatttgtagtgt

SEQ ID NO: 472 - DNA, 1661 bp, Oryza sativa
  ref <308>: DATABASE ACCESSION NUMBER: AK058600
  ref <309>: DATABASE ENTRY DATE: 2001-12-06
taactgtagaggatgatgaattctggaaaggggtttcacccctagagtttggatctttgcctgcacttcaagatgctgtgactgttgttggttacccaattggaggagacacgatctcagtcacaagtggtgttgtatctagaatagagatactttcatatgttcatggttcaacggagcttctaggattgcagatagatgcagctataaattcaggaaactctgggggccctgcttttaatgataagggcaagtgtgtgggcatagcttttcaatctcttaaacacgaagatgtagaaaacataggctacgtcatacccaccccagtgattaatcacttcattcaagactacgaaaaatctggggagtacacaggttttcctatacttggaatagaatggcagaaaatggaaaatcctgatctccgaaaggcaatgggaatgaaatctgaccaaaagggtgttcgtgtcagaagggttgagccaaccgctcctgaatctggatgcctgcaaccttctgatataattctaagctttgatggcattgacattgccaatgacggtacagttcctttcagacatggggagcgtattggcttcagctacctcatttcgcagaagtacactggcgagaaggcccatgtcaaaattctgcggaattcgaaagttcttgaatttaacattaagctggcaactcacaaaagactcattccagctcatataaagggcaggccaccatcatattacattgttgcaggcttcgtttttatggttgtttctgttccatatctccgatctgagtatggaaaagactatgagtatgatgcccctgtcaagttgttggacaagcacttacatgcaatggctcaatcacctgacgagcagcttgtggtggtgtcacaggttcttgtagcagatatcaacattggttatgaagaaattgtcaatattcaggttctttctttcaatggcaaaccagtaaaaaatttaaagcacttggcaaccatggtggaagattgtaacgaggaatacttaaaatttgatatggactacgatcagctggttgttcttgaggcaaaaacggcaagggctgctactcaggatattctgacaacgcattgtataccttccgcaatgtcagaagatttgaggacttgatgaaagcaagatgcttgctgagattgtcatgtgatcctacatggcacatttttgcctcaactgattaacagtgtccactagacgagaagcctcactttgggattttgagtgtcaaatgaattctggatgcagatcagactggagtctggtggcaccaaagaaagccaaggatagcaggttcacatcacaagttggattaattaggttgaatgatagcaaggagcccttgagatattggggaatattacaaaagttttgctcccatttgaatatttgattaattgaggcaatatcagaaaacttaccctgaatgtcgtccctgcatgttctcttcttactgccaagtttgatctggtctcctgtagacgtatgtaatcttttgcaacaagaggctatgcttttctgtgcattttacctgctttcaggagtacttgttaaagtgctttttggcggccaaaacatatatttttaagtgtcttttgtaccagaatttggtttgttttc

SEQ ID NO: 473 - DNA, 794 bp, Oryza sativa
  ref <308>: DATABASE ACCESSION NUMBER: AK058601
  ref <309>: DATABASE ENTRY DATE: 2001-12-06
attgcaggctgctgagatcctatgtgacatgagaagcagcatggatgtttggagtccgcaggtattcagcaatgggacaatcaagtggccaaagtcaccttctgagaaggttatgaaggcccgcaagccttcatccccatttggtacagccgagagctcatctggatctcggaatagtgatgcagctcgtgccggaaataatcactccaccaagaaaatagttgataggaagaatgattctgtacgcatgaataaccctgggaaaggatctattaggtggcctgttcctattgaagatggcgcatctcctgtcaagtctgagagagggcttgtgcttgatatgaggcaaaaccatgtcaatgctgcaaggcatccgaatcaggtgtcatcgcaggcaaaggagtatgagaaccagcagaagctgaggaaagcaacattgacctcatctctaggatctgcaggagattggaatagggacaggaacaagagaatgtgaattgtacattattcccgttggaaaccatagtctgcgatatatattgtctgggggcagcctagccagacaactgttacataagaggtaacagaacattgggagatgcgataatttaggtggcgcatgatgtatttatcggggcatttgttggtacaattgttgtaacaattgtagttctttttatttgccatcttaccggaggtctctccctgtctcaccatcttcattgtgtattagtatgtctcgatctactttcagccaaagtaataatagcacgggtggttaattccattgaggg

SEQ ID NO: 474 - DNA, 888 bp, Oryza sativa
  ref <308>: DATABASE ACCESSION NUMBER: AK058602
  ref <309>: DATABASE ENTRY DATE: 2001-12-06
gaagaacaggtttctctaagggaggttcaatgggaagcagatcaagaacattcagtgagtgagctaaaagctcagcgtcagtatgctgcagaattagagaaacaaattggagctcttacacagcagttacaattggttgaaaaacagtatgagcaaaaggttacagaagagagggagaaacttgctctcgttaacacggaagtcagcaagttgacacagaagcttagcaagagtgctgaaatggagaagaagatagaacaccttgagcagaaattgcaggcaaaagattctgtggaatcgacatcccgcgacttcagccttgactcatcaacgctgccaagcaaacaacgcgacagatcgctggctcctgaaacgacacctccaaacccaacacaacagcaagaactgcgagagccttctggtatcatggcctttaagttcatcctgggagtcgcgctgctgtccgtgctcatcggtgtatttcttgggaagagatactagcgtttatgcctttcagaatgtctactgggaaaccccattgtcaatactgctttcggtgaacctcaattgtcttagcagttgaaaactgtgcaaattctgcaaaagtttgaaagattttggtaggcttcactggaacaacagattcatgacttccagggagaagtcagaaaatcttggaagttttttctcctcttgttgagtaattccatttagtttcattttttggtttagggggctaggaatatgatttttgtttcattcctacccttttgcatgcagaaggccatctgctgcatgcaattggttttgctgtcagcttgtatttacatctgtatgtaaagagaacatcggttcggggacaagaaatatatgcctatgaaaatttgt

SEQ ID NO: 475 - DNA, 1580 bp, Oryza sativa
  ref <308>: DATABASE ACCESSION NUMBER: AK103986
  ref <309>: DATABASE ENTRY DATE: 2002-08-28
aaacccacctcgcgtgctctgtgcacggcggggacgctaaggggaggcgaggcgaccacgcgccctccgcgtcaccatggatccgcgcagcagccaggcgcaagaggacggcttcttccacccacgcgacggcgcgtgccccgccgactccagcggaaagacagaatgtaaaacccagggttcaattgccacgcgcaaggttcaaaaggctgatcgtgagaaaatgcgaagagatagattgaatgagcagttccaggaacttggaagcacacttgatccagatcgacccaggaatgataaggcaactatccttagtgatgcaattcaaatgctgaaagatttgacgtcccaggtgaacaagcttaaagctgaatatacttcactctcagaagaagcacgtgagttgactcaggaaaagaatgagctcagagatgagaaagtttcactgaagtttgaggttgataatctgaatacccagtatcagcaacgaatgcgtgtgctgtacccttggactggaatggagccttctgttgtcattgggccacccctgccatatcctttttcagtcccagtcccagtcccagtccctataccttcaggtgctgttcctatgcacccacagctccaggcatacccttacttccgaaatcaaacttctggaaccgtctccaatccatgcacaccttacatggcatacactcaacccatccatcctcctactgatcaactatctaaccaattcagtgctccagttcagcattcaagtagtaatcgatctcactctatggcccaagactctagaagcaagtcctctgcactgcagcaagtaagttgtagagggaaacatgatgactttgatgacgttgcaactgatctggaactaaaaactcctggttcctcagcccctctacaatcagagattgccaacaaggattcctcttctgacttgaaaaaaaagcagcagttcatacaggaaactaaaggtagttctcttacagaaggcagtagtagttcaagcagatgctcgtccagtggtcctccagatgtctctaacagtattgaaggtggatcagttgctgatgatcaacgatcgacagtacagacatagactaatatatgacgtatagctatcttttccgacattcctaggcctgcatgtgtggtaatctgctggcacatcaacctttgctgcttagctgtgcccacttgatatcggaattgacaaattaggaggcctataggcaaagtagaactggttagtcgaagccaaagccatattccatggctatgattatgaatggtcggtagttacccacactcttctatggcagtttgaaatgctttcggcgactaggtatgcttgcgactaacttctgcggtttgtcatctaagatatgcgtcaagtgccaaccagatctgttgagatagttctatcctggagtagcattttctacgaatatatggtaaattaactagtgattaaccatagaatttatcatggttcaatagttacctggtagatcagctacaagttgtacatcatacactatattaccattaattggaatatgttcttaagt

SEQ ID NO: 476 - DNA, 1773 bp, Oryza sativa
  ref <308>: DATABASE ACCESSION NUMBER: AK103987
  ref <309>: DATABASE ENTRY DATE: 2002-08-28
ctaaaactcaagggtaccccaaattccccatcgccgccgcccccgatccggcgatgccgctgcgcccgccgcccccgcctcagggattcctcaccgcgtatccatccgcagctttccctccggtgaagcggccgcatgaggacgacctcggcgccggtgacgtgctgaccttcaggttccactccctcgccgtcttgaaattattcgaccgcatccgcgagtaccgtctgcacgattaccggtaccaggcaacgcgaggctggtacagctccgggacggcgccggaggatgctcttcttccctgtgcggttgctcgaccaccgaggatgtatgggtgcgtgatcggggtgcagcgcggtcggacggtggaggtcgtcgacacctccgacatcttgctcgacaccgaccccggaaccctcgaccgcgacttgttgaagaagaagctcgagacctacaagaaggcgttccctggcttggccattcttgggtggtactccattgacactcatgtgacgaacaccgatatggaaaccaaccaggctttgatggatgctagtggaacaaccttttatcttctattcaatcctgcaatgaacctttccctgaaggatctcccagtgactatttatgaaaaagtgcactctaccaataggagtcccactccgttaatctttgtccaaggcaaatataaaactgagactgtagaggcagagaggatatctttagaccatacgtgtcctgtagtttctgatgttagtgtgccacctcttgttggaaaagggcaacatgcaaatattatgcagacttctggatttaagctgatgctgtttgaaattccttctggtttcgcgatgtttgaagtttcacaggaactgattgcacgccctaaggacatatgggcacgatttgcttatcaggatgacattacaaatgttattgttaccctgggttctattcagatccataacaaatctgttgctagggatattattgttggtcctggtgacgaactgaaagaatttatcctaagcttttgcactcacaactacttaattgttcaagatgtagagcttaaagatgttatcgagaagaaacttaatatctattgttactgtaatccaactgttgtcggtgaattgacatggggactgaactatgtcctacataagttgttacctcaagagcaaagtttaactcatgagccttatcttccactaagcaaggcaatgtctaagcagataaaagaatatggattcaaaatctcgccacgagagattgacagagagttcctaagagctatgagttttttaaattatttggggtatatgtcagagcgttattcactgctgctagatcatttgtttggacaatatcgtaagaataatatgtccgacattgaatttgctaaatcaattgcatctcatcttcattcctctgagggaattgtaccaagagatgagagatacactagagcagagattatggagttcattgacttcataattgcagctcctgaaaacagaagccggacgctatcgttcctgcggcgcatcgaggcagcttctattgatgattctcctccaccgccttcactgccaggagggatgggtgtttcgttgttgaagcgtcttcgtttggattggataactgtttgttgtctaggatgtgcagttgctctttaccctttctaccgcagagtatgaatgactttgttataaaattcactatgttttgaggacaaatacatattctctgacctgcttgattagtacc

SEQ ID NO: 477 - DNA, 1669 bp, Oryza sativa
  ref <308>: DATABASE ACCESSION NUMBER: AK058603
  ref <309>: DATABASE ENTRY DATE: 2001-12-06
actgactagactcaagagcaatgggagtccagtcccgcaccttttgcactctgcttctgatatggtctcaacaaaacttgctgtcctgacaagtatgcaacactgcttggctgcttttcttgctgaggtttactttgaagttgataagtgcagaaaaggactaacagaaagttcagataaatcgctacatactctattcattgttctgaattctgtcttctccaaattggaggtatcatttagaaatgctgttgagggacaaactctattatgcacacatgatgggaagtcgcctgaacttatctttgaaagattgccagaagttgatgttgagagttcagagtggacagaggtgttatcagcaaatgctataacattgatctaccaaaacctccagaagttcgatgattttatttctgatcagttttcgaaccacaaaagaccaagaaatacgaccatatattggttgccctacacatgtggagcattgggcctctctgcatgttctttatggcttttgcgccacagtagcttgatgggaagttctgacattgacaactggattcaagatgcaaaagaatcgatggttggtttttgggatgtgcatgttgggcaaccaatcatttccatcagggatgaactttttgagacattcaaacaaagatctaaacatgaaatggaaaaacaagaggtccaacaaactgaagaatcattgcgcaggatgttgcttgacttttgtgggaacacttcaaatgaaaaaccgccacaagatatgtcagagctagcaatgatggagattgtcatgaagagatatgagaaggaagcaatgcatccatttaaaggtctttccagtggaaaattaacatgtgcattgtctattcagattgagaagcataaactggctcttctggaggcaatgctggagctggaccagatccttagggcaaatgagataaactttgctattcttgcagcactacctgcatttggtgtttcacttctgctgctctttgcagttcgagcatgggctacacatggccgtggtgctgagggaagaggtaggactgcacggcgtcagcgaaggctgcttcttgctgatgtagagaaaaggcttatggagtttcagaattgcatggctaatggaatggaggaagaggcatactgtaagttcgggttaacactgtacacccttgatagactatacaaagctgttgaatcgcaggcgagagaaacaggagagtggtcaagcttgagagaagacatgtttgatctggcaaagcctggtgtgggcatggaagacaagctggttctgctgtcccggctcaaagggatgtacgactgcttacttccatcaccgtcaggtgtcttgccccgtctgtagtcttctcatcttcctttcctttccttttcttcttttctttttggtcacgtgtgacgattagtgaaccccaatcttagacgacatgaatttgcttggcgttttaagagtcgtcaaattttgaattttttatgccccgggtactttgattgtagccctttcggctccatggagtgatgatggcttttgtgctgctgcaatgtttgcaccagagattactgactgtaaatccaaaatctcttctaactggatgcttaattcatgtgccacacccattttacatttgtttct

SEQ ID NO: 478 - DNA, 1313 bp, Oryza sativa
  ref <308>: DATABASE ACCESSION NUMBER: AK058604
  ref <309>: DATABASE ENTRY DATE: 2001-12-06
aaaaaaaaaaaaaaagagaaaaaaaaaatttgctcgccttctccttccctcgcggcgaagacaccggagccaccactcgccgcccgcctatttcacgccgccgcgccgcgcagaccgacctcgtcctccaccccacccatctccgacgccgcggaccccggcggccgctcctcctttgctccattcatcgccatgacgcgccacgccggcgcccgccgccggggcggcgccggcgtcgtcagcctcatcgtcgtcgtcgtcgccgtcctctccgccgctgcaatcgccgcggagggtgtcgatgctgcggtgttcgacgacgcgcacctcctgccgcgcccgctcgtcatcgagctgcctacgacgacctcgtcgtcgtcgccggccttggcggaggagggggagggggaggcggtgccggcggaggtgaggtgcgcgagctggaggctggcgggggaggcgaacaacctcgcgccgtggaagtccctgcccgaggagtgcgccgcctacgtgcgggagtatctcaccggcgtggcctaccgctccgacctcgaggtcgtcgcgcgggaggcctccgcgtacgcgcggaccgcccgcgtcggggacgacggccgcgacgcgtgggtgttcgacgtcgacgagacgctcctctccaacctcccctactacgccgaccacggatacgggctcgaattgttcgaccaccgggaattcgacaagtgggtggagaggggggaggcgccggcgatcccctccagcttgaagctgtacaatgaggttcgcgaccttggattcaagaccttcttgctcacgggccgcagcgaggggcaccacggcgtcaccgtcgacaatctcaagaagcagggcttccatgattgggacaagctcatactaagggcgccagctgatcgcaagaagacggcgacgatatacaaatcggagaagaggaaggaaatggaagaggaggggtacaggatcctaggcaactccggcgatcaatggagcgacctgctgggtttctccacgagcgctcgctccttcaagcttcccaatccaatgtactatattccatgacggaacagaagagggaaagagagggcgggtgagaaatgcggcgtttatttgatacattttctcacccagcccattcaaactgactggtggagaaaaagaaattcacaataattcttcaaaggaattccaaactgtacaaaatctcactgacttcatgtagaatacattaaacttgtaaagtcgaatgtaattggatgaaatgagagactatttattgagttggtagttcatgatatact

SEQ ID NO: 479 - DNA, 1770 bp, Oryza sativa
  ref <308>: DATABASE ACCESSION NUMBER: AK058605
  ref <309>: DATABASE ENTRY DATE: 2001-12-06
aaacacggtgcaaagtgtgcagcgaactcgataaacattaaacaagctgtgtgaacttcttttttcgtgacaagtttaattctttctcgatcgatcgtcgtgatggctgacgagtacggccgcggcggctacggcaggtccggcgccggcgccggcgacgactacgagagcggcggctacaacaggtccagctccggcggcgccgacgagtacggccgccggccgggaggcggtgccggtggctacaacaagcccggtggcaccgacgactacgacagcggctacaacaagtccgccggcggcgacgacgacgactacggccgctgcacccgcagacgcaccagccactgaaccctagtgacctgtcccctctcttccccgacgagctgatcaggcaggaggtgaccgaggagcggttcatcgacatcccggaggaggtcgccgaggtttacaagctctggcgcccgacgccgctgatcagggcgaggaggctggagaagctgctgggcacgccggcgaagatctactacaagtacgaggggacgagcccggcggggtcgcacaagccgaacacggcggtgccgcaggcgtggtacaacgccgccgccggggtgaggagcgtggtgacggagaccggcgccgggcagtggggcagcgcgctgtcgttcgcgagcagcctgttcgggctcacctgcgaggtgtggcaggtgcgcgcgtcgtacgaccagaagccgtaccggcggctgatgatggagacgtggggcgccacggtgcacccgtcgccgtcggcggcgacggagtcggggaggaggatcctggaacgcgacccggcgagcccgggcagcctcgggatcgccatctcggaggcggtggaggtggcggcgagggacgccgacaccaagtactgcctcggcagcgtgctcaaccacgtgctgctccaccagacggtgattggggaggagtgcctggagcagctggcggccgccggcgacgtccccgacgtcgtcatcggctgcactggcggcgggtccaacttcggcgggctggtgttcccgttcatgcgcgagaagctcgccggcaggatgagcccggcgttcaaggccgtcgagccggcggcgtgcccgacgctcaccaagggcgtctacgcctacgacttcggcgacaccgccggcctcacgccgctcatgaagatgcacaccctcggccatggattcgtccccgaccccatccatgcaggagggcttcgctaccatggaatggcgccactaatctcccatgtgtatgagcttggattcatggaagccattgccatccaacaaactgaatgcttcgatgctgcgttgaaatttgcgcggacggaggggatcatcccggcgccggagccgacgcacgcgatcgcggcggcgatcagggaggcgatggagtgcaagaggacgggggagaagaaggtgatcctgatggccatgtgcgggcacggccacttcgacctggcgtcctacgagaagtacctgaggggcgacatggtcgacctctcccactccgacgagaagctgcaggaagccctcgccgccgtccccaaaatctgatcaatgcgatacaaaaataatcatcagtaaccaagaagaataatctctgttgttgtgttcttggcatgttgttgttttgccttggcgaccgtgttcatctgctgttgatttagggacgcatatggactgaataaatttgatcaataaatgaagtagtttcccctaataggggaatgtttggcac

SEQ ID NO: 480 - DNA, 755 bp, Oryza sativa
  ref <308>: DATABASE ACCESSION NUMBER: AK058606
  ref <309>: DATABASE ENTRY DATE: 2001-12-06
aaaaaaaaaaaaaacactcgaagagctcggcggtggaacagctcgctcgatcatggccgccgccgccgccgcctcaagggcgctctgggcttgccgcaccgcctcctaccttcggatctcctccttccccagggctttctccaccgtccttaaagatctaaaatatgctgatactcatgagtgggtgaaggttgagggtgattcagcaaccataggggtcacagaccatgctcaggaccatttgggtgatgttgtgtatgttgagcttccagaagttggttccacagtatcacaaggaacgaactttggtgcggttgaaagtgtgaaagcaaccagtgatatcaatgcaccagtatctggagagattattcaagtaaatgatgaactaagtgaaaaaccaggatttataaatggaagtccatatgagaagggatggatcatcaaggttaagataagtgatccaagtgagttaaactcgctgatggatgatgagaagtacaagaagttttgtgaggaagaagatggcaaacactgatcaatcccctaactgctggatttcaagaaactatgcagcaactcaccatcatgacaatgagccatctcgcctctcctaccacattatattattctggatagaggagtcccaaggaatgtaataagctgaaacatttttcttgcaaatcagacatgaaaattttgtagtgtcctgatcattccgtttgtgctccatttgaaattcagctcttgatttgctt

SEQ ID NO: 481 - DNA, 575 bp, Oryza sativa
  ref <308>: DATABASE ACCESSION NUMBER: AK058607
  ref <309>: DATABASE ENTRY DATE: 2001-12-06
agattgtgttgttattaaggcttgttcctttacttccgttcaacatgttgaactacctgttgtccgttactcctgttggcattggagagtacatgttggcttcttggctggggatgatgcctatcactcttgcattggtatatgttggaacaacactaaaggatctatcagatgtgactcatggctggagtgagatctcaacaactcgatggattctcataatatctggcttcatcttgtctgttgttttgattgtatgtgttacaagaattgcaaaatcttctttggagaaggcattggctgagaatggagatgcaggaattccacagcttcctgtggtggcctctccctcggatttgcaacaaccccttgtgatcagaattgacacgtcaaatgaagatcatgagaagtgaatctgttgtttacaactttacatgtacattctttggctgttcaatctgtatcactttacactgtagtttttgccagatccattttgccagtaaaagaaaagaaaaaggaaaggaaaaattgtattgttaggtaacactacataatttcttaatccacgagat

SEQ ID NO: 482 - DNA, 1634 bp, Oryza sativa
  ref <308>: DATABASE ACCESSION NUMBER: AK058608
  ref <309>: DATABASE ENTRY DATE: 2001-12-06
attgaaagaagtgagaggcccaggataaaccctcaaatggcaccttcttggtttgagcgctatggaaaccacagaaatggtcagaatctttccatgttcaatttgcagaagacacctgttccgccatataatgtccaaaaaccttcttggaacatggacaataattctgctgagcaaagaatcgattctggccaatctgttaagcctgggcattacatttcatcgaaaaagatggaagtttcagtcccttccagtataatgcaaaggaggccaaagaagcgcaaatctgcagaatctgatcttgtttcttggcataaactcattgagcaccccaaaactttgagaaacatgagcacaactgagatggactgggcttgggcagctaataggttaatggagaaggcagaggatgatgcagaaaatctagaagatgtccctgtaaattatttatggcgcaaaaggttaagattgaccacacggttaatccagcaaattcttcctgctataccagcaaaggtcctcaaagcacaagctgcatcagcttatgaaggtgtaacctataacatcgctatgttcacactaggagatgcatgcaacatggcatcatataactctcgcactcttaccgatcatgaaaataactcatctgaacaaacaaatgccaagaaaatggaagacagattgtcaaaggttgtggaagtatttactggaagaatcaagaagatggaaaatgactttgtgagcttgaacaagaggtcttctatgctagatgtgcaacttgaatgccaagatttggaaagaatttctattgtaaatcgtctgggaagattccatggccggaaccatgcggcgggagtcgaggcctcatcggcttcagaaatgattcctcgcagaatttttcccgaaagacatgtcatgtcttttgcagtgcctggaaatcttcctgaaggggtgtactgtttgtcactctagtgcattgattcctcccatcgttttttacaaactactcaccctgtgatttccagtgctccttgttctcatgcaaagcatggcctttcatacagagcaaccaaatccaggggtagtcgaaaaaaaatcgaaaccatcacataataccatggtgatggagaagccaaggggtgcgtccagccgatcaactcagtgctggctgccgttgttcctcccttgtatcaagtataggtcctgtatattgtggaaagcaagttgaaactacggatctcgcatcatttttctgatgaaggaagagtattagcttcatactttgttagagagcccagtgctttgctagcttagtacatctggcgaactatgtagctatttgtcatctttttatccatgatgatgaagtgttggctggttagaggggggaataataacgggaaccttcctctgggttcttttgttcgtttaggatgggatgcaaattggctagtgtgtccagtctaactgaccagtgttagtcagcagttaattactagagttatgtagttccgaaagcattcatggaacaagtggcgggtaagggagcttggaaacttgttgtaatttgaatccccgtgatgtcgaaatctcaatgggttcttgtaaatttaaaatgaaaatataactgaggt

SEQ ID NO: 483 - DNA, 1543 bp, Oryza sativa
  ref <308>: DATABASE ACCESSION NUMBER: AK058609
  ref <309>: DATABASE ENTRY DATE: 2001-12-06
ttcgctctccagtttctccccttcttccttccttccttgctggtgttcgtgttcccatgatgaagaaaatcccctctttcttttccaatatctagtctaggttcttccgttcttgtgtccatcgtagaattttgctgaaattttcatctgtttttcttttcctcctgcaatgcaggtggaggagagggctcagaggggcctttacgaattgcaaatttgcaatgcttcttgcttgtgattgtgacaacgatgcacaaaccgcagacacaattaatggcgacgccccgatgctcagcagctaccgcgcaccgccgctcgccgaccacctcctcgacaagccgcactggctcagccagctcaaaccatggcgccgccatgcccacggcgacgaccatctctccgccggaatcgccatcaactggagctctgtgcgttcggcgactaaggactggatcaccaaccccatgaacatcgccatgctcctctggctgctctgcgtcgccgtctccggcgccatgctcgtcctgctcctcctcggcctgctcgacggggcgttccccacgccggcggcgaggaaccactggatcgagatcaataatcaggttctcaacgcgctcttcacgctcatgagcctctaccagcaccccgtcctctgccaccacctcttcctgctctgccgccggcgcgctgctctgcgtgtgcgggctgctctacggcggctactggaggatccagatgagagaacggttcgggcttccggcgagcgcggcgtgctgcggctcgccgtcggtgacggactacgcccggtggctcttctgctggccgtgcgcgctggcgcaggaggtgcgcacggcgagcctctaccacatcgatggcgagacgttctacaagaagcttcctgttgttgatgccgagaagaggcagccattgctgctagcgtcacaccatgtccaattccatgaaccaccggacacgatgatcatggcaacatcagaggaatcaagtgatcatgtcgtggttgttcatgaggagatggttccaccggctgtgcaggttgtgtttgagcaagtcgtcgttgaaggtgataaatctgaagaagaatgcagtgcagttcatgatgagaagatcatgggtttgcctcttccggaatcagtgattgtggttgatgctgagataccggccagtttgtctgatggaagctggacggtggagaaggtgaagagactgatgaatgttgtcactttggtttctttgctcattcttctctacaccaggggattcattcgttagtgaggcacagaaaatgcataaaaaaagggtacagattcaatagctagatgactgaattctctcatctttctccattactttttgttggttctgatcgagaggaaattcattctttgcagtttgggtgtacataggtatacatgatggcataaagatgccacatgattaagaagggcttgcgtatttgtaatccattccgagctgtaattgcagcttggaaatagtgaatctctaatgcagttatacttcctcc

SEQ ID NO: 484 - DNA, 1209 bp, Oryza sativa
  ref <308>: DATABASE ACCESSION NUMBER: AK103988
  ref <309>: DATABASE ENTRY DATE: 2002-08-28
aaaaaaaattttgggtgaggtggaggtaggaggcggcggccgctcccatccttccttcacctccatctatctccaagctcgatcttctgctgaatagagaggagatgggtgacgtggccaaggacctgacggccggcacggtgggcggggcggcgcagctggtcgtggggcaccccttcgacaccatcaaggtgaagctgcagagccagccgacgccgccgccggggcagccgcccaagttcgccggcgccatggacgccgtcaagcagacgctggcggccgaggggccgaggggcctgtacaaggggatgggggcgccgctcgccaccgtcgccgccttcaacgccctcctcttcaccgtcaggggccagatggaggccgtgctgcgctccgagcccggcgcgccgctcaccgtcagccagcaggtcgttgccggcgccggcgccggagtcgccgtctcgttcctggcctgtcccactgagctcatcaagtgcaggttgcaagcccagagcgcgttggcgtccgctgctcctgccgccgccgccgctgccgcctctcccgtcggcggaggcgcggccacggcgacggcgagcgtggcggcggtgaagtacggcgggccggtggacgtggcgaagcaggtgctgaggtcggagggcggcgtgggggggctgttcaaggggctggggccgacgctggcgcgggaggtgccggggaacgcgctcatgttcggcgtgtacgaggcgatcaagcagtacctcgccggcgggcaggacacgtcgtcgctggggcgggggtcgctggtggtggccgggggcctcgccggcgcctccttctgggggtcggtgtacccgacggacgtggtgaagagcgtcatccaggtggacgactacaagaaccccaagtactccggctccatggacgccttcaggaagatcctcgccgccgacggcgtcaagggcctctacaagggcttcggcccggccatggcgcgcagtgtccccgccaacgccgcctgcttcttggcctacgaggtcactcgctctgcactaggctgaactcatgtatcattacatcctcctccttcttgacccttaattttcttcttctgattctgattctgattcttgctgtcatccatctcatctgtggatgtaagaacagtgtaattctgtacacacaaatactatctttataaaaatttcctagatc

SEQ ID NO: 485 - DNA, 311 bp, Oryza sativa
  ref <308>: DATABASE ACCESSION NUMBER: AK058610
  ref <309>: DATABASE ENTRY DATE: 2001-12-06
aagtaacaggggaagggactggaagaataacaggggcgggaggcacttcggtgggaagcgtggtcgccactcggacggccatgaaagggcaaataaagctcgaaaagtcgatgctgctgcttaaaggcctcgtcgtcttatactagtaacctcagcttatgagctctagtgaggaacggaaatgtttgctccgttgcttgcttccacaactttgggagcaaaccttttgtgttgtgtttcttgtcgtgagctatgctctttggaagtaagaaacggtgaactcatgatgaaacggaaaattttgttcggtc

SEQ ID NO: 486 - DNA, 1357 bp, Oryza sativa
  ref <308>: DATABASE ACCESSION NUMBER: AK058611
  ref <309>: DATABASE ENTRY DATE: 2001-12-06
gacccgagatcgctttcacttctcacatctctcctctcctcttctccacacgaagagatagagtgaaataccaagagagaaaaaaaagagagaataatttcccccttttctctcttccgtgccggagaatcgatggagattagggcgccgccgacgagcctgaggctcgcgccgccgccgccggcctccgccagcttccgccggaccgcgctcaggacctccttcctcaacggcagcgtttcacttagacttattcaagtgcgccaatcaaatgtcaacaggtttaagtgcaatggcataagaagtaacctccttgatagattttctagggttgtaaagtcctatgcaaatgcagtcttaagttcatttgaagaccctgaaaagatcctagaccaggctgttttggaaatgaatgacgatttgacaaagatgcggcaagccactgcacaggtcttggcttctcaaaagcggcttgagaacaaatacaaagccgctgaacaagcttctgatgattggtatcggagggctcaacttgctcttcagaagggtgatgaggatcttgctcgtgaagcccttaagcggcgtaaatcatatgctgacaatgcaagctccttaaaggcccagcttgatcagcaaaagggcgtggttgagaacctggtatcaaatactcgggttcttgaaagcaagatagcagaggctaagcaaaaaaaagataccttaaaagcccgtgctcaatcagccaagacttcaacaaaagtgagcgaaatgctggggaatgtaaatactagtggtgctctttcagcatttgagaaaatggaggaaaaagttatggcaatggagtcccaagcagaggcactcggtcagttggcaactgatgatcttgaaggaaagtttgcattgcttgagacttcatcggttgatgatgaccttgcacaaatgaaaaaggaaatttctggaagctcttcgaaaggagaacttcctccaggtagaacggcagtcagcaattcaggagcagcgcgccctttccgagacatcgagattgagaatgagctaaatgagctgcggaagaaggccaatgaatattagattatgcagtttccttgtccctgcaccaggcctgacgaatcctttagactgaagaaccccgggaagatataggatggtcttcaggtttctccaatgcccctttgttgaaccaccagtgcagccttttttccccccaagagtataatggatgcgtaaaaaaaattctacattttgcagtgtgattgacattgactgtacagttagctacatagttatgtaaaagtcatattgctctttctagagctgactctgcatattttagtggaaagcc

SEQ ID NO: 487 - DNA, 781 bp, Oryza sativa
  ref <308>: DATABASE ACCESSION NUMBER: AK058612
  ref <309>: DATABASE ENTRY DATE: 2001-12-06
actcccaccccccgccgccgccgccaccaccgcagctgcgccgcttcaaggcaggacattgtgaaagtttcccaagtctgaaaagatggttctgaagactgaactttgccgttttagtgggcagaagatatacccaggcaagggtatcaggttcattcgtgctgattcccaggtttttctgtttgccaactcgaaatgcaagcgctacttccacaaccgcctgaagcctgccaagcttacctggacagctatgtacaggaagcagcacaagaaggacattcatgctgaagctgtcaagaagaggcgtcgcaccaccaagaagccatactcacggtcaattgttggtgctacactggaagttatccaaaagaagaggagtgagaaacctgaagtccgtgatgcagccagagaagcggctctccgtgagatcaaggagcgcatcaagaaaaccaaggatgagaaaaaggcaaagaaggcagaggtggcaaaatctcagaagacacagtcgaagggtggtgctacccagaggggtgctaaaggtcctaagattggcggcggtggtgggaagcgctgaaagtctcttgcatcatagggagagttcttctggcttagccttctctccggccatatcgtagaaacagtaccttggtcaagttagcctgccgtcttgaattttcacctttttctgtgagatgacttgtcctgaatgcttcgggtattttgttagtcaatttacaattgcacttatgtttggctattataaaattatcaagttttctgc

SEQ ID NO: 488 - DNA, 1080 bp, Oryza sativa
  ref <308>: DATABASE ACCESSION NUMBER: AK058613
  ref <309>: DATABASE ENTRY DATE: 2001-12-06
agcgtccacttcacgttccatcatctcctctacctccaaccacatcgttgcttagcctcgccaccgccgccgccgccgccgatcagtggtagatcgatcgatctagccggccatggattactggaagaccaaggttctgccgaagattaaggtcgtcttcgccaagggcggcaacgccaagaaggctgccgccgccgaactcatcaagtcgtttgatgaatctaaggaggggatcaacggcgagttcgaggagaagaaggctgacctccagcccaaggtcgtcgagatctacgaggctgctcctgcgccgctcaaggttctgatcaaggacagggccaaggtgtccgggatcaagaagaactccgccgccgtcaccaagttcgtcgacgatctcgccaaaatcgagttccccggagcgaagcaactgagcgaggggatcgccaaggtcggcccggcgctgctctccggcccggtgttcgccaccttcgagaaggtctccacgttgctccccgccgacgaggaggagatcaagcccaaggaggctacggccgccgccgccgaagaggagaagaaggaggaagccgccgccgccgccgccgccaccgacgccgccggcgaggagaagaaggaagaagccgaggagaagaaagaagaagaggccgccgcccccgccgacgagccagctgcagccgccggtgagagcgcacctgccgccgccgaggccgagcccccagtcgaggccgcagcgacgccggcggccgctgaggcggcgccggcgaaggccgaggaggaggaggcaccaaaggcctaactagctatagctagctagggttcatcgccgccattattgatggacgcctcaagccctagctagagagggatgatcgatgtcgtcgttgtgccatgtcaccagtcaccaccaccattctttgctcttacacatatgcatgatgatgcagatattccattattgttgttcattatttttctctaccatttcttcccctctttatggttagacgtgtaagcctataatttttgtctgtacttaaattaattatatgcagtgtgaggacatgt

SEQ ID NO: 489 - DNA, 1380 bp, Oryza sativa
  ref <308>: DATABASE ACCESSION NUMBER: AK058614
  ref <309>: DATABASE ENTRY DATE: 2001-12-06
ctccccccaaatcgaagagcgcctcctccacgcccctagggtttcctccccctcccccctcgcggcctctcgccggcggccgcccacctccggggatcctctctccggcgcggagcttcctcatcctgcccgtcgcccgccccaattgcccggccgccgcctccgccgctgctgcaagggaatcgcccggcgccgccgttcccccccgatcgtcgtaccgttggctggttgcgtgctgctgcgtcgatctcgtgggcgggtcacccggaggcggcattttagcggcgggactccgcgtggtacgcttccctttgcccttttagcgcaggcttgttttggcgattggtcacactgtagaaatcaaattccaagtgaagttgccaaacaattacctatctgctgttattgcttccatggcaaccaacgagaacctcccaccaaatgtcgttaggcaattggctaaggaactgaagagtcttgatgagtcacctccagaagggattaaagttattgttaatgacgatgacttcaccaccatttttgctgatattgagggacctgctggaactccatatgagaatggggtattccgtatgaagctattgttgtctcgtgactcccctcagtctcctcctaaaggattcttcttgacaaaaattttccatccaaatatagcaactagtggtgaaatatgtgttaacacactgaagaaggattggaatcctagccttggattaagacatgttctgctggtagtgagatgccttctgatagaaccatttcctgaatctgcccttaatgagcaagctgggaaattgttgcttgagaactatgaggagtatgcacggcatgcaaggctatacactagcatccatgcacttaaacccaagaataagaccaagagcgggactatttctgaatcaaccacagctctaaatgtggatcagtcaaacaatgctgtcagcaagaacacaccattgggtccagcagcattatctacctccactgcaaataaagcatttggctctaatttgcaggatcagaatgctgctccttctgatcctgccttgggagcatcagcagtacccaagaaggatgggctacatgctgtgaaagctccggttgagaagaagaagattgatgcgaggaagaagagcttgaagagactataagtaaaacagccttggaaaaactgaggctgttagttgtagctaataatctagatttcttcataagttccagatcaccagatgcatagtaaaatcgataataatgtgggggcatctgatgcaatatgaaacggcgtttgggttaaacagagaagaatgtgtgttgtgactgttggtgtaccatactgtctgtgcaatatcaattgttcgg

SEQ ID NO: 490 - DNA, 856 bp, Oryza sativa
  ref <308>: DATABASE ACCESSION NUMBER: AK058615
  ref <309>: DATABASE ENTRY DATE: 2001-12-06
ggttattgtgctccgattgattgtcctatgtatattcttgcactaccgtatcacaaatcctgtgcgtaatgcatacccgctatggttgctctctgtcatatgtgagatttggtttgctctatcctggattctggatcagttccccaagtggtccccaatcaaccgtgaaacttacctggataggctggctttaaggtatgaccgggaaggtgaaccatctcaattggctcctgttgacatttttgtcagtactgtggatcctatgaaagaacctcctcttgtcactgccaatactgtgctctccatccttgctgtggattaccctgttgataaggtatcttgctatgtgtctgatgatggagctgcaatgttaacatttgatgcgcttgctgagacttcagaatttgctagaaaatgggtaccgttctgtaaaaagtacagcatagaacccagagctccagagtggtactttgcacagaaaattgattacttgaaagacaaagttcaggcttcttttgttaaagatcgtcgtgccatgaagagggaatatgaagaatttaaagttcgtgttaatgctctcgtcgccaaggcacagaaagttcctgaggaaggatggattatgcaagatggcacaccttggcctggtaacaataccagagaccatcctggaatgattcaggttttccttggtcatagtggaggccttgataccgaaggcaatgagcttcctcgtttagtctatgtgtctcgtgagaaacgtcctggattccaacaccataaaaaggctggtgctatgaatgcacttgttcgtgtatcagctgtccttactaatggacaatacttgttgaatcttgac

SEQ ID NO: 491 - DNA, 741 bp, Oryza sativa
  ref <308>: DATABASE ACCESSION NUMBER: AK058616
  ref <309>: DATABASE ENTRY DATE: 2001-12-06
tattttgagataatagcttcatgcaccatgatacgtgactggaaaacagcaagtgagatgattgaatatttggattcttcgctctcatccatttctgttggaacactaaaccatgttttaaattttcttggaaaatgtgggaagacagagaacatgatgaagctgttttacaagatggtgacttcatgttctactgtgggtctttctacttatgcggttgttcttagaaatctcctagttgttgggaaatggagaaagtatattgaggtcttgcagtggatggaggactctggagttcatccaacactatatatgtttcaaaatgtccttccctatatctggagagaaaatggcatggattttgctgctactatgcaagaaaaaataagttcattgagagacaagcaaacgtgagctctcgatgtttacatctctctgatgttaagcaggaaatacctcggctttaaacacaggtcttccaacacagaaacgcctgcctccttcagtggtaacacatatgtgctgacaaaaagaaatttatggtatgagaactgttctgtttttctctctttgccttcttctttttctttctttttcgcttttctattcttaaatcaaagttcaaacaattctaggtgttattttttctgaaatttctggttatcgcccagaatctatttccaaaatgaaactgggaatccctggtttgaagtccattaggcccataactgaaattgttgg

SEQ ID NO: 492 - DNA, 357 bp, Oryza sativa
  ref <308>: DATABASE ACCESSION NUMBER: AK058617
  ref <309>: DATABASE ENTRY DATE: 2001-12-06
caggtgctaatggattttcatccaaagtttatggggaggttattgggacttcttcctattattattgagaagttcatgcgtaataatactggatttccagttttgcaataaaagaagatgtgcccgatcaacagctcagattatgatataacatcacatgctcttgccgatcaaatactgtgccctttccttctttgtcatggacagtatctataatgctgtcgccatgaaatgatctgaaaagtgctgttcatatagttgcatatgctcttgatgaagctgtggtagaacagtgtccttcctccatgtctgtccagtgttctgtatggaactaataatgaattggtgttttcaagt

SEQ ID NO: 493 - DNA, 947 bp, Oryza sativa
  ref <308>: DATABASE ACCESSION NUMBER: AK058618
  ref <309>: DATABASE ENTRY DATE: 2001-12-06
actagccgcacgcgtttggctgcttgctgcggttgctcgcactcctccacctccaaaggctccaacaagaacaagaacaaatccaagtgaggccctcgcccacccaccgactccgcggccaaattccggcgagatgttcgcgagcaggccggcggtgcacccggtggaggcgccgccgccgccggatccggcggagcagccgaggggggtgctgatgaaggacctgcccgggatgcccgggacggcgggggggctggggctccgcctcgcgcagttcgccttcgccgccgtcgccctcgccgtcatggcgtccaccaacgacttcccttccgtcacatcgttctgctttcttgttgcggcagccattttgcaatgtctctggagcttttcactagcaattgtggacatatatgcactgcttgttaagcgttgcttacgaaatcgccgggctgtttgtctatttgcaattggtgatgggatcacagcagcactgaccttcagtgccgcatgtgcgtcatctggcatcaccgtgttgattgataatgatctagacctatgctcggaaaatcactgcgcaagttttgaaagtgcgacagcaatggcgtttcttagctggtttgctctttcgccatcctttctattgaatttctggtcaatggcttctggatgaatgaaaaccaaagaggaggttagagcttgatttttgaatgtatcatgtgcccaattcaccaattgtggttagtgagaattggatagcgtgacgcagctaattgtattagagttgaaagctgatgtgcggtcttgggatcatatgtttctagtataactctgtaaaaaaagaataggggatggcctgttttgcaagtgttcaatgtggaactcagtaaaagtctcttaagcaaggtgctttccgtataagacttccagctggttgagtttttgtgtgc

SEQ ID NO: 494 - DNA, 254 bp, Oryza sativa
  ref <308>: DATABASE ACCESSION NUMBER: AK058619
  ref <309>: DATABASE ENTRY DATE: 2001-12-06
ggttgggtatggtgtatccagttgatgcgttctgatttttcgttttgtttttcatctttttgcacctgtaaatgtgggatcactagcactaaaaagagttcatgtcctgtactatacttgacatgcttgacgtgtaaatcatcagctcaaatggatgacaaaacatgatctggatagagtccagttgtgaagcaaaagtatgtttttcaaggatttcaaaattttcaatacaaagttgtatcatcttttctggc

SEQ ID NO: 495 - DNA, 1587 bp, Oryza sativa
  ref <308>: DATABASE ACCESSION NUMBER: AK058620
  ref <309>: DATABASE ENTRY DATE: 2001-12-06
gtgccacttctttggtttcatgccaaaagacaaggaggcctcaagatgtacatcatagaggacaaagggggtgccattgccctcatgctggcctccctcttcttcctggggacatggcctgcggtcctcaccctcctcgagcgccgaggccggctcccgcagcacacctacctcgactactcgatcacgaacctcctcgctgcggtcctcatcgcgctcaccttcggtcagctcggcgatagcaagcccaacatgcccaatttcttcacccagctcagtcaggataattggccttcagtgctgtttgcaatggcagggggtgttgtgctcagtatagggaacctctctactcagtatgcatgggcatatgtaggtctctcagtgactgaggtcatcagctcaagtatggttgttgtaataggcacaacactgaattatttcctggacaaccgcatcaacagagcagagattcttttccctggagtggcctgcttccttgttgcagtcattcttggctctgctgtacatgcctccaatgcagctgataatgaagaaaaactaaatggctccacaaatatctataaacttggggaaaatggaagtgtggaaccaaacaaagaagtcatagaaaaagatgctcccaaggacttggagaatggagcttctgcaaccaaatatgttgccaaagctgaagcaggaactgcggaatacttgattgagctcgaagaacggcgttcgatcaaggtgttcggatcaagcaccttcatagggcttgggatagtgttcttctcaggagtctgcttctcactcttctccccggcattcaacctcgccaccaatgaccaatggcacaccctgaaacaaggtgtaccacacctggtggtgtacaccgccttcttctacttctcgatctcgtgcttcgtcaccggcatcggcctgaacatcctgttcctctaccgtccaatggccggtgtgccgaaatcatccttcaaggcttacctgaatgactgggaaggcaggcagtgggctctcctggctggcttcctatgtggctttggcaatgggtttcagttcatgggtggtcaggctgctggctatgctgctgctgatgctgtccaggcattgccacttgtgagcacattctggggaatactcctgtttggggagtaccggaaatcgtcgcgaaagacgtatatcctgctcgggttcatgctgttcatgttcatcgtcgcggtcgcggtgctcatggcttcatcaggtcacaggagcaccaagtgattgattcaaatcctttcatctcttgccttaatttggtgtttgcaagcgcaaaccactcttgctgtcagaaaacaaagaagttcaggcagcaatgcagggggggacttcagtccaggtctccaggaagcagatcatgccaacatggaatgaaactccattcatgaaatttccatttggatggagctgtacataaggggaaaaaaggaacaaactaagatagtttgtggatttgtgattttaagtttgtgtcagattatataaatgtaatgttatccctttctctgaattctaaaagacccatttgcagat

SEQ ID NO: 496 - DNA, 321 bp, Oryza sativa
  ref <308>: DATABASE ACCESSION NUMBER: AK058621
  ref <309>: DATABASE ENTRY DATE: 2001-12-06
ctgagctcgatcgatcgatcgatcaagaagacaaattaacccttgttgtgatatgcgatttgtgcgtgtgtgttgtctgtttcgatcgtgatgttttctgcgtgtttatttcgtgatgttctctcatcgcgcccgcgcgcggttgggtacgatccgggacacctacgtagcactgaatccgtctctgtgatgcattcagagaataagtccgaatatgtgcggccttgttaatgttttcatgaataactcgtgtagtgggattactttgtcatcggacatttcatgatttccgatgcacaccttggctatgttcttcccccc

SEQ ID NO: 497 - DNA, 1211 bp, Oryza sativa
  ref <308>: DATABASE ACCESSION NUMBER: AK103989
  ref <309>: DATABASE ENTRY DATE: 2002-08-28
atccgctgcctgcctccatagctagcccactcgagcccttcaacttctcgcccaagttttgaagggatccagcgccgccgccgccgcgatggagcacgccgtcgttgagggggagtccttctcgcccgactgctccaccctcctcatgccggcgctctcgatcggcaacgtggggcagctcgccgtcgacctgctggtgtcttcgtcgcgcgcgaggcgggtggcgtacctcgacgagccgtccgtgctgccctgcgccggcaacgacgccttcggccccgacgccgtcggtgatctcgcgctcgcgctggaagcttatgaatctccatcccataggctggccttcatacagcaacggtccccaattattacagggatggtggtttcatttgcaaaaaatgttgctaattttataagcagcattgaaaaagaccatgttgttatcctttcaagtttagattcaggcaagagaaggataattgatgcatccagtgatatgcaagtatattacctttcaagttgcaacgaggacggttctgatccgaaatgtgagaacttaggctggaagaagcttgaggaatacgatccatctcagcaaaggtggaagtgtcttgctagcctagttgaaggtggtcatctttcagaagatatgactggtgatcctgaggagatgacgataaatgattactactcgagcttgccatttgcagcactattctctgcctgcaaggctaaaggcttgaaagttacttgtgtactatgctactgctcagaaggggacaatatgccagaatctttccagttggctgaggcagcatgcaaacttgttgctcaaggccctgaacagttccatggaaatgggtccaatggatggactattccattgtcctggaaatcagtatatggaccaccacctgacctctctattttctagacttgaagacctatctagtgaggttgctatcatgagcactatttaggattgaggatgttgaacttttagcatgagggttgaggggttgtgcaagaagtctccaggaaggtgatgagtatcaaatggtttaggtaaagcgacaaaagtgtaattccagttttcttgctgaactcgtggcttgattgtacttattttttttaagatcctgttatccggctatattgtaagggtatgattgtacttgaacctacaattgattagctggaacgtttatgtg

SEQ ID NO: 498 - DNA, 1026 bp, Oryza sativa
  ref <308>: DATABASE ACCESSION NUMBER: AK058622
  ref <309>: DATABASE ENTRY DATE: 2001-12-06
tcagaggatcaacttgggggagacggtcctcaatatgaaggcaatgggaataaacgatctactgtcatttgacttcatggaccccccagctcctcaatcactcataactgcaatggaacaactgtacaaccttggtgccttagatgaggagggtctccttacaagagtagggagaaggatggcggagtttccacaagaaccaccactttcaaagatgctccttgctagtgtggacctcggatgcagtgatgaaatactgaccatcattgcgatgattcaaactgggaacatattctaccggccaagggaaaaacaagctcaagccgatcggaaaaggggcaactttttccaaccagaaggggatcacctcaccctgctcaccgtgtatcaggcgtggaaggcaaagcagttttcaggtccatggtgctatgagaattttgtccagctaacatccctgaggagagcacaggatgtcagaaaacagctccttgagattatggacaagtataagcttaacgttgtctctgcagggaatgatctcaccaaggtgaggaaagccatcactgctggcttcttcttccacgctgccaggaaggatccccagggaggatacaggaccattgctgatcatcagcaggtgtatatccaccctgccagcgctctcttccagcagcaaccagagtgggttatctatcatgaagtcgtcatgaccacaaaagagtacatgagggaggtgacagccattgacccaagatggcttgttgaactggcaccgaggttctacagatctgcagacccaacgaagatcagtaagcggaagcgccaagaaaggattgagcctctgtatgacagatacaacgagccaaactcatggcgcctcagcaagcgccgagggtaatttgtctgtatatagtttttacttccactatagctgctctttatgcaatgtaagctgagtacttgtatgtaagtgtaaatatactctgctgataagttccaatacatattgggatattaagcttgacc

SEQ ID NO: 499 - DNA, 871 bp, Oryza sativa
  ref <308>: DATABASE ACCESSION NUMBER: AK103990
  ref <309>: DATABASE ENTRY DATE: 2002-08-28
aagcttttattggccttactgctggagctattggagcatgtgttggtagccctgctgatttggcactcattaggatgcaagctgattcgaccttgccaattgcacaacgccgtaactacaagaatgctttccatgcgctctaccgtattattgctgatggaggtgtccttgccctttggaagggagcaggacctactgtggttagagctatggccctgaacatgggtatgcttgcttcctatgatcagagtgttgagctattcagagacaaacttggtgctggagaagtttcgactgtacttggagccagtgctgtttctgggttctttgcatcggcctgcagtctgccttttgactatgtgaagacacaaatccagaagatgcaacctgatgccagtgggaagtacccgtacaccggttctttggactgtgccatgaagaccttcaagagcggtggcccattcaagttctacactggcttccctgtgtactgtgccaggattgctccccatgtgatgatgacatggatattcttgaatcaaatccagaagttcgagaagcagattggaatataaggtcttcagttggaggttaatatgcggagttatcatttgctcgagtggagataataacgttccagctgcttacactatcggtagttggttttggtagacaaaagtttaaaccaagttatcctagcttaaatgttgccgtggtggtactattgtgtcttttacaataatcgaatcatttgttgtaactggggcgatttttttggggtggacatactttatttttgttggctgggactcagccatgaggggggatacttcctgcttgcgccattgaattaaatgggaccatattttat

SEQ ID NO: 500 - DNA, 1243 bp, Oryza sativa
  ref <308>: DATABASE ACCESSION NUMBER: AK058623
  ref <309>: DATABASE ENTRY DATE: 2001-12-06
ctgtttggactgatggacttaccagtcttgatcgttacaaaggccgatgctatcacatcgagcccgttgttggggaggataatcaatatatcgcttatgtagcttatccattagacctatttgaagagggttctgttactaacatgtttacttccattgtgggtaacgtatttggtttcaaagccctacgcgctctacgtctggaggatctgcgaattccccctacttattcaaaaactttccaaggtccgcctcatggtatccaagttgaaagggataagttgaacaaatacggtcgtcctttattgggatgtactattaaaccaaaattgggattatctgcaaaaaattatggtagagcatgttatgagtgtctacgcggtggacttgattttaccaaagatgatgaaaacgtaaactcacaaccatttatgcgttggagggaccgttttgtcttttgtgccgaagctatttataaatcacaggccgaaaccggtgaaattaaggggcattacttgaatgcgactgcaggtacatgcgaagaaatgattaaaagagctgtatttgcgagggaattaggggttcctattgtaatgcatgactacttaaccggggggttcaccgcaaatactagtttggctcattattgccgcgacaacggcctacttcttcacattcaccgagcaatgcatgcagttattgatagacagaaaaatcatggtatgcatttccgtgtattagctaaagcattgcgtatgtctgggggagatcatatccacgctggtacagtagtaggtaagttagaaggggaacgcgaaatgactttaggttttgttgatttattgcgcgatgattttattgaaaaagatcgtgctcgcggtatctttttcactcaggactgggtatccatgccaggtgttataccggtggcttcagggggtattcatgtttggcatatgccagctctgaccgaaatctttggagatgattctgtattgcaatttggtggaggaactttaggacatccttggggtaatgcacctggtgcagcagctaatcgggtggctttagaagcctgtgtacaagctcgtaacgaagggcgcgatcttgctcgtgaaggtaatgaaattatccgatcagcttgcaaatggagtcctgaactagccgcagcttgtgaaatatggaaagcgatcaaattcgagttcgagccggtagataaactagatagctagactaagtggat

SEQ ID NO: 501 - DNA, 1203 bp, Oryza sativa
  ref <308>: DATABASE ACCESSION NUMBER: AK058624
  ref <309>: DATABASE ENTRY DATE: 2001-12-06
cttgaaggaggtggcgcaaagaatataaactttcaagagttagcagcagatctagcacagataacatttgattacccattcaggatacctccgtactttgctttgattatcagagccattggagtattggagggtatagctttggtgggtgaccctgaatttgccattgtggatgaagcatacccatatattgcgcagagactactaacagatgagtcacctcgtctaaggagcgccttgcgatacacaatatatggcaaaacaggtgtattcgacgcagaaagattcattgatgtcatgcaagctttcgagaattttattcgtgcagcaaagagtggtggtggggagaacttgaaaggcagcatggctgagctggctgagataggaactctaccaagcacaagtttagttcctgcatttccaatggccatatcacagcctgagcaaccagtcaaagctcgggctgctctttcttttctactctctgagaggggcgacttttttagggagttcattcttgatgagattgtcaaagccatagatgcagtttcaagggagcaactgatacaaattgctgcatcttttgggctaggaaatgctaccccagttttcagcatggttcctgtcagagctagagcactgcttcctacaatcacagaggaagacagggtcatcttgaacaatgttgagaaggttgtgaagtttttgacagctgggaacaatccaacaacaattgatggggatgtaaatgttgtgtatcttgtacaagagcttctacctgtgttgccgagcatttcgtcgaagatcctaccagaggtcatgagccggttgtcatcgcgagtatttgcacggttgatccgggaggcatttttgtgaagtgatttttcttacttccgacgggagattgcaaacagttatttctcccttttttgcaaacaatacatcacaaatgatgatagaactcatagaagattgtacagctaaacgttgtatagaaattatacacatatacgcagatttaaccaatttttaactagcaattttccagtgttaatggagactacagagcctgcagtttcattgtgcgtacatggatcaagttgctaatttaaccctttttttgttagcgttttcgtcagaacggagtatcacttgtatatgcaaattaaccaatgtttatatagcaattctatgactttgctg

SEQ ID NO: 502 - DNA, 425 bp, Oryza sativa
  ref <308>: DATABASE ACCESSION NUMBER: AK058625
  ref <309>: DATABASE ENTRY DATE: 2001-12-06
gaaaatgcctcgagccgaggtccgagtaccaagcgctgcagcgctgaagtatgagccccgtggactagccattgcttctccacgaggctcataccaggcgctacggcgctgaagtatgtaacccatgccatactcccaggaaaagctcgaacgaccttcaacaaaggggtacctgtacccgaaaccgacacaggtgggtaggtagagaatacctaggggcgcgagacaactctctctaaggaactcggcaaaatagccccgtaacttcgggagaaggggtgccccctatgatcaaaatgagttgttcatgttttagaaggctgtgtgtttctccattttagtttagatttgagaaggttctaggtttttcctttaaccttttcactctgtttctcgcccaacataactcagtttttctccttttc

SEQ ID NO: 503 - DNA, 1393 bp, Oryza sativa
  ref <308>: DATABASE ACCESSION NUMBER: AK058626
  ref <309>: DATABASE ENTRY DATE: 2001-12-06
gtgcgagatcgcgaccacgtagtgcggcgctcgctctcgctctcccccgcggcagagtcaggcgccgcccggcgaagcgcgaggcccgcggagcaatggatttcaaggggttctgggagtccagattcgggggcaagaaggagcaggagccggagcagaacgggcacgccaatggggtggcgaacgggagcgtcaggaagaggacgtccgatttggcggtctacgagcagttcgagcagcaggccaggcagacggaggtgcgcgccgcggcgattcgcgatgggaatgctgatgcgatccagaagcccctcctaccttcgtttgggtcagctgaaatgcgtaatcttgcagagacattgttgcgggacattattcgcggcagtccagatgtgaaatgggaaagcatcaaaggactggagaatgccaaacgccttctaaaagaggcagttgtcatgcccataaagtatcccaaatacttcactggtctcttgtcaccatggaaaggcattttactttttggtcccccaggaactgggaagacaatgctggcaaaggctgttgctactgagtgtaaaactacattcttcaacatttcagcatcatcaattgttagcaaatggcgtggggattcagagaagctagttaaagttctgtttgagcttgctagacatcatgcaccatcgacaatatttcttgatgaaattgatgctattatcagccaacgtggtgaagctcgcagtgagcatgaagctagtcgacgcttgaagactgagctactcattcagatggatggcttgacaaagacgaacgacttggtatttgtacttgcagcaacaaatttaccttgggaactggacgcagctatgctccgccggcttgagaaacggattctcgtacctcttcctgaggctgaagcaaggcatgctatgtttgaggaacttttgccatcaactacctcaaagctagaggttccatatgatactttagttgagaagactgaagggtactctggttcagatatccgtcttgtgtgcaaagaagctgccatgcaaccactaagacgtcttatgtcagttcttgaagccagagatgagctggtgcctgaggaagaattgcccgaggttggtcctctcaaacctgaagacatcgaagttgctttgaggaacacaaggccgtctgcgcatctccatgcacatcgctatgagaagtttaaccaggattacggaagccagatccttagtcaggagcaagcctgaacttctcaaagttcagacataccattttcaggacgcaacattttttctgcagcagtctaagttgtgaggcgaacgttacaaacggatgttgctgctgcagcagttatgaaataaatagcatcatgaatatcgaacgc

SEQ ID NO: 504 - DNA, 554 bp, Oryza sativa
  ref <308>: DATABASE ACCESSION NUMBER: AK058627
  ref <309>: DATABASE ENTRY DATE: 2001-12-06
acgaacgagcatgagcagcaagcggtgacagagcagatcacgcgagcttgtcgccaagggggggaggaagagaagtgagaaatccgcgccaagaagcgagagaggtccgcagctggtgtcgtctggtgctgcgggtatcgtcgctgccatggcggatcagtcgaacaacatgatcatcgaggaggtcaacaagggcctgaaccctggaacgatagtccttcttgtggttgcaactctcctgattcttttctttgttggaaactatgcgctctacatgtatgctcagaagacgcttcctcctcgggagaagaagccagtctccaagaagaagctgaagagggaaaagctgaagcagggggtttctgcacccggagagtgaagagattcgtcagtttaccaatgttactgattttatcctgagcttcttttgcatgataagaattatcagctggagcggcagtgtttacagtaactatgttatgtagaagctttgtcctaagtggtttacatttgtattagacgccttatttgagcaatctgttgaacagcactgc

SEQ ID NO: 505 - DNA, 793 bp, Oryza sativa
  ref <308>: DATABASE ACCESSION NUMBER: AK058628
  ref <309>: DATABASE ENTRY DATE: 2001-12-06
gtgtgtgtgccaaacacgacgatggatcgatcgatggctcggcgccggcgcggcacctcgttcacggcgagctggcagctgggactcgccgtggtggtcgcggcgatcatggcgtcctcggcgcagccgcagcagcagcagcagcagcctccgcagccgcccggtcagccggcgaacgcgccgagctgcccgccggtgcaggcctcgctgtcgccgtgcgtcagctacttcatcggcaactcgtcgacgccgtcggacgcgtgctgcgagcagatgcgggccatgttccagtcgcaggcgccctgcctctgcgccgccgtggcgtcggcgccgtccccgctcgcgccggtgctcggcggggtgcagtcgctgctcccaaccgcctgcaacctgcctcccaatgcctgcgcaggtaagccgttcgttcgtgccgtgccaatacttacttgtggactgaactcgcgtacgcatggagtgatcgccgtggcgggcgtggtgtttgcagatgcgacagggtcgacgtcgggctctgctccggccggcggctcgtcggcgacgccgtccacgggggcaactgccgccgcgccggccatggagcccgctggcatggacccggcgatgactgcaggtggtggatccaagtcagtgccgggtatgccgtactcggcggccgccggagtccatggtggtggcgcctctgctgccgtcgccgtcttgatctcctccatgcttgcttatgcttgtatgatctgagatgcatggctggtcttatatacacacgtccattgtgatt

SEQ ID NO: 506 - DNA, 660 bp, Oryza sativa
  ref <308>: DATABASE ACCESSION NUMBER: AK058629
  ref <309>: DATABASE ENTRY DATE: 2001-12-06
attcgaaaaggcactgttcagcggaacaagataaaatcttctgtgggtggttagtggtgtagctagaaacatcaacaagagcttgctgctacatgttttgagcaacaaaagcccttcaatccagtgcttggagaaagcatgagaggatatttgttcaagtcataagcttggtttctctggcatttgcccattcggcaatgttcattagtatactacagaagccctcatatcactggtgttatcagcagtaaatgtaagagagaacagtttgttactcttgtatacctgtacatacatatcatatggaggagatagattcaaacaggagtgagagctgatgataatccacaattatatgatgcaaactagtggtacaatatgtttttcatttgattcaggacaaaaaacttaaatacgaatatcctcacttcatagacgcttccgatgcatcatagttttgcattggtgctcgaccgctagttgctcacgttagggcatttgagtgtaacataatgtctctccggtgttgttactaggtcggctgggtgagcaaaattctttcgcgataggtgcgtattagatgctagtgcagtgtaattaagaactgaacattgtacatggaagctcatgtcccaagtgatagtaaaataaaaggcacgc

SEQ ID NO: 507 - DNA, 1918 bp, Oryza sativa
  ref <308>: DATABASE ACCESSION NUMBER: AK103991
  ref <309>: DATABASE ENTRY DATE: 2002-08-28
tctgcatccgcttgcccgccccattcccccgtccaaatccaagcagccggcggcgggtgcggttcggtgaatcgaatcgtgggcaaattgttttgttccattccgctgctgcgtcctgctccgattcagttcgtgcgctgtcgataaaaccgatgcttcgccccgcgaaccctagctcggggtgctgcggcggcggcggcggcggcctgtagactgtagtggtggctgtgggacgcgagggtcgctcgccatgccgtggctggagatgtggctgccccccgcgggctcggggggaggaggagaggggatggcggcggggctgttcctcgacggcgaggcggcgcacggcgcgctcctcgcggcgatgcccggcatctccgcgtcgttcggcgtgcggcagcggcggccggggttcgtgtcgctgacgatgtcggtgaaagggggcagggggttcgtgagtggcccggtggggctgctcgcgagcggggaggagaagggcgcccgggcggaggaggcggaggcgctggtcgcggggaggagggcgacggaggaggaggtggcggaggcgtcggaggggaaggtggtcgaggaggtgaaggaggctcgtgctggtgcgggcgccatgaacatgacgaaacatttatggtctggagccgttgctgctatggtatctagaacagttgttgctcccctcgagaggctaaagttggagtacatagttcgtgctgagcagagaaatctatttgagcttatccatgccattgcaacaacacagggtttgaaaggcttttggaaaggaaacttcgtcaacattctccgtactgctccattcaaagccgtcaacttctatgcatatggcacttacagaaagcagttgctcaaatggtctggcaatgatgaaacaacaaactttgaaaggtttatcgctggtgctgctgctggtgttacagcaacgatattgtgtataccaatggatacgattaggacaaggatggtagctcctggtggtgaagccttaggaggagttattggtgttgcccgccacatgatccagactgaagggttcttctctctgtacaaaggattggtaccttcactcatcagcatggcaccctctggtgctgtattctatggagtatatgacatattgaagatgggctacctgcattcccccgaagggaagaggagggtatcaacgatgaaacaacaaggtcaagaggcaaatgcattagatcagcttgagttgggcacagttaggaccttactatatggtgctattgctggttgctgtgctgaagcagccacatacccatttgaagtagttaggagacagctacagatgcaagtcaaagcaacaaggatgaatgcttttgcaacatgccttaaaattgttgatcaaggtggagtaccagcactctatgctggcttgatccccagcttgctacaggttctgccatcagcgtctatcagttatttcgtatatgagttaatgaagatagtcctgaaagtggaatgaatgcaaattaattcttgagcatgcacatcaagttcaagaagcccagctcacattaccttgacaaaattcaagtaaacagcgcatttagatctgtttttgtagcatttcttcacggaagcttcaaaggccgtgggagtaactttatcttggccaaagcctgaagcattgttcgctcgaagcttttcaccacaagattaccttatacacgatgaggtcttgttcgacatctgattcgatcaccgatctgttgcagattgatctgtcatagcaaaaacatatgggcttcttgcccttcagatttcaattaacaaattttcaacttttcatttttgatgtattgatgcatcgactggaaaggaaagtgggtttgctacttgctacaacctgcaaagtggcatgttg

SEQ ID NO: 508 - DNA, 599 bp, Oryza sativa
  ref <308>: DATABASE ACCESSION NUMBER: AK103992
  ref <309>: DATABASE ENTRY DATE: 2002-08-28
aatgcgtagtggaagacattccaccagaggagcttcatgcaaaaatgcaagatcctaactttcttgaagaagctcagttgattgatgttcgggagcctgatgaagtagataaagcttctcttgaagggtttaaagttctacctcttcgacagtttggaacttggggaccagttatgacagatgaatttgatcctcagaaggacacttatgttctgtgccaccatggtatgcgctcaatgcaggtagctaaatggctgcaatcacaggggttcagaaaagtttacaatgttgcgggtgggattcacgcttatgccgttaaagccgattcttccatcccaacttactagacatctccatgatcaccaatgcaacgtcagagccttttctacgtgttcgtttttcaggccaaaccaaaagcatgcttagtatagaatgataggattttccacgatgattttgtacggaatatcggtaccagaaattcagagttaagttttgtcgttctcatgctgctgtcatgtactagcagttctcttgaaattttatatggaggatatatcacttttattagtttgaatacaagggaaatacctgggagg

SEQ ID NO: 509 - DNA, 604 bp, Oryza sativa
  ref <308>: DATABASE ACCESSION NUMBER: AK058630
  ref <309>: DATABASE ENTRY DATE: 2001-12-06
acccaaacgcctcaccacctgtttgccgccgccgccaccgccacttcgccggaaccctaaaccagcccggcctcctcccatggcgccgaagaaggacaaggccccgccgccgtcctcgaagccggccaagtccggcggaggcaagcagaagaagaagaagtggagcaaggggaagcagaaggagaaggtgaacaactcggtgctgttcgacaaggccacctacgacaagcttctctccgaggtgcccaagtacaagcagatcaccccctccgtcctctccgagaggctcaggatcaatgggtcgctcgctcgacaggccatcaaggatcttgagtcaagaggcgccatcagggtggtgtctgtacattcgagccagctaatctacaccagagccaccaacgcttgaggcataagctttcactaaaaaaaaagcttgggacataatcagtctagactcgcaaccaaaaaaatcgtattgtacgatctttgttgatcttgagatcctgaagaaaaaaaattgggagttctgattcccatgacaattgcaacatgaaattgcttatcttcactgaaattcaatgttcaacaagctggctattttatt

SEQ ID NO: 510 - DNA, 1357 bp, Oryza sativa
  ref <308>: DATABASE ACCESSION NUMBER: AK058631
  ref <309>: DATABASE ENTRY DATE: 2001-12-06
atccgcatctaaccagtaagcagtgtgcactgtgcagaaagctaggaaaagcaccgaagcagtcagccatggcaccgtgcaagaaggtgctgatgctgtgcggcgactacatggaggactacgaggccgccgtgccgttctacgcgctcgccgcgttcggcgtcgccgtcgactgcgtcgcgccggggaagaagccccccggcgacgcctgcctcaccgccgtccacgagttcctcggccacgacctctacaccgagctcccgggccaccggttcgcggtcaccgccgacttcgccgcggccgccgcggctgacgcgtcgcgctacgacgcgctcgtcgtccccggcgggaggttcgtcgagcggctcagcgtggacccgctcgccgtgtcgctcgtcgcggcattcgccggggagggggagacggcgacgcgcaggcggccggtggtcgtgacgtgccatagccagctgctgctcgccgccgcgggcgccatgcgcggcgtcaggtgcacggcgttcttcagcatgcggcgtgtggtggagctcgccggcgggacgtgggtggagcctgacccactcggcctctgcgtcgccgacggcaacgtcctgagcgccatcggctggcccgcgcacggcgagatcatcagggagctcctccgcgccatgggcgcccgcgtcgccggcggccgcggccaggccgtcctcttcctctgcgccgactacgtcgacgactacgaggcgaatgtgccgttccgtgcgctggccggcgtgggctgccgcgtcgaggcggcgtgcctgacgaagcgcaagggcgaggtgtgcgtcacggcgatctacgacgccaccccggcggcggcgagcgacgagaggcgcggccacaacttcgcggtgaccgcggactggggcgacgtcgacgccgaccggtacgcgtgcgtcgtcgtgccgggcggccgcgcgccggagcttctggcgacgcgcggcgaggccgtggcgctggtgcgcgagttcgccgggaaggagaaggtggtcgccagcatcgaccagggccacctcctcctcgccgcggtggggctcctcgacggcaggagctgcgcgagcggcgtcgcgacgagggtggtcgccggcctcgccggcgcggcgagcgtccggcacggtggcgcggtcgccgacgggaagctcgtgacggcggcgagctggcctgacctcgccgagttcatcgctcacatcatcagcctccttggcatcactgtctcgttctgaagtgaagcagcactgcactatgcttctctgttctctctgtcatgagtagtactggaaaattgtcagattgacattagagaaattttataatctttgag

SEQ ID NO: 511 - DNA, 329 bp, Oryza sativa
  ref <308>: DATABASE ACCESSION NUMBER: AK058632
  ref <309>: DATABASE ENTRY DATE: 2001-12-06
gctttgctcttgctgatttctctgtttcgtttctgcagctgcccatgcctcgacagccgagctgagggatagacgaacaagtgcggcggcgggcgtgaccgtaaattcgatgggaaaattgaagcaaatttgcttggagtgataaggctcggatctgtgtttgtgttgcaagttttgctaatagatgtttgtaactgaaggttgcttctattcatttgtataccaattgttcattcgtatcatcagagtgcgaattcgatgaaattgtccattccaatccggcatgccttttctccttccttgaaagaatattctgctccattgctggc

SEQ ID NO: 512 - DNA, 509 bp, Oryza sativa
  ref <308>: DATABASE ACCESSION NUMBER: AK058633
  ref <309>: DATABASE ENTRY DATE: 2001-12-06
aagctgagcatgaagctttgcagacaaggctagaggcttcaaataatgttaacaagttctcttctagccaaaggaatatgcagcttagtgacaggcaactaagattatcatcaaacgagtcatctgggagtcggcaaaactcgttatctggcacagtgaagaaccaaaatggtcaaccaaccttggagtctgaaaagcgtagccctgacaacaactcacaatcaaaaagtctggaagaacaataaatttgtgatttgtgtcaactccttagcacctgcttcaacagcttgtcagcttcgttgtgtagtgtactgaggactcaggttttagctgtagatagaagaattttggacctgtaggcttacgtagtgacttgagcatagggcattgctacggaatgtatttcgtatgttgtaaagggatgggcatgagcatagggcattgctacggaatgtatttcgtatgttgtaaagggatattttctttctcaagttttccagatgcacccc

SEQ ID NO: 513 - DNA, 1513 bp, Oryza sativa
  ref <308>: DATABASE ACCESSION NUMBER: AK058634
  ref <309>: DATABASE ENTRY DATE: 2001-12-06
ctccagtacgctcgcaatggctgcttcgtccggcgaatggctgagccgggcagctatggtgttggtgctaggtctcgtggtggcgtcgtcagctaaggcgggcgatgtggacatggtgttcctgaagagtgcagtgagcacgggagcagtttgcctggatgggagcccaccggtttaccacttctctcctggttctggctctggtgccaacaactggctggttcatatggagggaggaggttggtgcaggaatgcccaagagtgttctgtcaggcagggtaacttcaggggctcttccaaatttatgaggccactatcgttttcagggataataggtggcaaccagagaaacaatcctgatttctataactggaacaggataaaggtcagatattgtgatggctcatcatttactggcgacgttgaaacagtagaaacttcgacgaacctccatttcagaggggccagagtttggaatgccatcattgaagatctactagcaaaggggatgagcaaagcacaaaatgctcttctttctggttgttcggctggaggtctggctgccatactgcactgtgaccaattccgagatctgcttccagcaactgcaaatgtgaagtgcttttctgatgctggtttttttgttgatggaaaggatatcaccgggaatgattttgtcagaacattctacaaggatgtcgtaaatctacatggatcggctaaaaatttaccatcttcatgtacgtcaaagatgtcccctgatctgtgtttcttcccgcagaatgtagtgccaacattgcgcacaccgttgttcatacttaatgcagcatatgatgcatggcagatcaagaacgtcctagcacctagtgccgctgacaaaaagaagacttgggccaaatgcaagcttgatataacagcttgctcctcaagccagctcacaaccttgcaaaatttcaggacagattttctggcagctcttcctaaaccagagcagtccccagccaatttgagcatattcatagactcatgctatgcccactgccaatctgggtcccaggatacatggctcgctcaaggttctcctgtagttgagaagacgcaaattggtaaagcagtaggagactggttccacgatcgggaagtatcccggaggattgattgcccttatccctgcaacccaacctgcaagaaccgtgatgatgattaagcaattcgacctgaaaacttctgttaaattctagtactgtgttgttaaatatcaagtgaagcaataagggattagtctatagatagagccatagagaggtgttactgttacccacgatttcttcaattcttctccattctgtttctatgcctttgtcgacgatgaatcatgaacatatagttcagtaagctcaaaatttctctgttcatctctaatgagaacccaacaaaggaacagatgcagtaaccttgcagatttgcctgtaaaacgtgttgccgttggcacacctagcagaaattggaccgc

SEQ ID NO: 514 - DNA, 383 bp, Oryza sativa
  ref <308>: DATABASE ACCESSION NUMBER: AK058635
  ref <309>: DATABASE ENTRY DATE: 2001-12-06
atgagccaacctgttgagggtttctaccggcaacaggggaagcttttagaatttgatttgcctggaggaatccctgagtcttggccaaagctgctccatgttctaaatctcgaggaccaagaagagatgaagctggccactgcgtaaggccatggggctggctttacattgggccaatgaatttacacaccgcaattttgaataatggaaaaaagagcaaaaacttattccataatgtgtgcgtttgtagaattaaagtttgaccaaaagtgattcattttcgccggtgttttgatgagccggtacactgtaactgtcatgttgagatgttaatcttaatttcttgttttgatttagcctgctgagaacaggacttcatcagg

SEQ ID NO: 515 - DNA, 1226 bp, Oryza sativa
  ref <308>: DATABASE ACCESSION NUMBER: AK058636
  ref <309>: DATABASE ENTRY DATE: 2001-12-06
cttcttcctctgatagatagatcttcttcttcttcttcgcgtcacatttggatcttcttcatcttcatctgagagagatcagggcggggcggcaatggcgttgaagagcagtagtacgatggagctggtgtcccgcatgtcgaagagcatgagcgtggccaacaacatcctcgccgtgcacgtcccccgcctgcacgccctacgcgccgccctcgacgggatccaggacgagccctcccgcgccgacctctcgtcctcctccgccgccaccgacgcctgcaggctcatccgggacaccgccgctggcctcacccacgccacgatccacctccacaacgccgcctactacctctcctccgtgctccgcatcgcgctgcgccacgccgacgccgacgcctccaccgacttctcctccaagctgccctcgctcgccgccaaccccttcccccgcctcgccgcccacctgctcgcctccatccccacgccgccgccgcagcccaccgcctgcaccctcgacgacgcgttgctcgcggtgtccgtcgtccacaacacgctcgcgctcctcctcgactacaaccttgagaggtgcatcctctacctccgcctcctcggccgccgcaacgaccccaatctccatcgccacaaccgcctgccgctggcccgcgaccgcctccgtgccgcctgcgtcatgttagacttcgccgccgcctactgcaacgtcgccgccaacgccatcaacgcccactacatcaagcttcaaaacgaggccagcttgattttcggttacacctggaacctaccctgatcaatcgtcttcttttctctcctcttctccgtcgatctacgtacagctggatcgaggagagggaggcgaattgatcgacggatcatcaattgaacagcttaaggatccccagcttcttattaattggtccaattcaggctcaagcccggccgcttttctttttctaatttcttttcccttcttatcatctgcgctgtgtctggttcatcgattgatccatcatcaggtggtcaatctggagtagttagtatactagtagcagtaattctgagtcttttggactgcacgactacttaattttggagtatccatccagcttttaattaccaagcagtactacaaacctgtctttggagtagtagacaaagaaaaagttgtaggtagacgggcagatcaattacattctacgcctgttatgatc

SEQ ID NO: 516 - DNA, 1119 bp, Oryza sativa
  ref <308>: DATABASE ACCESSION NUMBER: AK058637
  ref <309>: DATABASE ENTRY DATE: 2001-12-06
aatccttactgcaagcggcaaagccctcctcttcagctcttctgacggaaaagaccacagcgatggccaattacacatggataatacaatttaagtagtgcacgttggcaatgccaaatcaagagatgcaattgcactccacccaaccctacaaatatccacccgcagcttagctcgatccttgcccacttcaaagttcaaacaacaaagccgtcctcttctgaccaaaaagaccaaagccatggcgccttccctcgccacctcttccaccctcgctctcttcctcctcgtcgccgtctccatcgccgacgccgcgacattcgccatcaccaacaggtgccagtacacggtgtggccggcggcggtgccatcgggcggcggcacgaagctcgacccggggcagacgtggaccatcaacgtgccggccgggacgacgggcgggcgcgtgtgggcgcgcacgggctgcggtttcgacggcagcggcaacgggcagtgccagacgggcgactgcggcgggaagctgcggtgcacggcgtatggcgcggcgcccaacaccctggccgagttcgcgctgaaccagtggaacaacctcgacttcttcgacatctccctcatcgacggcttcaacgtgcccatggccttcctccccgccggcagcggcgccgggtgccccaaaggcgggccgcggtgcgccacggccatcacgccgcagtgccccagcgagctgagggcgcccggcgggtgcaacaacgcgtgcacggtgttcaggcaggacaggtactgctgcaccggatcggcggccaacagctgcggcccgaccaactactcggagttcttcaagcggctgtgcccggacgcctacagctaccccaaggacgacgcctccagcacctacacttgcccggccggcaccaactaccaggtcgtcttctgcccatgatcgaacgcgcgcgcgcgcgcgcggctgatcgatcgatctctgatgatcttgggatttgtatgatcgatgcatgtgtggatgtaaccgtgatatacgtacctaagaataagtttgcacgcgcaaacgaggataagtttatgttatcgatctttgaataagtaaaaacaactgggtttatg

SEQ ID NO: 517 - DNA, 1230 bp, Oryza sativa
  ref <308>: DATABASE ACCESSION NUMBER: AK058638
  ref <309>: DATABASE ENTRY DATE: 2001-12-06
gtctcctcttctcgcttcgccttctcctctccttgtccttgacctcccctgctccgccgcgccgcagagcgagcggccatgaccaaggtgcaccccaacgtcgcggtggtggcgccggcggtggtggagggggagaagggggaggcggtgtcgctgacggtgtggcggcggtcgctgctgttcaacgggaaggggttcacggtgttcgacggcaaggggaacctcgtgttccgcgtcgagagctacgccggggggtcgccgagggaggtcgtgctcatggacgccgacggccgcgccctcctcaccatccgccgcaagaagctgagcttcgcggacgagtggctcatctacgacggcgacgcggcgtcgccggcggcgccggggccgaagaggttcacggcgcggcgccacgtcagcctgcgccccaccaagtccctcgcccacctgtcgccggcgcgcgcgtcgtcgtccgccgccgccggcggcggatcggcgaccgcgccgagcggcgcctgccggtacgacgtggagggctcgtacgccgcccgctgcctcgacgtgttcgcctccgccagcgccggcgagcagcggcggcgcgtggcggcggtgtgcagtaaggaggccgccgtgggcccggacgtgttccggctggtggtggagccgggcttcgagccggcgctcgccatggccgtcgtcatcctcctcgaccagatgcacgcctcgtgaaagcttcgcgcgccctccccctgccgctgcacgaatctcaaagctccctgcaccacagctgtgtgccacaaggaacaaaaatctccttgtttcttgagagctcaagacacctcctctcttttttatgcttcaagattagcaaagttatgaatcactcatgagctgggatgatcaatctgcagctatagcagaagcattttttatgtaggggtgtgacgcttttatggtttcgggttcaggatttagggttaagaatcggacgatggatgggtatccagaggtgttctataagtgccaggttttcggattttaagttagtgaaaacaaaactgtgcacttaaggttggtactttggtagggcagatgatccaagatcttgtatggagtgtatatgaacatgtaaatcccagcccctttttgtttccttcccaaaggaaatttctggtccttaatacatacctctaattaataaaactttgagtttggtttctcctacaaaaaaac

SEQ ID NO: 518 - DNA, 1395 bp, Oryza sativa
  ref <308>: DATABASE ACCESSION NUMBER: AK058639
  ref <309>: DATABASE ENTRY DATE: 2001-12-06
tcatcaagtgacaggtctcacacaccaacctcttggagaagacactagagagattaggcagccatggctgtgatgctagtgccaattccactactactcttgcaccagcaccacaaccatgagcatgagcatccatcgccggtagctccacagccaacaatggcatcctactacactctcctgctggcgctcctgtgccctcttctcctcctactcatcaaactttgccgggcgaaaaccagggacgacgagctgtttgacaagctcccctcgccgccaggaaggctccctgtgattggccaccttcacctcattggctccctcccgtatgtctccttccgtgaacttgccatcaagcacggccctgacctaatgcttctccgcctcggcaccgtcccgactctcgtggtgtcatccgctcgtgcggcgcaggccatcttgcggacgaatgaccacgtgttcgcgtcacggacctactctgccgtcaccgacatcctcttctatggctcgtcagatgtagcattctctccctatggcgagtattggcggcaagtcaagaagattgccaccacacacctcctcaccaacaagaaggttcgctcctacagcagggcaagacaacaggaggtgcgcctggtaatggccaggatcaacgaggcagcggtggcacgcactactgtcgatctgagtgagttgctcaattggtttaccaatgacatagtgtgtcacgccgtgtctggtaagttcttccgtgaagagggtcaaaaccaaatgttttgggaactaattcaggccaactcattgctactcggtggtttcaatcttgaggattacttccccaatttggcgagggtaactactgttaggaggttgctttgcgccaaggcccataatgtcaacaagagatgggaccaactgctcgacaagctcatcgatgatcatgccaccaaacggtcctcctcggtgctagacctagacaatgaagagagtgatttcatcgatgtccttctctccattcagcatgaatacggtctcactagagacaacgtcaaggcaatcttggtgatcatgttcgagggcggcacggacacggcgtacatagagcttgaatacgccatggccgagttgattcggaagccccaactaatggccaagctacaggccgaggttaggagtgtggtaccaagagggcaggagatagttactgaagagcaactgggaagaatgccctactaaaggcagtgataagggagatgcttcggctacacctcgcagggccacttctcgtaccctacctctctattgctgaatgtgatatcgagggctacacaataccctctggcacacgtgtcttcgtcaatgcatgggctctgtccggagaccctagcttttggg

SEQ ID NO: 519 - DNA, 803 bp, Oryza sativa
  ref <308>: DATABASE ACCESSION NUMBER: AK103993
  ref <309>: DATABASE ENTRY DATE: 2002-08-28
actcttcctccccgacccgaggcggcggcgaccctagcttcccgattctcccatcccccccatggcgtcccacctcgacttccgctacctcgacgagggcctcggcggcgagcgcgggaagcgcaagcgccgcgaggcggaggaggcggccgccgccgactccatggacctcgacgccgacgccgacgcgccgaggccgtccaagctccgcgcggtgccctccctgtccgacccctccaagcccgcctccttcgggcagcccacctacgacggcgtcatcgccgggcgcgtctccgggcggcgctggaaggaggcccgcacccgccgcgcctccgcgctggcggcgtcccggaagccgaccccgctggagcagcgcgcccgcgacaagtccctgaagcgcgcgtaccaggcccgcgtggcggagctcaaggaggagatccggcagagcaaggcggcgaagcggaagcagcgggaggagcgggagaagcgcaagaaggagaacgtgctccgctcgggcaccaagctgcagcgggtcaccaaccccaagaccatccagaagatcgccaagtccaagaagcggaagcagctcaaggtcgtccccgacgagttcctcggcggcaagaagtcggacgccaaccgccgcatgcaggtgcccggcctagacaactgaagatcgccttaccaaacaaatccttttgttatctgtgatacccatgttacagtgcagcttactagtttttacattgcgcaacgagattttgtactaatgctttagcatgagattttaagtatggtcaatccag

SEQ ID NO: 520 - DNA, 752 bp, Oryza sativa
  ref <308>: DATABASE ACCESSION NUMBER: AK058640
  ref <309>: DATABASE ENTRY DATE: 2001-12-06
agtggtcccttgaagactacagttactggtgttgagatgttcaaaaagatactggatcatggagaggctggtgacaatgttggtcttcttcttcgtggtcttaagcgtggtgatgtacagcgtggccaggtggtgtgcaaacctggtaccgttaagacgtaccaaaagtttgaggcggaaatttacgtccttacaaaggatgaaggtggtcgccacacagccttcttgtcaaattacagtccacagttctactttaggactgccgatgtcactggaaaagttgtgttacctgatggcgtggaaatggttatgcctggtgataatgtaactgcaggatttgagttgatatcacctgttccccttgagccaggccagagatttgcgctgagggaaggagggaggacagttggtgccggagttgtttccaaagtttacagctgatctgtttccagttttttctgcgtagcgaatttagtaacaaatgaatgttcatagggaatcagatctatccgaccggcaatatgagagcaaaagagcgagggactcgcagagcatcttctctgaattcatgagatgcagggatcgttggctcggccaccattccgaactagttattgcttttctttttccatgtctggttgttgctgtataacaacgcgtttagtcatcttaacacgtttttttgcccatagcttggtgactaaataagaaagattcatcataagcatcttaatggttgatgtttctctcgc

SEQ ID NO: 521 - DNA, 1248 bp, Oryza sativa
  ref <308>: DATABASE ACCESSION NUMBER: AK058641
  ref <309>: DATABASE ENTRY DATE: 2001-12-06
aggctcacaagccacagctctctcacacgagagctcgagtctctctcgtcggcgacaatggcgagcggcggcggcggaggaggggagggggagacggtgctggtcaccggcgcgagcggcttcatcggctcgtgtctcgttcgccgcctcctcgcccgcggctactccgtccacgccgccgtcctcaaccccgatgactaggccgagacggaccacctccacgcgctcgccgccgccggcggcggcgagggccgccgcctccgcgtgttcccgggcgacctcctcgacggcgccgccctcctcgccgccgcgcggggctgctccggcgtcttccacctcgcctccccctgcatcgtggaccgcgtcctcgacccccaggcgcagctgatggtgccggcggtggaggggacgctgaacgtgctgcgcgcggccaaggacgccggcggagtgcggcgggtggtggtgacctcgtccatctccgccatcgtgcccagccccggctggccggccggcgaggtgcgcgacgagcgctgctggactgaccttgactactgcgagaagaacggggtttggtaccctgcttcaaaaacattggcagagaaggcagcatggaggtttgcagaggagaatggattggatgtggttgtggttaacccaggaactgtcatgggcctggtaatcccaccgacgatcaatgctagcatggccatgcttgttcgcctactcgaaggttgcacagaggagtatgcggatttttacatggggccagtccatgtggaagacgttgctcttgcccatattctgctgtacgagaacccatctgcatccgggaggcacctctgcgtgcagtccattgctcactggagcgatttcgcttccaaagtcgccgagctctaccccgagtacaaagtgccaaaattacccaaggaaacgcagcctgggctggtgagagcagaggctgcgtcgaagaagctgatcgcgctgggtttgcagttcagtcccatggagaagatcatcagggattcagtggaaagcctcaagagcagaggcttcatctcttgatccttctatgcattaatccttctgcctgagtagattactcgtgtgttaatgtgttattatgccattttcagcaagcactctgtgtttatgaataatggaaatgtgcagagacgctatgattgggaatgctccagttgttgagcacttgacaaatatatcatgcaatgcatgcagctacaattcaac

SEQ ID NO: 522 - DNA, 1353 bp, Oryza sativa
  ref <308>: DATABASE ACCESSION NUMBER: AK058642
  ref <309>: DATABASE ENTRY DATE: 2001-12-06
accactcgccgctttacccgccgttctcctcctcctcctcctccacgcgcggcggcgaggcggagccaagccctaggaaggagcggcgcgtcaccggcggcggcggcggcatgcatcacgaccccaacccgttcgacgagggcaacgccgacgacaaccccttctccaatgggggaggtggtggtggcggcggcggcagcaggcagcagtacgggttccgccccacggagcccgccggcttcggcgccggcaggggggacgccaccgtcgatgtcccgctcgacaccatgggcgactccaagagcaaggcaagggagctctcatcgtgggaaacagatctgaagcggcgggaggcggatatcaaaaggagggaggaagcgctgaggaatgctggagtgccaatggaggataagaactggccaccattcttcccgatcattcaccatgacattgccaatgagataccggctaatttgcagaaattgcagtatctcgcgttcgcaagctggcttggtatcgtgctttgcctctcatggaacttcatcgctgtcatagtctgttggatcaaggagggagattcgaagctgtttttccttgccactatctatgccttgcttggaattcccctctcgtacttgatatggtataggcctctctaccgtgctatgaggactaacagtgcgttcagttttggatggttctttctctgttacttgatccacattggcttttgcattattgctgccattgccccgccaattgtgtttcatggaaaatcattaacgggcatactggctgccatagacaccttttctgagcatgtgataattgggatcttttactttgtggggttcgcgctgttttgcttggagacactgctgagcattggagttcttcagagagtgtacatgtacttcagagggaacaagtgaagctattcatcatgatggaaagtttccggtgatcaccagtagcacacctcttcatgcatcgcttctgtgcatacaaatcagtacaccctgagaatgtctcttcatgtcagtttattgtgaaaccttttcaagcttgttatggggtaggttgttagcatcgttatcatagctttgtgtctggaacgaggtgttttgattcttggcaaactgtagtccgtatgtgattgggtagatcgccggtttgcctgttggttaccgttaaatgagctaaggctattctcgctcgggaaaatagacacaaaattgcattcagacctagatcatatatatgcacccttgcggattgttggcttgatgctgtgcttcccgatttttactatccatctaactcaaagcagattcatctggcacaattcgttgc

SEQ ID NO: 523 - DNA, 665 bp, Oryza sativa
  ref <308>: DATABASE ACCESSION NUMBER: AK058643
  ref <309>: DATABASE ENTRY DATE: 2001-12-06
aagagaaggggaaaagtaatcctccagctaaactagaaagagatgagctactacggtcagcagccgccggtgggcgcgccgccgccgcaagggtacccggggaaggacgcgtacccgccgccggggtacccgccggccggctacccaccgccggcgcaggggtaccctccccagggataccctccgcagcaggggtacccgccgcagcagggctacccgccgccgtacgcgcagccaccgccgccgcagcagcagcagcaccacagcagcgggccttccttcatggagggatgcttggctgcactttgctgctgctgcctgttggaggcttgcttctgatcaagtctgtccgtgtgaccaagcagtctcgatcggacacaaaccctgggattgatgtggaattattgttcctttgaaaagaaatatatggaattgttgggattggcatgtcgtgttggttactttctttgataagattagtagaatttttctaccatcacagcgtacaattatgtgtgtattgcctgttcaccagataagtgtatacccccttaacgaaatcattgtatttgatggattagtttatctagtttactgtaatatctcactctccccgtgttagtgactacaaatcgagcctcacgtcgagacatcttttttttcag

SEQ ID NO: 524 - DNA, 1422 bp, Oryza sativa
  ref <308>: DATABASE ACCESSION NUMBER: AK058644
  ref <309>: DATABASE ENTRY DATE: 2001-12-06
aaaaaaaaaaaaaaaaaatagctgccggtaagctgacagaaaaagtcctgaagttgtttctggcaacggattgcgaggaaatcgccttgcttgttcagttgctcaacattaagcagccgcttgtaccggtccttcccacgaggtgctctgaggagttctagaagtgacactgattaggtcagtcttggttacctgagaaaagatgtctttggaaattcaggacagtgaggtcgacattgtgattgcagcactccagcccaacctgactactttctttgaggcatggaggccatttttctctcggttccacatcattgttgtcaaagatccagatatggctgaggagcttcaaatccctacaggttttgatctcaaggtttatacgaagtcagatatgggagtgcttggagccacatccatcgacttctctggtcactcatgccgttactttgggtaccttgtctcacgcaagaagtatgtcatctcaattgatgacaattgcctcccagcgaaggacaatggtgggttgactgttgatgcagttgcacagcatatgtccaatctgaagacacctgctacacctttctttttcaacacattgtatgatccattccgcaaaggggctgactttgtccgtggatacccatttagtctgcgcgagggggttgagtgcatgctctcttgtgggctgtggcttcacaatgcagactatgacccaatgactcatgttgtgaagagaaatcaacgcaacacaacgtatgtggatgctgtgatgacagttccacttggtgcgatgatgcctgtgagcgggataaatgttgcattcaaccgtgaggtgctgggacctgtaatgttccctgctctgcggctgcgcaaggaaggaaagcacagatgggatacacttgaagacgtttggaatggcttgtgtgctaaagtggtgtgtgatcgcttacggtatggcgtgaagacaggtcttccttatgtgatgagaagtgatgcagaagcaggtaaggctctcgagagcttgaaagaatgggaaggggtgaaagtcatggacgtcgttcttcccttcttcgaatctctgaagctatcgagtacttcagttactgttgaagactgtgttaaggaactaaccagcattgtcaaggagaaactgggaccgcagaatgcaatcttcgctaaagctgctgatgcaatggaggaatggaccaaactctggaaatctcacggagctcaaagcgcttaggctgaaatttggttatctgttatgagcatatctgatttcgatacccactgttatgaaactgaataaaccgcattcctgtatgctgggaattttctcgttagtgtacgctccaatactcgtgccgttttcaaagacaagcagtgatatgcaaagcaatgctgtgtatcttgtgtgtt

SEQ ID NO: 525 - DNA, 1525 bp, Oryza sativa
  ref <308>: DATABASE ACCESSION NUMBER: AK058645
  ref <309>: DATABASE ENTRY DATE: 2001-12-06
ttaatttcatctctctaaccctagcagcagatccctctctcccctagcaactagcaagcagagagaagcagccgcctccatggatcctaatcagatgatgggccgaagcttccccatgtgggccgccgccgacgacccttccgcccagccaccgccgttcctccctccgcccaaccgcggctggaagcgtaagaaccctagcaccgccgccggtggctaccagccccccgctctcggcgacctccaggtgcagaaccgcgccaaggctcgccgctggttcaagaaccaaagcggaggcggaggcggaggcggtgggccccgcaagcacttcttcccccggcccaaggccgccgccccacgcaacaccacctccttcatcatccgtgccaagcgcgccggtggcatcgcctccctcgtctccccctcccctgttacccccgccgttctccccaccccacgcctctccccctcccgcgagggcctctccgacatggctcaggcgcagtggggcgtcgatggctatggctccatgaagggcctcatccgcctccgcacctcccctcaccccgccaacccctccgatgacgacgatgatgccaactccagcagcagtgacgtcgaggagcatgtcgaggtggagcgccgcctcgaccacgatctcagcaggtttgagatggtctaccctgccaggggtgacggtgtcttcttcgaggaggaggatgactatgagtatgaccaggaagcccatgtggctcgcctcgaggaggagaacctcaccttgaaggagaggctctttttgatggagcaggagcttggcgacatgaggcgccgcctggaggcactcgagtcgcgttttgcagggactgatggtatgcctattgagaattcagatgcagttgcagttgaccatgacaaggagatggctcatcccatacttgttcagagggatgatcttaggactgagattgctgctgatgcagcagggtcagacaaggctagtgcacaagacaatgcagaggaggttgctgatgcagcagtgtcagagaagatcgtgcaagacaatgcagatgttgtagttgcagggtcagagaggactggcgaagagatcggggttgatgcttcggagatggattgatgggagatggacactggaatgcaatagcggttatcagtactgtacatacataattgtcgatgacagattgaggccgcgtgatgtggacttgttttgggaggcttacaattgtatgttgtcgcataacaagtggatcatcgtatttacaatgtaatatgtttctaccattctgtgctatctttggtgtttctttgcgtatttgttatgatgataccacacagcacaacttgtagtagttcttaccttctgctgctgctgctgaaagaggtagaagcgactagatgaatttgttactacatcaactattaatgtcattataatggtatcagatggtgtcatgaacctgttacttaattatagatagcactcatgaagctattccttatttgc

SEQ ID NO: 526 - DNA, 694 bp, Oryza sativa
  ref <308>: DATABASE ACCESSION NUMBER: AK058646
  ref <309>: DATABASE ENTRY DATE: 2001-12-06
aaaaaaaaaactcgggcaagctctcctcccccacgactcccctctccttcctctctctctcgctcgcgcgcgcctgcgtcgccaatggcggaccagctcaccgacgaccagatcgccgagttcaaggaggccttcagcctcttcgacaaggacggcgacggttgtattactactaaggagttgggaactgtcatgcgttcgctggggcagaacccaactgaggcagaactacaagacatgatcaatgaggtggatgctgacggcaatggaacaatcgatttccctgaatttctcaacctgatggcccgcaagatgaaagatactgattctgaggaagagctcaaggaggcgttccgtgtgttcgacaaggaccaaaatggttttatctctgctgctgaattgcgtcacgtcatgactaaccttggtgagaagctgacagatgaggaggttgaagagatgatccgtgaggccgatgttgatggtgatgggcagatcaactacgatgaattcgttaaagtcatgatggccaagtaagttgaagcatcatttggatcaacacagggggagttccagtagccatactgtcagaggctaaaattatctttattaattttatgttcagatgtaattttgtggggatagatatgttccaaaccgaaattcttgatattcagagacatcctatgctgtagac

SEQ ID NO: 527 - DNA, 354 bp, Oryza sativa
  ref <308>: DATABASE ACCESSION NUMBER: AK058647
  ref <309>: DATABASE ENTRY DATE: 2001-12-06
ccgatgataatgtttcggatgggcagcatctggcatccaatgtgtaacattatactagtggaggtatacaagcagggagggaggcaagtgcataggtgtgcctttttcctgcgaggattgatccgattccaggttgtatgagactggcggatggacgactgctgcaactccaccccagttgagctgagtagcaagtagcctgagtcaccaaaatcttgctctgagcccctgacatgattctgtgttgacattttcactgacatgattatgtagtgttttaacatttgttgatgttgctcttgactgtacttcttgctctggaatctgggatacccggatacatatgctgttgat

SEQ ID NO: 528 - DNA, 1341 bp, Oryza sativa
  ref <308>: DATABASE ACCESSION NUMBER: AK058648
  ref <309>: DATABASE ENTRY DATE: 2001-12-06
aaacctcaaacaccgagtctttggtcgtctcagtgtccgtctccttcctcatctccaactcaggagatcatagaatccgaaacgaaccgttgcagcagctgatcgtcaggccatgtcgaacgccgacgtggaggccggtgggccggcggggagggaggcgacgacggggatcaagccgccgccggggaggtacaacccgagcggcaacgggccgaacgcggtggcgccggcgccgccgccgttctactactacgaccaagcggcggcgcaggagcggcaccaccggacgtgggtggtgccgctggtggtgatagccaacgtggccatgttcgtggtggtgatgtactacaacaactgcccggccaacggcggccgccgcgactgcgtcggccgcagcttcctccgacggctctccttccagccgctcagggagaaccccgtcctcggcccctcggccgccacgctgcggaagtacggggcgctggactggtacggggtggtgcacggcaaccaggcgtggcggctggagacgagcacctggctgcacgccggcctcatccacctcgccgccaacatgatcagcctcctcatcatcggcatccgcctcgggcagcagtttggattctggaaggtcgggctggtctacctcgtatccggcttcggcgggagcgtcctctccgtgctcttcatcagcagaaatggcatcaccgtcggcgcatccggcgccctcttcggcctcctcggcgccatgctctcggagctcatcaccaactggaccatctacagcaacagatgtgcagccatggtgaacctgatcatcatcgccgccatcaacctggcgctgggtatactcccccgcgtagacaacttcgcgcacattggggggttcgccaccgggttcctcctcggcttcgtgctgctgattcagccccagttcggatggtcggagcaggtttccagcgccaagtccaaatacaacgcgttccagatcattctcctgactctctccgtggccttgttgatagcagggtttgcagctgggttggtcagtgttttcaagggagtggacggcaacgctcattgcagctggtgccactacctcacctgcgtgccggcatccagctggaaatgcgacaaatgaacaggagatcagtgacgcattagcatgccatgcctcccacttgtcactgcaggggagagaatgccaccctgcttaagagggaacaatcgagatacaatagatattgtttctgtttgagaccacactgtaaaatttttacgctatatagaacttcaatattgtccattcttacctatattcttctgtgaagtgttgatcag

SEQ ID NO: 529 - DNA, 648 bp, Oryza sativa
  ref <308>: DATABASE ACCESSION NUMBER: AK058649
  ref <309>: DATABASE ENTRY DATE: 2001-12-06
gtctcacccagtcgcccgaccggcctcctctcctggccacggcgacgcctcctcccccggccacgccgcgaataccttgggtctctgcaatagtccaataccgatctgcggcagctactctgctcgtggaggagagccgccgccggaagccggaaggccgggtagcgccatgtcggcgctattcaacttcaattcgttcctgaccgtggtgctgctggtgatctgcacctgtacctacatcaagatccagttccccgccatcctcaacgaccgcaccggattccgtggtttcttttggaaagcagccagaataggtgaacgcttaagcccgtgggtagctcttgggtgctttgccatggggatatccactattttcttctgaggccttcatgattttaatccaggctgcagaagatttgtaggaagaacagtgtgattattattgcattgttttttgtgtttttggaggagcttttgtttcaattttagctgggatgtggagatacgagtctggcaagtgccagttgttactctcagggtggtgcccttgtcaggaaagaagtgatactatggttgcaccatttaatggttatgttgtgtattgaactgtttatgtgcacatggcatgttcagaaaatgcttaaatgc

SEQ ID NO: 530 - DNA, 1434 bp, Oryza sativa
  ref <308>: DATABASE ACCESSION NUMBER: AK058650
  ref <309>: DATABASE ENTRY DATE: 2001-12-06
cgtaacaccagaccaaaaaaagctgtggtcaactacttggcaaatgaaatacttcgcacggaaatgaaaccaaacattcttgataaatatagtgatggcattttgtcagaggagatagagtcttatggcatcttgagtgatgaagctgaactagacggtgatacacaggacatccctagtatagctgtgaagtctgctcgtcaaactgagagaagagctcggagaacgagggcagcaataaaggctgctaccatagtccgtacttccccaaaacctgcaacgtcctcaaagaagaagcggtcaaagggcgcctcttctggcacaaatccattaggttccttgtggaagatgacgggtcgcagacttcttacagcaaaggaagaggttgagttctcggaaggtattcaggacctcttaaagctagaagcaatccaagctgagcttgcagagtacaatggtggccagccaaccttcgctcagtgggctacagcagctggagttgatgagagaactttgcggaagcgtttagatcatggtatttattgcaagaatagaatggttacatccaatgtgcgacttgtaatatctattgccagagagtttgaaggtccaggaatggaactttatgatcttatccaggaagggatgcagggccttataaggggtgctgaaaaatttgatgcatcaaagggttttaggttctcgacatattctcactggtggatcaaacaagcaatgcgtaaatctgtctcagagcaatcacagatatttcgcttgccggctcacatggttgaagcaagctatcgtgtgaaggagtgcattaaacgtcttcgtcgaaagcttaaaagacgacccactaacgaagaaatagctgcagacactggtatgccgatcaaacgagtcgaggcagcagtgaaccttccaaaatattctgtatcccttgatagcaaaattggtagcacagacatgacttaccaggaagtcacagctgatccaaccgccgagacagccgaggagatgctgaacagattgtctatgaaacgggacgtacacaaggcactggacactcttaccacccgtgagaggcaagtggtgacacttaggtttgggctcgaagatggtaggataagaaccctgcaggagattggcaacaccatgggtgtgagcagggagaggatccggcaaatagagtcagccgcatttcggaaactgaggagcaagaagagggtgaatgcactgaaggattatctggtaccagtaggcaattggtgacacttttgtcgacatacaacattttcctttcaaaatccttttctttttctctcctttttgaggatcctttacttgtattttttttaccttggatcttcatgtacaacacgttgtcagaatagtgtagctcgtccccgacgaaggaatcaacagattttgcag

SEQ ID NO: 531 - DNA, 1923 bp, Oryza sativa
  ref <308>: DATABASE ACCESSION NUMBER: AK058651
  ref <309>: DATABASE ENTRY DATE: 2001-12-06
aaagcacacgtacagctacactttgtcactagctaagctagcaagtgcaactgtgcaagccatggcgtcgatgtgttcgaggtcgataccccagctcatcctcctcctctccctgaccgtcttcctcctcgccaatgcgcatcccatggccccgccatcgccgccgcggaaggcggccgcgcctccgacggcggcgaagggggtgaccggcatttcgccggtgctcgtctccacgctgcgcgagacgctggacgcgatcaagaacgtcgcgtccatcatctcgtcgttccccatcggcggcatcctcggtggcggcgacctccgcctctcctccgccatcgccgactgcctcgacctgctcgacctgtcctccgacgagctgtcctggtcgatgtccaccacgtcgtcgtcgtcctaccagcccaccaacgccggcgccgccacgtcgtcccacgtcggcaccggtgacgctcgctccgacctccggtcgtggctgggcggcgcgctgagcaaccaggacacctgcaaggagggcctcgacgacaccggctccgtgctcggctcgctcgtcggcaccgccctccagaccgtcacgtcgctcctcaccgacggcctcggccaggtggccgccggcgaggcctcgatcgcgtggtcgtcgtcccgccgcggcctcgccgagggcggcggcgccccgcactggctgggagcccgggaacgccggctgctgcagatgccgttgggccccggtggcatgccggtggacgccgtggtcgccaaggacgggagcggcaactacacgacggtgagcgcggccgtggacgcggcgccgacggagagcgcgagccggtacgtgatctacgtgaaaaagggcgtgtacaaggagacggtggacatcaagaagaagaagtggaacctgatgctggtcggcgacggcatgggcgtgaccgtcatctccggccaccggaactacgtcgacggctacaccaccttccgcagcgccacagtcgctgtgaacgggaaggggttcatggcgcgggacgtgacgttcgagaacacggcggggccgtcgaagcaccaggcggtggcgctccggtgcgactccgacctctccgtcttctaccgctgcgggttcgagggctaccaggacacgctgtacgcgcactcgctccgccagttctaccgcgactgccgcgtctccggcaccgtcgacttcgtcttcggcaacgccgccgccgtgttccagaactgcaccctcgccgcgcgcctcccgctccccgaccagaagaactccgtcaccgcgcagggccgcctcgacggcaacatgaccaccggcttcgccttccagttctgcaacgtcaccgccgacgacgacctccagcgcgcgctcgccggcggcggcaaccagagctccgccgcggcggtgacgcagacgtacctcggccggccgtggaagcagtactccagggtggtgttcatgcagtcgtacatcggcgccgtggtgcgccccgaggggtggctggcgtgggacggacagttcgcgctcgacacgctctactacggcgagtacatgaacaccgggcccggcgccggcgtcggcggcagggtcaagtggccggggttccacgtcatgacgagccccgcccaggccggcaacttcaccgtcgctcagttcatcgagggcaacatgtggctgccgccaaccggcgtcaagtacaccgccggcctcacgtcttgatcaccaattcaccatcgagtacgtgcttcttgtgtgcgacagtagtacagcacatgatcatactacactttacactacgttggagggaggtttaattaaggatctggtgtataaaatctttaggaattatggcattctgggagctatttagctgtttaattggtggttaatggaacaagtttgccttt

SEQ ID NO: 532 - DNA, 1974 bp, Oryza sativa
  ref <308>: DATABASE ACCESSION NUMBER: AK058652
  ref <309>: DATABASE ENTRY DATE: 2001-12-06
gtgaaagatgagaagacaagatttaaccttgctcttgagagtggtaaatccaaatcgcagttgcttctgcaaaagggattgatgacaaggatcactggtacaggttgggaattgaggccctgaggcagggaaatgttggtattgtggaatatgcataccaacgtacgaagaattttgagaggcttgctttcctatatcttattactggttacatggacaaggtggggttcatgtgcaaaattgctggacagaacaataacctgatgggtcaattccacaatgctctgtatcttggtgatgctatgaagagagttgagatcctagagaatgctggacagctacctcttgcctatattactgctaccacccatgggctcacagaaattgctgataggcttgccgctgagctgggtgaaaatattccttctcttcctgaaggaaaagctcgctctcttttgatcccccctgctcctctcacagccagtggtgattggccattgcttcgggtgatgcgtggtatctttgagggtggactggatgctactgggaaggctgaacttgaggaagacgatgaagctgctggtgctgactggggtgatgagggcctggatattgttgatgcaagcgaagcgatggcgaatggtggtgacggttttgatgctgaggagggtgaagcaaatgaggaggatggcgaggaaggtggttgggacctagaagatctggaacttctgcctgaagcagagaccccaaaaaatgctggcaatgcacgctcagcggtcttcgttgctcctccaccaggcatgcctgtcagcctgatttggactcagaaatcttctcttgctggggagcatgcagcagcagggaactttgacactgcaatgaggttgcttagtcgccagttgggcataaaaaactttgctcccctcaagcccctgtttcttgatctgcacatgggcagccactcatatcttcatgcacttgcaactgcccccatcataccagttgctgttgagaaaggttggagcgagtctgcaagtcctaatgtgagaggccctcctgcacttgttttcaccttcccacaaatggaagacagactcaaggctgcctataaggccaccacagatggtaagttcccagaagccctgaggcagttccttagcatcttgcataccatccctcttatcgtggtagactcgaggagggaagtggatgaagtgaaagagttgatcgagattgtgagggagtatgttcttggcctgaggatggaacttaagaggaaggagttgagagatgatgtcaaccgccaacaagaattggctgcttatttcactaactgcaagcttcagagagttcatatgaggcttgtgcttggaagcgctatgggtctgtgctacaagcaaaagaacttcgctactgcagagcactttgcaaggatgcttctggagaacaaccctaatgaggcccaggcaaggagggctcgacaggtgcagcagcagtgcagtggcaagaaggatagctctgagctgaactatgactacagaaatccatttgttgtctgtggcgccacatatgttccaatctaccgtggccagaagggtgtttcctgcccgtactgtggatcccggtttgttccttcgatcgaagggcagctttgtaccatatgtgagcttgccgtggttggtgcagatgcttcaggcctcgtctgctcgcccacacagttgagataagtggtgctaaggtagagctcccccattttcttttagtctcttaaaattctagggattctctatctcacattttagctgcatgtttactgattgaggagtgtatacatggtcgtgtttttgtatcttctccccctcatttccctcgatttttgtttgccttgaggcagctgttacacttgtcatatatggacttttgatcatctcatggtggcctatgcgcctacccctggacaattgatgtaccaat

SEQ ID NO: 533 - DNA, 666 bp, Oryza sativa
  ref <308>: DATABASE ACCESSION NUMBER: AK058653
  ref <309>: DATABASE ENTRY DATE: 2001-12-06
gctaaggctggaggacttggagcaccagttggaatcatggtgatgaagggaatcagtacatatattcaggagatagaggagctctgcacagattatccaaaaactactgttattttcgatcatatggctttctgcaagccaccaatgaacattgaagaagagaaggccttcacttcatttctagaactatccagattccctcagatttacgtcaaatacagtgcgctctttcgtatttcaagagaagcatatccatatgaggacacatctcagcttctttcccgtgtgatctctagctatggagcgaatcgaataatgtggggaagtgacttccccttcgttgttcctgaatgtggctacaaaggggccaaggaggcgatctctcatgtcgccggcaagatacctgtttcctcgtcagatttggaatggatcttaggcaaaacagtgacccaactgttccaaggtgcatgggtttctgcatgataggggtgtcattggttagtgtagcttttattggtcagtaaatatccttgcaatgagagggtgaaaaagattcttgtatgagaggaaaacggcgttatccagttaaagcattattctttctattcgctaattgataacctgtttaggttatccttttttgcaaggtattaaatgtttatatac

SEQ ID NO: 534 - DNA, 1605 bp, Oryza sativa
  ref <308>: DATABASE ACCESSION NUMBER: AK058654
  ref <309>: DATABASE ENTRY DATE: 2001-12-06
agctggttgtaatttggagtaagttctgttattgtattattggttcccccatgatatatattgattattgtacggggagaaaaaaaaaaaaaaaaaaatctccaccttcttcttcccagcttctctcgtctcggctcaaggctctagccatggacgccgccgcaatggaatccctcatcctggagctccacgccatcgaggccgtcaagttcggcgccttcgtgctcaagtccggcatcacctccccgatctacctcgacctccgcatgctcgtcgcccacccgcgcctcctctccaccgtcgcctccctcctcggctccctcccggcgacccgcccctacgacctcctctgcggcgtcccctacaccgcgctccccatcgcctccgtcctctccgccgccgcctccgtccccatgctcctccgccgctaccacgtcacgccgcacgccgccgccgaatgcctcgacgggtccttccgcgccggggacgccgtgctcatcgtcgaggacctcgtcaccacgggctcctccgtgctcgagaccgtcgcgccactccgcgaggtcgggctcgtcgtcgccaacgccgtcgtggtcatcgaccgcgagcagggcgggagggagaacctcgccgcgaacggggtcgcgctccactcgctcatgacgctcacggaggtgctcgccgtcctcgtgaagcgcgggaagctgggcgaggagaaggcccaggaggtgaagcgattcctcgacgcaaacaggaagatggctgtgccgggactgccggttaaaccgaaagtagttaggaaggcattttctgagagagctggattggcgacgaatccgatggggaggaagctgttcgagttgatggaggccaagcaaagcaacttgtgtgttgctgcagatgtcgggacagcaacagagctacttgatctcgccgataagattggtccagagatctgcatgttgaaaactcatgtggatatcttgtctgattttacaccggattttggccacaagctccgttcgattgctgagaggcacagctttttgatatttgaagaccgcaagtttgcagacattggaaacacagtaactatgcaatatgaaggaggaatattccgcatattagactgggctgatattgttaatgcacatatagatttatatcagtaaatcctgcatcttggtcagtgacgccgtcaagtccagcgttcatccatgctactcctggagttcagttggttgctgggggagactcgcttggtcaacagtacaacactccttactctgtcataaacgacagaggcagcgacataattatagtcggtcgtgggattataagggcgaacaatcctgctgagaccgcgagagagtaccgcatccaaggatggcatgcttaccaatccagcttatcatgagaatgctgtaaggtctctcccattctgtaacacgaatgtaagggcattcaggcgattgactgacgcaataaaagagagtatacgcatgctctatcatcgctgtggttcgtaattcacatgccctatattgacacgcactatcccagcaacaatttcgtttatgtgatggtaaataaataaagtttgctccg

SEQ ID NO: 535 - DNA, 1538 bp, Oryza sativa
  ref <308>: DATABASE ACCESSION NUMBER: AK103994
  ref <309>: DATABASE ENTRY DATE: 2002-08-28
agcttgctgctgctgcattcttcttgatctgatcgtcggacatggcgtcgcccatgctctccgccgccaccgtgccactccagggaggcggcttgtcggagttctccggcctgaggagctcgtcgtcgctgccgctgcggcggaatgccacctccgacgacttcatgaacgcggtctccttcaggacccacgcggttggcacgagcggcggggcgcggcgggcgccgacggaggcgaagctgaaggtggcgatcaacgggttcggccgcatcgggcgcaacttcctgcggtgctggcacgggcgcggcgacagctcgcccctcgacgtcatcgccatcaacgacaccggaggcgtgaagcaggcgtcgcacctcctcaagtacgactccacgctcggcatcttcgacgccgacgtcaagcccgtgggcgacaacgccatctccgtcgacggcaaggtgatcaaggtcgtctccgaccgcaacccgtccaacctgccgtggggcgagctcggcatcgacctcgtcatcgagggcaccggtgtgttcgtcgaccgcgacggcgcgggcaagcacatccaggccggcgccaagaaggtgctcatcaccgcccccggcaagggtgacatccccacctacgtcgtcggcgtcaatgccgaccagtacagccccgacgagcccatcatcagcaacgcctcctgcaccaccaactgcctcgcccccttcgtgaagatcctcgaccagaagttcggcatcatcaaggggacgatgaccaccacccactcctacaccggcgaccagaggctgctcgacgcgagccaccgtgacctccggcgcgcgcgtgcggcggcgctgaacatcgtgccgacgtccaccggcgcggccaaggccgtggcgctggtgctcccgaacctcaaggggaagctcaacgggatcgcgctccgggtgccgacgccgaacgtgtccgtggtcgacctcgtggtgcaggtgtccaagaagaccctcgccgaggaggtgaaccaggcgttccgcgacagcgccgccaacgagctcaagggcatcctcgaggtctgcgacgtgccgctcgtgtccgtcgacttcaggtgctccgacgtgtcgtgcaccatcgacgcgtcgctcagcatggtcatgggcgacgacatggtgaaggtcatcgcctggtacgacaacgagtggggatactcgcggagggtcgtcgacctcgccgacatcgtcgccaaccagtggaagtgagaacgtagaagctgctgctgctgctgcctttgtaactccacctcgctccaaaaattttccccagacttcttccttcttcctctcgatcctttgtaatgagaatttcgaagtttcgagcgcccaacacagtttcttgtttctttctttgcttttcttccccacctcatctgacttttcactgtccggcacggattattatcgacttccggcaattggaaatcgcaatgctgtgtaatgttcatgtgtaataccgtatatactaccggacaccggttgccaggttctggt

SEQ ID NO: 536 - DNA, 1166 bp, Oryza sativa
  ref <308>: DATABASE ACCESSION NUMBER: AK058655
  ref <309>: DATABASE ENTRY DATE: 2001-12-06
gcaaaattattcccagccgcaccctcgaggccgatggccgaggcggtcgcaagcggcgcagcggggagatggaccctccgcggcaagacggccctcgtcaccggcggcacccgcggcatcgggcatgcggtggtggacgagctggcggcgctgggggcggccgtgcacacctgctccaggaaggaggccgagctgggcgagcgcctcagggagtgggagggcaagggcttccgcgtcaccggctcagtctgcgacgtctccgtgcgggagcagcgggaacgcatgctccgcgaggtcgccggcctctacggtggcaagctcgacatcctcgtgaacaacgtgggaacaaacttttcaaaacaaaccactgaatactctgcagatgattactcgttcataatggccaccaatcttgaatctgcgtatcatctgtgccaacttgctcatcctcttctcaaatcatctgggtcaggaagcgttgtcttcatatcgtcagtctctggagtggtggctgtaagttctggctctgtctatgcgatgacaaaaggtgccatgaaccagctggccaagaacctggcatgtgagtgggcgaaagacaatataagaaccaattctgttgcaccatggtacatgaagacttcacttgtggaagatgaattggcaaggaaggacttcgctgacagcgtcgtgcgtcgaacagcgctgaagcgcgtgggagaaccagaagaggtgtcatcgctggtcgcgttcctgtgcatgcccggcgcttcctacatcaccggccagacgatctcggtcgacggcggcatgaccataaacggactgtatccaactcaggactagaccgaataggcaaaccgtatggccgtatggggatcgaagaactgtgtttggagaggtcagaggtgaggctcgaacgtcagtaaaactcaactatcccaaacaaacaggagatcgcaaatagatgcttgtgaacttgattggtttgcacttgggtatgcaccgcatgctactgtactaaattaaaaaaaaacgtttgttgcgagcaacaaaacgaaatactgcgtggatagggggcctactgcatagtgttgtgtcgttcgtatgcgccatagacaaacggaatgcccttgaaaaaaagtttaattggatgcatcgtgcaggct

SEQ ID NO: 537 - DNA, 1119 bp, Oryza sativa
  ref <308>: DATABASE ACCESSION NUMBER: AK058656
  ref <309>: DATABASE ENTRY DATE: 2001-12-06
atggccgcctcctgcgacctcgtcgacgtcgatccccccgagctccagttccccttcgagctcgacaagcagatctcctgccccctcaggatcgccaacaagaccgagaggacggtcgcgtttaaggttaagacgacgagccccaagaagtactgcgtgcgccccaataatggcgtcgtgcggccgcgatccgcctccgtcgttgtagtcacgatgcaagcgcagattgtggcgcctccggacttgcagtgcaaggacaagttcttggtgcagagcgtggtcgtcgacgatggcttgtcagctaaggacatcacctctcaaatgttcctgagagatgagaacaacatggttgaggaggtgaagcttaaggtttcttatgtgatgccacctgaaccagcgatggagattgcagaggagtctgatattccaaagagaattttggtgcctatgcggcggattttggataatgggaggagtggttcggagctgtcaagtggtaatgtctcattgagatcagctgagatggggacagagttgggatcacctcttggacgatttgtgagaaatgaggatatgctgaagactgcaagtcctgttgttgaaacaagagtacatgcaggacctgatgaacaatacctcgagctgtccgctttggttgcaaaattgaccgaagaaaagaagtctgcacttgagcaaaataggaaacttcgagaggagctgtgatcatctttgtcaaccccatgttggtgggcataaatatgcaggagcttgcaaggcgtcaagccagtcaacatcaaggaggcttctcgctggcattcgtactggtgattgggctacttagcattattctgggttgtcttgtaaagaaatgagaaatctcatattccagtctagtcagataattctacagtaaataaaaaggtgacgtcgtggggatgcttagttttgttggtcagctgccaaaggatgcagaaaaacaaatgtaccaagtttggtgaggtttactgtttacaagtgtccgatggacaaaaaagggtggtgtttgtgtggcgtcgtagtggtaatctagcttgatccatgatgtatttttaaactaatcattggaaagttactcctatt

SEQ ID NO: 538 - DNA, 732 bp, Oryza sativa
  ref <308>: DATABASE ACCESSION NUMBER: AK058657
  ref <309>: DATABASE ENTRY DATE: 2001-12-06
aaaaaaaaaaaattatccactcactccatcttatcctcttctcacatgcgctcgcgcctccctgctctcggctgccacagcaagaagacgacggtgacggcggacaaggcggcaacggcggacaaggcagcgacggcgacggcgaaagcgacgcgcacgaggtgcgcgcggggtggattagtccgtgggatgggcacgtccgggcctccccttgccctccagcgtcacgctgccaacctcctctccgactccaacttgtcccctgacctcctctacctcaccatcgccactccagctcgctccaccctccctcccccctcccattctgcctcccctgccgcaccgcgatgggaggcctagatctgggcggaggggagacgaccggcgggtggcggcgttcgtccacctctctcccctctccaccggcgagatcgatccgccgccaccgctatcggcgcggatccggcctcgtctttgttctcatcctcggcggtttgtccatggcgagtacgacaaagggcaaggaggatggtggcggtgaccgcgaggaggaggaggccgccgcgagccggtcgtcggtggggcccaagaccatgtgcggcatgcatcgggagcgcagatctggtgccggcgacacccttgatttgcaatgtgaatttgatatgtgaatttgtatttgtgacatgttcttgatttgatttgcaatgtggaatgggaatgcagggttgttgc

SEQ ID NO: 539 - DNA, 1383 bp, Oryza sativa
  ref <308>: DATABASE ACCESSION NUMBER: AK058658
  ref <309>: DATABASE ENTRY DATE: 2001-12-06
ttaaagagtgcgtaatagctcactgatcgagcgcccttgcgctgaagatgaacggggctaagcgatctgccgaagctgtgggatgtcaaaatgcatcggtaggggagcgttccgccttagagggaagcaaccgcgaaagcgggggtcgacgaagcggaagcgagaatgtcggcttgagtaacgaaaacattggtgagaatccaatgccccgaaaacccaaggtttcctccgcaaggttcgtccacggagggtgagtcagggcctaagatcaggccgaaaggcgtagtcgacggacaacaggtcaatattcctgtactaccccttgttggtacggagggacggaggaggctaggttagccgaaagatggttataggtttaaggacacaaggtgaccctgctttttcagggtaagaaggggtagagaaaatgcctcgagccgaggtccgagtaccaagcgctgcagcgctgaagtatgagccccgtggactagccattgcttctccacgaggctcataccaggcgctacggcgctgaagtatgtaacccatgccatactcccaggaaaagctcgaacgaccttcaacaaaggggtacctgtacccgaaaccgacacaggtgggtaggtagagaatacctaggggcgcgagacaactctctctaaggaactcggcaaaatagccccgtaacttcgggagaaggggtgccccctgattccatccattcctcaagctctcactcctctctcgcttccatggcgctcctcgccgtccacgccatggccgcgtccccggccaccttcccctcctcccaccaccacgccgccgtctcctcctactgcgcgctccccgccgccgccgcattctcccgctcccgctctcgcgtcgccgccgccgccgccgccaccctctcggccccgctcactccagttcttgaagtttactgcgggagaggggacaagaagaccaagaggggaaaaaggttcaaccactcgtacggaaatgcgaggccgcgcaacaagaagaagggaactggccctgcacggctgttcgcgccgcctgcgcctccgaggaaggaccagttcgacgacggcgaggtcaccccgatcgacatcgacgatgacatcctggaataggttgtctgaatttccccccttgaattatggtttaccttgagcttaccttttgtctagtctgtaccaaacactgtttcttgaaattaattacagtacattacatggtctcattctacataatgtagatgcctatgatttctttccttgtaatatatatgaatggtgctgcttagagtcattttttatgcattaccagctgaagcagaacataagtacagatacaatcaccaaactttcatgttcttgctag

SEQ ID NO: 540 - DNA, 1616 bp, Oryza sativa
  ref <308>: DATABASE ACCESSION NUMBER: AK058659
  ref <309>: DATABASE ENTRY DATE: 2001-12-06
aaaagagccaccatcccataatatatcaccacacacttcctgcctcctactagaaagcacacactacaccctcctcactctcaacctcagcctcactgtgactgtccccagcaatgctcaccctctcctcttcttcttcttcctcctctcccctcctcctgtccttccaagatgtttgctgacttctctgctgctgccatggagcttggagaggtgttgggcttgcaaggactcacagtgccatccaccaaggagggtgatctgagcctcatcaagagagctgctgctggtagcttcacccaggctgctgctgcatcatacccttccccctttcttgatgaacagaagatgctcagattcgccaaggctgctcacacattgccatcaggtttggattttgggagggaaaatgagcagaggttcttgttgtctaggaccaagaggcctttcactccctcacagtggatggagctggagcaccaggctctcatttacaagtatctcaatgcgaaggcccctataccttccagcctgctcatttcaatcagcaaaagcttcagatcatcagctaacagaatgagctggaggcctctctatcaaggcttcccaaatgcagactctgacccagaacctggaagatgccgtcgaacagatggcaagaaatggcggtgttcaaaggaggccatggccgaccacaagtattgtgagaggcacatcaacagaaaccgccaccgttcaagaaagcctgtggaaaaccaaagtagaaagactgtgaaagagacaccgtgtgctggctcattgccatcttctgtcgggcagggcagcttcaagaaggcaaaagttaatgaaatgaagccacgcagtatcagctattggacagatagtttgaacaggacaatggcgaacaaagagaaaggaaacaaagctgctgaagaaaacaatggcccactgctaaatttaacgaatcaacagccaacattgtccctgttctctcagttgaagcaacagaacaaaccggagaagttcaatacagcaggagacagtgaatcgatttcttcaaataccatgttgaagccttgggagagcagcaaccagcagaacaacaaaagcattcctttcaccaagatgcatgatcgtggatgccttcagtcagtccttcagaatttcagcttgcctaaggacgagaaaatggagtttcagaaaagcaaagattccaatgtcatgacagttccatcaactttctattcctcgccagaggacccacgcgtcagctgccatgcacctaatatggcacaaatgcaagaggatagcatctcaagttcttgggagatgcctcaaggtggacctctaggtgagatcttgacaaactccaaaaatcctgacgattcaatcatgaaaccagaagcaaggccatatggttggttactgaacctcgaggatcatgcaatgtgaatcttcaggaaatggagatcaagtcgttaatgagctcaccatgggatagctttagtattggcgttacccatgcatgttattcccttctttctgttctcaagcttctgcaatgtaataccagctaattgcgattttcagttcttatgaattcagctgtatccttg

SEQ ID NO: 541 - DNA, 758 bp, Oryza sativa
  ref <308>: DATABASE ACCESSION NUMBER: AK103995
  ref <309>: DATABASE ENTRY DATE: 2002-08-28
cgatcgatcgtactacgtgcagagagcttagctagctgcgacgcacgcacggtttgtacaaggtacagtatagtatgacaccgaccgtcgcgaccaccaccccggccgccgcggcggcgacgacggcggcggcggccgaggtgaagccggcgaagcgctccgtcggcctcggcctccccgcgcttccgccattattgcccggcctcgcctcccgcggccagccccgtgtcgcgtccttctgcaagaggctggcgaggaacgtggtggccatggcggcgggggaggcgccggcggcgccgctcgccgccaacgcggagatcaccgagttcatcaacgccctcaaacaagagtgggacaggattgaggacaagtacgcggtgacgacgctggcggtcgctgcgtcgctcgggatgtggagcgccggcggagttgtatcggcaattgacaggcttcctatcgttcctggtctcatggaagctgttggcattggctacagcgggtggtttgcataccggaacctgctgttcaagcctgacagggaagctttctttgcaaaggttagggaggtctacgaggatataatcagcggttaacagagatactacttatatacaacttcagttcaagggaggctgctactggattaattatctgtactgtatcacagcatagcatctaatttaattgctcttactcaatgtatgtctatataagttggacattactgctaaataacatttttcagaatgtttactcag

SEQ ID NO: 542 - DNA, 435 bp, Oryza sativa
  ref <308>: DATABASE ACCESSION NUMBER: AK058660
  ref <309>: DATABASE ENTRY DATE: 2001-12-06
acaaggttaaggtgcctgaaaggcaggatccaatgcttgttctgaagttcatatggatggagaagaacattggcatagccctcgaccagttggttcccggctatggcagcattccgttaagcccatactacttctggccacggaaagatgcctgggaggagctaagagcaaagctggaggagaaagagtggatctctcagaaacagatgatcatccttctgaatcaggccactgatatcatcaacctttggcaacagggtggtggcagcttgtcaacctaagaggatatctcaattctcccatccttgagaaccttgtttctttttttcttgctttggttacacggatctttgttgttacatgaccctgtagatcgattcaaactgttttcggatacggttttgtttatggaaatgaattgtgattgatctctgt

SEQ ID NO: 543 - DNA, 1222 bp, Oryza sativa
  ref <308>: DATABASE ACCESSION NUMBER: AK103996
  ref <309>: DATABASE ENTRY DATE: 2002-08-28
tctgcgacgcgttcggcctcatggacgccgtcaggctcaacaccacggtcacgcgagtcgccatggcaccgccgcggcgcgacgggtcgctgcggtgggcggtgaggagcaagcgccacggcgaggcggagacagaggaggtgttcgacgccgtcgtggtggccatcgggcactactcgcagccaaggctcccgaccatcgacgggatggataggtggaggaggaaacagctccattcccactcgtaccgcgtcccggactccttcgccggcgaggtcgtcgtcatcgttgggtgcagcgtgagcggcgcagagctcgcccttgagctccgccgcgtcgccaaggaggtccacctcagcaccaagtcgacggaggagaccatcacgtcggcgatgtccaaaagtgtcgccaggtacgaaaacctccacctgcgaccacaggtcgaacacctgcgcgaggacgggactgtggtgttcgacgacggctcgttcgtcgtcgccgacgctgtcatctactgcaccgggtacaactactcgttcccgttcctggacacgaacgggaaggtcaccgtcgacgacaaccgcgtcgggccgctgtacgagcacgtgttcccgccggagctggcgccgtcgctgtcgttcgtgggcatcccgggcaaggtggtcctgccggtgttcatcgaggtgcaggcgaggtgggtggcgcaggtgctgtccgggcggaggacgctgccgtcgccggaggagatgcagcgcgccgtcgaggagcacacccgcggcatggaggccgccgggttgccgaagcggtggacgcatgacatgttcttgaacctggaacgctgcgacgactacggcgagcgcatctgcggcttcccgcggatggaacagtggaagaaggagatctttgtgtcatccctctccgacatggtcgacgacatcgagaacttccgcgacggctaccacgacagcgacctcgtccgcgacgccctgcgccggcacggttggactcccgccgaggaggacgacgacgcccacaaataaaagcacttggattggactccaataaattcaggttaagatgaagcaaaccaaataaatacacgacaattcaacaaaaaaaatgctggcctgtctgtctcaagaggatttttcattgtactaaaaactgaacctttttattttcggaattgctataaatatgccgccatctttcttctcggatt

SEQ ID NO: 544 - DNA, 451 bp, Oryza sativa
  ref <308>: DATABASE ACCESSION NUMBER: AK058661
  ref <309>: DATABASE ENTRY DATE: 2001-12-06
gcagaacaacttataacgttacaagggcacctcctcaaatacccagtcaaggtagaggctgacggtaaggttggtccattgccagaacacgaatgctttcctgacgttggtggcaagattcttggagctccaacttcactccctgatacgctaacaatgtaacacggttcaagcaaaatattgacatgttttccagaattgaagcccttttttgttcatattttaaactttgtgattgcttgaagatggtatcggagaggaatttgtatcatgtctgtataatcatccagagagggggtatagggagagctcaagctgctaatggtgtctgtaaagtttgtggctatgtgagaaatttttcagccgttgtaaatgaaacacacgacagtacgatagactacagtgttgtctcatttccattgcaatcatacacgcacaactgttttaattc

SEQ ID NO: 545 - DNA, 1762 bp, Oryza sativa
  ref <308>: DATABASE ACCESSION NUMBER: AK058662
  ref <309>: DATABASE ENTRY DATE: 2001-12-06
attttggtactcctcctactagagtagtagtagtaccactaccactagtaaacacactctcaccttcatcttcttctccttcctccatctcccaatctccccaagaacacctaatctaatctctctccctcctctctctctattgtccatcaatggagatgatgatgccatgatcaaatgatgagagaagaagaggagtagagagggagggggtggggaggagagagagacgaaggaggaggatcgatgtacaagaaccagctgcaggagctggcgcagaggagctgcttcagcctgccgtcgtacgtgtgcacgagggaagggcccgaccacgcgccgcggttcaaggccaccgtcaccttcaatggcgagaccttcgacgggccatccaactgcaccacgctccggcaggccgagcacgccgccgccgaggtcgccctcgcccgcctctccctccgcggcccctcctcctccctcaccgcccgcgtgctcgatgagacgggggtgtacaagaatttgctgcaggagacggcgcacagggcggggctgaagctgccggtgtacacgacggtgaggtcggggcccgggcactcgccggtgttctcgtcgacggtggagctcgccgggatgagcttcgccggtgaccctgcgaagaccaagaagcacgccgagaagaacgccgccatggccgcatggtcctcgctcaagcagagtaatatcagaacgactgtatcgccattggtgtttgatcttgtttggatcgtgtgtcatggaggagacgtgttcgtggttgtttggtgcagtgccggaggcgcgcaaggagcccggcggcggcggcggcgaggagcaggagcatgtggtcgtcgccagggtgctcgccgcgctgaagccgcgggacgattgcggcggcggcggtggcgaagggaaggcggcggcggcgtctctaccgaagaagcatctcgccggcgcgtcttgttcgtccgccacgtcgctgtacagacatcaatgggggcgtccgtcgccgccgccgccggcggccggacccaagatactgcctcccctgcacctgctgcagcagcagcaagcggcggcgtccggctcccgagccgccgccgccgagctggagcaagagcggaggaaggccgccgagctggtgcacatgctgcacgccgtcatgctgcgcgacagggcggccgacgcaatgccgccgccgatgccgtgctactacgcgccgtactaccaccacggcggcggcgtcgccccgacgaggcccttcgccggcgccgccgggttccacgcgccgccggcggtgagcgtccgttcagtgatcccggtctgcgccgcgccaccgtcgccgcggccgccgccgcgcaaggaggacgatccagcgacctcatccaagagggcgtagtagtagtaaaaactagtatccaatcaatcgcgcagcctgctccgatctgaagacgacgacgaggaagacgatgagagatcgatgggtagccatgaactctgcttcttgcaggggaattttgatcacaagtctccctgtatatctaaatcgttgcaaagtgatcagcatttcttcttcttctcatctctttgctgctgaaatcttcagaaaagaagcagaccatgaaggattgaagatagttgaatatagctcgatcgatcgatctcctagggcttcattagaagccatccatccatgctttgtcgcatgaaaaattttaagctcatgagaatgcacattacatttctttcc

SEQ ID NO: 546 - DNA, 799 bp, Oryza sativa
  ref <308>: DATABASE ACCESSION NUMBER: AK058663
  ref <309>: DATABASE ENTRY DATE: 2001-12-06
ggaacacaaaccagagatccaaaagaatccgtcgaggccacagattgttccagagtttttgttttcctcttctccccttcgcgttagcgagcatgtgtcccggaggcagatacgcgggcctcgacgtccccgcctgcgcggcggcgggagacctgaggccggcgttcgacgtgctggacgcggaccgcgacggtcgcatcagccgggaggacctcaagtcgttctacgccagcggcgcggccaccagcgagcggttcgacgacgaggacatcgccgccatgatcgccgcagccgacgtggacaacgacgggttcgtgcagtacgacgagttcgagcgcctgctggggcgcgccgccgcgggggcggggtgccggcccgcgatggaggacgtgctccgggtgatggaccgcgacggggacggcaaggtggggttcgacgacctcaaggcgtacctcggctgggccgggatgccggcggccgacgaggagatccgcgccatgatacgcgtggccggcggcggcgacggcgatggttgcgtggggctcgaggagctcgccatcgtcctcggctgctcgcccacaaattggaccgcatcttctcaaactctgcattgatgcattgattgggagacttcaatttgttggttggtggtgttgtggtgatgtgattgttgagcgattttcgagtttcgagaagcgtgagggatgtttaattgggcgtaactgctcccgaaaataggggtattaaaaactccccgatgcagcttcttccatagaaaaaagttgaaaagtttgtattg

SEQ ID NO: 547 - DNA, 1610 bp, Oryza sativa
  ref <308>: DATABASE ACCESSION NUMBER: AK058664
  ref <309>: DATABASE ENTRY DATE: 2001-12-06
aaaccgccttcttccagcgcacaaccccttctcgcctgtctgtcttcctccgcccctctctcccctctcccatggcgcatcaagatcattaacccaccaaaccaaggtttatatatggttgcgtgcgtcgtctccactgcagcagccagcgcagctcggcgagatcgatcgcgcggcggcggggcgccgcgtgcacgccggaattgaagccgagcgcgcgcgcgctagagctagctagacacacagataggcggatcgatcgccttgtagcccttggtaagcttggaggatcggcaaggaggccgggaggtagctagctagctagcctctaggcgagatggcggcggctgcggcggcgccgtcgtcgtcgacgtcggggtcgcccggcgcggcggcggcggcggctcggccgacgatgccgtaccggtcgcggttcggcgacacgacgctgacgaaggtgttcgtcggcgggctggcgtgggagacgccgtcggagggactccggcggcacttcgagcagtacggcgagatcctggaggccgtcgtcatcgccgaccgcctcaccggccgctccaagggctacggattcgtgacgttccgggaggcggaggcggcgcggcgcgcggtgcaggacccgaacccgatgatcgccggccgccgcgccaactgcaacattgcctcgttgggcccgccccgccccgcccagccgcctcgaggcagggcctcccctggggcccagttccaggccccaccgccagcgttccagggcccaccttacatcgccagggggacgccaccaccgccggcccagatgatgccccagccccagcatcatggtccacctgcgaccatctaccacccttcccagtcttggtactggtacccacctgactatcaataccaacagggcctgatgaattctcaagtgttgcagagctactatgctgccgccctgcaggctcaggctcaggctcaggctcagctgtatggcatggcggcatcgccaacggcaccatcgccctaccagtacttgggctacatgccggctccggcgccggcggtgactccaactgcagtgctcccacctgcacagcagcagatcacagggccgccgccgccgttcgtccagcagccggcacagcatgtcacagcgccgccgccgttcgtccatcatccaacggctgctgcgcagatccaaggctcttttgtacccctgccttcgcttcctcacaacttcaggcttcagctcccccctaatgcaatgtcaatactgcctcccaccccaaccgctttgcaaccagctgatctgcaggctgcccctgcagcaactggagcaacaaacccaaacaatactccgacaggtgcctgaaagccatctgaagataaaaaagatttattcaggttcaaaagaatcaaaacaacaacacccttcaagctgactgctatctggggcagagaaagtcagaaagaaatgcgcgcgaaaaagcgatcccagttttccatctcgatcgatctggtgcggacaaagttattggccgtctgtaacagtctctctggatgatgttgaccaacatactcaaaaataactttaaacccattttcattctttc

SEQ ID NO: 548 - DNA, 1886 bp, Oryza sativa
  ref <308>: DATABASE ACCESSION NUMBER: AK058665
  ref <309>: DATABASE ENTRY DATE: 2001-12-06
tgaaggtgaagggctcaaaagaagcttgcaaagtacagaaccatttgatgtccccatgactgactcagtaagaggcagccctaaagatattgatgatgaagtggccaaagaatgggaacacacaatgctgcaggatagcatgggcaaagagttgaatgaattaaacagacaactggagcaaaaggagtctgagatgaaaatgtatggatctgacactgttgcacttaaacaacactttggaaagaaacttttggagcttgaagaagagaaaagagctgtacagcaagaaagggacagattgttagctgaagttgaaagtctaaatgctgatggacaaacacacaagttgcgagatgcccagctgcaaaaattaaaaacccttgaagcacagattctagacctcaagaaaaagcaggagaaccaagttcaacttctgaaggaaaagcaaaagagtgatgaagctgctaagaagttgcaggaagaaattcattctataaaggcacagaaggttcaactacaacataaaatcaaacaagaagcggaacaattccggcaatggaaggctacccgtgaaaaggaactcctgcagttgaggaaagaggggcggcgaaatgagtatgaacgccacaaacttcaagcacttaatcagcggcagaagttggttttgcagaggaagactgaagaagctgcgatggctaccaaaaggctgaaagagttactagaggctcggaaatcatcaggacgtgacagctcaggcatgaatggtacttctcctggctctcatatgactgagaaatcattgcaaaaatggctagagcaagatttggaagtcatggtgcatgttcatgaagttcgaaacgaatatgaaaagcaaagtcaattgcgtgctgcacttggtgaggagcttgccattttaaaacaagaagatgtcatgtctggtgcagctagtccgcccagagggaagaatggaaactctagggcaaatactttgtcaccaaatgcaagacaagctaggatagcatcacttgaaagcatggtgacaatatcttcaaatactctcgttgctatggcttctcaactctcagaagctgaagaaagagagcgtgcattctctgggcgtggtcggtggaatcagttgcgttcaatggcagaggcaaagagtttactgcagtatatatttaacgttgctgcagatgcaagatgccaagtaagggagaaagagatggagatcaaggaaatgaaggagcaaatgacagagcttgtgaccatccttcgacacagcgaatcacgtagaagggaaacggaaaagcagcttaagcaaagagagcaggcagctgtaactgccactacatctccaggaaacggaaatggttcagtgaagcactctgctgatgactccaacacaccattgtcaccagttgcggtgcctgcacagaagcagctgaagtactctgctggaattgtaaatagccccagcaaaggggttcctgcattcaacaaacaacatcttaagatggttcctatggcacagttgcctgttggcaagaaggtttcaatagcagggcaatcaggaaaactttggagatggaaaagaagccaccaccagtggctactgcagttcaagtggaagtggcaaaagccctggaaattgtccgagatgattcgacacagtgacgaaacgatgacaaggactcgacccagaccccagcttcttcctcatagacctcaaagagtgatgtgaaaaaggcttttcttttcttttttttcttcgtctccacatggactgacacggtttacacagctaactacctccacaagggtaacaatgcagctaaaagctccaggagatctccttcgtgcttcgattttacttagccacgggatcg

SEQ ID NO: 549 - DNA, 1525 bp, Oryza sativa
  ref <308>: DATABASE ACCESSION NUMBER: AK058666
  ref <309>: DATABASE ENTRY DATE: 2001-12-06
gatacggtgctaggatatgctaacagtatccgtactattgatggtggtactcatattgatgggctgaagacttcattgacaagaacaatcaataacttcgcaaagaagtcgaagactcttaaggataaagatattagcttgagtggggagcatgtaagagagggaatgacctgcattattgcagtgaaggtccctaatccagagtttgaagggcaaacaaagacgaggttgggaaatccagaagtccgaagaatagttgaacaatctgttcaagaaaatttaactgagtacttagagttacatccagatgttttagattcgattctgtcaaagtcccttaatgctctcaaggctgcattggcagctaagagagctagagagttagtgaggacaaaaagtgtattgaaatcttcttcacttcctgggaaattagctgactgtgcatctagtgatcctgaagaatctgaaatcttcatagttgaaggtgattcagctgggggtagtgcaaaacaaggacgtgataggaaatttcaggctattttgcctctaagaggcaaaattcttaacattgaaaggagagacgaggcagccttgtacaaaaacgaagagatccaaaatctaattgtcgctcttggattaggagtaaagggcgaggattttaacaaggaagctcttcgatatcataagatagtcatactcactgatgctgatgtagatggtgcacatatccggactcttctccttactttcttctttagatatcagaaagcactattcgatgaaggttgcatttatgttggtgtgcctcctctttacaaggttgaacgtgggaaacaagcgcactactgctatgatgatgctgaccttaaggagctagttaacaccttcccaacaaatgcttcttatcatatccaaaggtttaaaggtcttggtgagatgatgccggcacaattatgggagacaacaatggaccctgagaggaggatgttgaagcagctaaaggttgaagatgctgctgaggccaacgttgtgttctcatctcttatgggtacccgggttgatgtcaggaagcaactgatccagaatgctgcaagcatggtcaacctagaacaccttgatatttgagcacattcggcaatgctgacagtcgtgtatgttacaggagattatccactgtttcaatcccctcccacaggaaccaagcgtagcaaacttgaattccttgccaacattgttttggtgctaatttagcagtaaatgtaggctagggaagaaaccagaaatgatttcatggggtttaattccttgccaggggagctgtcaactcccctactacattacacaattactgcctaattaactggtatatctgggagacagttcggttgtggtcacgttgtaagttggaactcgttatgacattgggggtaatcttcccttgctaggggaagacgtaatcccctgacaggcggacacttacaaagagtaatcccctgctagtagtaagtattactagtaagtattc

SEQ ID NO: 550 - DNA, 1114 bp, Oryza sativa
  ref <308>: DATABASE ACCESSION NUMBER: AK058667
  ref <309>: DATABASE ENTRY DATE: 2001-12-06
ctacagctaaaattgcattctgcagcgacaatcctctctcttacaaagctggaaataaaactgaatggagttactacaaggcaagaattgttcatttccttgtagactctatgcagtgcttatgagaccttcatcttatttccatgcttcaccttttcttttaattttacgtgcttagtttatgcctaagtcccatgattgtgtgtttgattattcctttattttgtgaaccgtgaactgtagtttactgttggatagttagcatgataagaacagttatcagctcttaattttgcaccatggaaagatggaacaaaattagagaatcaaagttccattacttttcaagcatgactcatttatgaacacttctactcctgaagaacagaatttttgcctagatagctaccagttgaatctggcatgttcataatgcttatagtcattcctgtagcttggtgatgctttttgctacatactaatacctagtagttcataacttttgtagtagagcttgatccttttttttttttggatcaaagggcaaaacgagcttgatccaatttgatgtttaaatacttctaaacgtaggggcatcgtccatatttatctcatatgttctttttggataaacaggtggtcattcctctgcaccagctaagagcggctaatccttcagtgagcaaagtaaaccctgctgaaaagtatattcaggttgtttcagttgaaggccacgagttctggttcatgggttttctgatgtatgacaaagccgtgtgtagcctccaagaagccatgaatagtgcccgcgagatgcaaccgtagataccaaagcagaagtttcagtcgagagtcatcctgatcctgtgtagcaatcctgggggggcatctctatttccgcgatcgattccttcgcttctgagtgtctcctgtttcagatccttcgcggctgtgtgcttcggagccatttgagacgatacactcactagcttctatacgtgttcgaaatgtgttctttttgttgtggccttccgcgtgttgtaatgatgggatgtatgggaaaacactggagctgtccattttgaatgcttttattatcaacacttgaaaaaac

SEQ ID NO: 551 - DNA, 165 bp, Oryza sativa
  ref <308>: DATABASE ACCESSION NUMBER: AK058668
  ref <309>: DATABASE ENTRY DATE: 2001-12-06
aagatgcctattttggtcttatcatatttctgtaaagttgatttgtgactgagagctgatgccgatatgccatgctggagaaaaagaacattatgtaaaacgacctgcatagtaattcttagacttttgcaaaaggcaaaaggggtaaagcgaccttttttttct

SEQ ID NO: 552 - DNA, 1376 bp, Oryza sativa
  ref <308>: DATABASE ACCESSION NUMBER: AK058669
  ref <309>: DATABASE ENTRY DATE: 2001-12-06
acagatgattgggtttccaaggtgaactcaagctccaatttctgccatgcttgcaacagcaacaagtccaactgttctgagaggcactgtaggcgtcttaagcttgaaaacatctggaggagagcaataggaaagtgtcaatcaaggtcagccaaaaatttcctgaggaaagaaggtttcctatcatcagtccatgttactgaagagctggctattgcggaagttggatttagccatccagatcacatatcaagagcagaaaaaatgcaaagcctaatagaaagcacactgcagaatgttctcgggtgcaacgtggaggttaagttcaaacttgttccacggccagtgagaaaagatgcaaggtcaaggagacagtcattcagtctcctcagctgctcaggccggaagcaagaactgtcagattcagctgtgaccgacgaagatgaaactgtgaggcatggagcaagagaaacaccgtctaaaggctactctagtcagcaacaatcaccattcatcatgcaacgcactgattctaaaccaacagttcacggctgcgaggatgatgctcggagcaccttgacatcaaacagatccatgactgatgacatgacaaggacatgcaggtcagagactaactactcaaagggagtcagtgagcagggccgttttgatagcatccaggagcctgaccttcaaccaaactgcttctcacggacattaaagcttcagaagaggttcttctcttcagatgctgcacacacaatctgtttgaagatacagcctcacaacaagatggatttcctacctaagaaggaattcgacacatatttctgcgcatatgagccttatgagcagtgttcaagatcaaattcacacgctacttgcagctcaagggatgataacttgtggaacaagaattcgcggtttggctcacatttgctctgctggaggggccctaaacaagccatctaacaggacagaaaatggatgcgcaaactagatgaatcaatagatgctgccacaattgtttttgcccggagccggaaattgggacacctatggcagcagcaattttgagggaaaagtagcggattgtactcattctggaatagctgatagggttgcacttgagcgagttcttgttcttggtgaacaaccaatgaacttatgttcaatctgtaagctgcatactagctttttgaaagggagtaggctgcatttagtcttagttgctcttatttgacaagagatttgggtagcctttttccagctctttactttcatcaaaaggaataatgctggcggtcagatgtacagcatggtagtgattccagtgattacttctgttacttcttataattcaagtaccttttggt

SEQ ID NO: 553 - DNA, 239 bp, Oryza sativa
  ref <308>: DATABASE ACCESSION NUMBER: AK058670
  ref <309>: DATABASE ENTRY DATE: 2001-12-06
gagagaagcgtcttgttagtggagagattgcatgaacaatttgtaagcagggtaccctgagttgtttatagaaatataaataggtaatccatccattatctctattgtttcgtcatctttttttgactcattcatgtctgattaatccccctgcttataggattttgtgggacgatcagtctagctttgtactatatcatactgtatacttatatatcattgtacgcgtacacttcgag

SEQ ID NO: 554 - DNA, 212 bp, Oryza sativa
  ref <308>: DATABASE ACCESSION NUMBER: AK058671
  ref <309>: DATABASE ENTRY DATE: 2001-12-06
agctacagctttagctatgttattgctattctcaatagagagacggtttctgaagactccagatttcgattgaggttttaatgtatgaactgtattatgattatgaacaacggatgctgccatatcgtggttcctatattgagtcatgtattttgaaaacatatcctctgtttccatctcacccttatcatcgattattattattgctatgt

SEQ ID NO: 555 - DNA, 2175 bp, Oryza sativa
  ref <308>: DATABASE ACCESSION NUMBER: AK058672
  ref <309>: DATABASE ENTRY DATE: 2001-12-06
gaatgctatacaaacaggttcaactgctgcagcttgcagtgcgatttcccaggctatttcagatctgccggaaggtcctcgaacaatggttggaattgccacatttgattccgctattcacttttacagccttaagcgtgctcagcagcagcctttgatgctcattgttcctgatgtgcaagatgtatatacacctctacaaaaggatttgattcttccagtttctgagtgccgtgagaatctggagcagctgctggaaagcatccctagcatgtttgagaataacagagttgctgattctgcttttggagcagctatgaaggctggcttcctggctatgaaatcaactggtggaaagctacttgtttttcaatcagtgcttccatcacttggtgttggttctttatctgctagggaagctgaaggtagagcaaatgtttccactggtgacaaggaaccccacaagcttttgcagccagttgacaaaactctcaagacgatggcactagaatttgctgaatatcaggtctgcgtggatgtgttccttactacacaatcatatgttgatattgcttcgatatctgttgttcccaatactacaggaggccgggtttactactactatccgttttccgctcgttcggatccggccaagctattcaacgaccttagatggaatatcagtagacctcagggtttcgaggctgttatgcgtgtcagatgcagccaggggctccaagttcaggactattttggcaatttctgcaagcgtgttcctactgacattgatcttccatcgattgattctgacaaaactataatggtcacctttaagcacgatgacaagttacaggaaaattcagaatgtggtttccagtgcgctcttctctacactactgtatatggacaaagaaggattcgagttatgaacctctcactcccatgcacaaacatgctcagtaatctcttccgatatgctgatttggaaacacagtttacatgcttcctgaaacaagctgctaatggcattccaacatctacgctactccatcttcgggaggaagtaacaaatacatgtataaatattctccagtcctaccgtaaatattgtgcatctgtaagctcatctgggcagttgatccttccagaggcactcaaactcctgcccttgtacactttagcgcttatcaaaagcataggcttgcgaaatgaggggcggttggatgatcgttcatattggatatccctcgtctcctcagtttctgttctattagctgttccattggtgttccctagattgattccgattcatgatctcacatcaaggggagacgatgaatcacttattcctagtccccttatgctcaatagtgaaaatatacgtgaagatggagtctatttattggaaaatggtgaggatggtctaatttatgtaggaaatgtggtagagccgaccatcctcgaacaaatatttggtgtgtcttctttggctgcattaccaagtcaggctgtgttggagcaatttgacaatgaactgtcacggaaggtaaatgaagtaattaatgaaataagacgccagagatgttcttatttaaggttgcgtctatgcagaaggggtgaaccatctggtgatttcttccgctcatttttgacagaggacaaggcacctggtggcctttcctatgtggagttccttgtgcatgtgcacaggcaaatccagagcaagatgacgtgacatgccatatgcttgtcgcactgtttttggttagtggatggattacaaactaagaagagatcagtttcggcacaaggatactacgaagaagcatagggcaactccagatcactggttgagttggggttagacatcattttcctggagaatagatttgcaggaattgaggcctgcaatgtttacagcatagtttttttgggggagagggtggtatatcttgtaaacagatgagttgttggatgtgatgcctcttttttttgtttctcaccgtgcatccttattgaaatctcttgtgaagggagaagggtgtattatgttcaaaggaatataagtggtttaggaataaaactatacctagctaatagttgagtgaagtatacagttctcaagtttatgtacgaaaaacgtcaagattgtctaatggttgtttgctctgcaac

SEQ ID NO: 556 - DNA, 1189 bp, Oryza sativa
  ref <308>: DATABASE ACCESSION NUMBER: AK058673
  ref <309>: DATABASE ENTRY DATE: 2001-12-06
aagactgtaccaatgggcactagagcggcttttgtggttgcattcctcataaggtccctatatggagggatgcagattgtaacaaaatttgccttcaatgaaggcatgagcacatctgtctttgttttctacaggcatgtgattgctatcctgttcttggttcccgtcgcatttgtgctagaaaggaaaactgctccaccactgacattcaaagtgtctctgaaactatttttgcatgcattatatgggatttctggggcgataaacatatatagccttggtctcagttatgcctcagcaacatcatcatctgcgatatttaaccttctaccggcggtggctttcatcttggctcttctgatgaagatggagtccctgaacttgaagaggatcaatggaattgcaaaagtttctggtatagtgttgtgcattgttggtgtcatcatacttgcgttctaccaaggacctgagttgaaatcattcaaccatcaccatctttttcgcacgagtactgtctatgctgcggctacttcacatcctgcaacgacatggatattaggaatttttctgacgactttatcaacaacatgttgggcactttggacagtgcttcagggtcctatgttggaggtatacccctctaagctcctcaacacaaccatccagatagtctttgcaactattcagtgtttcttcatcgctctggcgattgagagggatttttcacgatggaagctgcacctggatatgggccttattgctgtgatctactcaggggtacttgtctcgggagttgcatattacatgcaagtatgggttattgacaagagtgggccggtctttttggccatgacaatgcccataactcttcttgtcacaataatgctgtcctcatttgtattaggagaagcagtcaccctgggaagcataataagcggagtggtaatggttggtggtctttattgtgttctttgggccaagaaaagtgaacaggcagctatcagtaagcaacagatggtagttccagtccagacaacacgagtttaggcccagtctcaatggtcagtgtagtactagctcccagtgttctgaaataattagtttgtatgtagagttttccctgtattgttcaaaggatcatgggctggattctagttagctatatttagttctacaatatttcgcaaac

SEQ ID NO: 557 - DNA, 2055 bp, Oryza sativa
  ref <308>: DATABASE ACCESSION NUMBER: AK058674
  ref <309>: DATABASE ENTRY DATE: 2001-12-06
gattagcttgtcgctcaattttcgggacttctactggctttactgacatgctagtgaaacacataccctctgtcaaggatgctgctccaaggaagatagaacacatatacactggtccacaagattccactattgtggatgctatgaaaaaatgtgatccacatgcgccccttatggttaatgttacaaagttgtatcctaagtctgactgtagtgtctttgatgcctttggacgagtttatagtggcacaatacagactgggcaaactgtgcgtgttcttggagaaggctattctcctgatgatgaagaagatatgactgtgaaagaggttactaagttgtgggtgtatcaggcacggtaccgtgttccaattagtaaagcccctgctggttcttgggttcttattgaaggtgtagatgcatcaattatgaaaactgcaactatatgtcctatgaagatggatgaagatgtctacatatttagacctctacgtttcaatactctacctgtcgtgaaaatagcagctgagcctctaaacccaagtgagctccctaagatggtggaaggtcttcgtaaaatcagtaagagttatcctcttgctgttactaaggtggaagagtctggagaacacactatccttgggactggtgagctttatctagattctataatgaaggacctcagagagctttactctgaggtagaagtgaaggttgcagatccagtcgtgacattttgtgaaacagttgttgatacttcttcgatgaaatgctttgctgaaacacccaacaagaggaacaaaattaccatggttgctgaaccattggaaaagggcttggctgaagatattgagaacggccttgttagcctggactcaaggcaaaaggaaatcactgacttctttcgtcaacgctaccagtgggatgtgctagcagcaaggtcaatatgggcttttgggcctgaaaagcagggtcctaacattctcttagatgacaccctttcagtcgaggtggataaaaacttgctcaatgcagtcaaagattcaattgttcaagggtttcaatggggtgctagagaaggtccgctgtgtgatgaaccaattagaaatgtgaaattcaagatcttaaatgcaaacatagctcctgaaccgttgcaccgtggtggtggtcagataattccaacagctcgtcgtgtggtttactcagcgttcctaatggctaatccacgccttatggagcctgtatattatattgagatccaaacaccaattgactgtgtctctgccatatatacggtgctatcccgtcgtcgagggcatgtaacagcggatgtacccaaaccaggaactccaatctatgttgttaaggcatttttacctgttatagagtcatttggatttgagaccgacctgaggtaccatacacagggacaggccttttgcctatcagtgttcgatcactgggctattgttcctggtgaccctttagacaagaatattgtcctccggcctctggaaccagcaccaatacagcatcttgctcgtgagtttatggtgaagactaggcgaaggaagggcatgagtgaggatgtgagcatcaacaagttctttgatgaggccatgatgaacgagctggcgcagcaggctgctgatctccatcttcaaatgatgtagttcgaaatcgtgaagtggggattggtttcttcatattgatgatctttagaagatgcgatggcttatgtcttcttttacactgggaactggaatcaacctttggaatcagccaagtgctcacctgttcgcatgcccattgctgctgcgctttatctgccgcatgttgatggtcgggtgtttttgtgattgatggttttggtagacgggagtcccatctatttcatctttatgtatgatctcttcctgtaacattttcatcatctaaccttatcagttttagttagccattcggaactggagataagttttgaggggcgatgatatcatctaatctggattgcagcatggatggtgtaatgactgatgtgatccttttgtcctt

SEQ ID NO: 558 - DNA, 629 bp, Oryza sativa
  ref <308>: DATABASE ACCESSION NUMBER: AK058675
  ref <309>: DATABASE ENTRY DATE: 2001-12-06
attccatccattcctcaagctctcactcctctctcgcttccatggcgctcctcgccgtccacgccatggccgcgtccccggccaccttcccctcctcccaccaccacgccgccgtctcctcctactgcgcgctccccgccgccgccgcattctcccgctcccgctctcgcgtcgccgccgccgccgccgccaccctctcggccccgctcactccagttcttgaagtttactgcgggagaggggacaagaagaccaagaggggaaaaaggttcaaccactcgtacggaaatacttgccatctgctgactgctgtttgctcatctcaggcgaggccgcgcaacaagaagaagggaactggccctgcacggctgttcgcgccgcctgcgcctccgaggaaggaccagttcgacgacggcgaggtcaccccgatcgacatcgacgatgacatcctggaataggttgtctgaatttccccccttgaattatggtttaccttgagcttaccttttgtctagtctgtaccaaacactgtttcttgaaattaattacagtacattacatggtctcattctacataatgtagatgcctatgatttctttccttgtaatatatatgaatggtgctgctt

SEQ ID NO: 559 - DNA, 1406 bp, Oryza sativa
  ref <308>: DATABASE ACCESSION NUMBER: AK058676
  ref <309>: DATABASE ENTRY DATE: 2001-12-06
gaagaaaagaaaagttcatctcctcctctccttatcccttcccttcaccaaaacccccccgacaccgagcccctcctcctcgacctcgccgcaaatcctccgccgctcctccgccgctagggcataaccgcccgcctctcgccggcatccgcatctcccggggaagggaagggaagggaagggaaggaaggaaggtgagggcggatatgtcggcggcgccgataccccgcgagtgggtggggctgcagcagtttccggcggctacccagaccaagctgcacgagctcctcggcaagctcaaggaggagaatgtgagcacattgacaattctggtgatggggaagggcggggtggggaagtcatccaccgtcaactccatcgttggcgagagggtcgctactgtcagcgccttccagtccgagggtctcaggccgatgatgtgttctcgcaccagggcaggcttcaccttgaacattattgacactcctgggctcattgaaggtggatacaccaatgagcaggctgttgagatcataaaaaggtttcttctgggcaagactatcgatgtcctcctttatgtggatcgattggatgcatacagaatggacacgttggatgatcaagttattagagctgtcaccaattcatttggaaaggccatttggcgaagaacattggttgtattaacacatgctcagctctcaccacctgatggacttgactataacgatttctttacaaaaagatctgagtcacttttgcgatacattcgtgctggtgcaggagtcagcaaacgagaacttggggattttcccttgccaattgcattggtggagaacagtggaaggtgcaaaactaatgagaatggagagaaggttctccctgatggaactccatggattccgaacttgatgaaagagattactactgttgtctcaaacgggagcaaatccattcatgttgatcaaaagctaatagatggtccaaatcccaacaatcgctggaagatgttcataccgctcatccttatggtggagtactttttggttgtaaaaggcatccgaagggccattcatgctgacatatcaaacgggaagctagatgactgggaacagcgttacagagacttggttggaagcaaggacccggtagaccagaaaggttcatcatccggcaaccgcaaggcttgagctgaagaatgataccgcatgcatcgtgacccattcaattctctgtgcttttctttttgcgctctattccagtgatctatttgggaagctttatagagttatctgggacaatttgagcaaatttgctcttgtttttagttgctaaaaaaactgtactgaatttttttgtgctgtcgcaattttgcaaatgttgttgatcgaaacttcagttatttg

SEQ ID NO: 560 - DNA, 364 bp, Oryza sativa
  ref <308>: DATABASE ACCESSION NUMBER: AK058677
  ref <309>: DATABASE ENTRY DATE: 2001-12-06
gtattggattgtggagtgatttcatcgttaatggaaccttttatggttcattgaaacaggaagcttgaattctaaatctccatacgatcaatttcatggattagaatggtttatttaggatcaaatttacatggagtataagacttgtatggcgatgcccgccgaataatgtgcgctgttctgccaacgacaaggctctaggattcgtgcggataaagcccattatgattcgcgcgtgacagatgggccaatatcgtggcctgttgtccatggcccatgggccttggctgcgcggctctcagccgaatttccaccagcaaggacagcatatgccatagctctaatctgaacctttttatatctc

SEQ ID NO: 561 - DNA, 2023 bp, Oryza sativa
  ref <308>: DATABASE ACCESSION NUMBER: AK058678
  ref <309>: DATABASE ENTRY DATE: 2001-12-06
gaatcagtcttaaactcaaaataagctctatatggggattttgttgctgaacagtcataaggcatgatggataaacaattttttcctgcttagcaacttgtggtacggctatctcataagtcctatcttaagctagagagttcctcatttagctgttgcgtagattctgctggttgattttaattagctgtgctttgcaagatacatgcgtatcagcaggtttgagctgatcagctgaaacaaaaggccagtttctttatgctccaatttgctccaggatatcaacggcactaatatttttgcacgacataattctctcgtaaagttaaagaaagagttacataggattttgattagaactggctttgttttgacttagatgacaatgagtttactgttctgatttctaaaccatgatgagtagaaatttttttcccactgaagtgcttgctatatctttactgcaatgtgtgtttgcataacagatgagttaattatggttgtgaaaccttattgattgtgctccattgagcttcatcatgatgtgctacgcgtgttgctgaataagtcgaaaagtcgaaaggagctgggttagtgggttctgttaataagacatgatgtgcagtcattttttgctgcttagcatcgtgtggtaaatgatatcttaactagagagcttcacatttcgctgttgcgtagattctggataatttaagaattctgtaaaataaatcgtggtatccataggttgtgaagaaactttaattagctatgctttgcaagatacatgaaaaatatcagtaggttcttcactggaattggaaccaagttcattgcaactgcgagtgatttgatctgtgtagctatcaaatgtttcttaagcattatttctctttgttggtgactttgtttacatgaactatgcgtttttccacatgttaaattctgaattaagtttccatttcccttttctcaaaaagaaaaaaacggtttccatttccctaaggaactcctgtgaatcaattctgttcttggaacacgggagatttctcaaacttttaatgaacatgtcgcaatgttacaatttcatccagtccagaagatggttagctactttcttcccattagttctcagcagtaaggattaaggaacagttattagattggacatcattttgatgattgcagaattaacatcttaaattgttgcatgactgcaggtctgcaaccctttctgcaggtgagagaaagcctgaaccatcaccactcaacatctgaaactttgcctcctggaagttcaggttctctgcctctcagggatcatcagcatcatgagcagcagcagcagcagatcaggagcattaatcagcacaatgccacagctccttcagccaccggtggcatcaccatgtacaggccggccgacgagtccagctccggcgacggcgaggcgcggaggtcatcgccggcggcgaacaggagctgctccttgagcttgtccagcgcttctcgcatccagtcgtacctgcagaggccgtacgcctcctcaaccggcacctgaaattcttgcaacaagaacatcatgtgagcttcttgctgccatcatctcatcaggtggtgatctctgaacatgatgaactgaaactgaaactggaaactgtagaatgggatgtatgctcacccatctcctgccatgggtggtctgctcaggccatgactccagcaactctgtcacctggagagcaaacatgtagcccttgcaggccccttgcaggccacagctgttctgcttgctcttgctcttgaagatccaattctcccagtggtgtcccctgaattaatttcagcacaactttgtcagctgattggttactctgttctatgctactcctgaatcttttacatatctgaatgatgtgcttgaaactttgacatgtaaaaaaagttcaggaaaagctcattgcaatttctgtctctgacactgttggaaagctcatattttcaacacatggaaatcatttat

SEQ ID NO: 562 - DNA, 1766 bp, Oryza sativa
  ref <308>: DATABASE ACCESSION NUMBER: AK058679
  ref <309>: DATABASE ENTRY DATE: 2001-12-06
actttcgccaaacctcgcggccgtcgagctccgccgccggagaaaaagatggccgacgacagcgcctccccgtcgccgtcctcggcctcgccgctccagcaccaccgcgaagccctcaagtcgtcagtgcgcaacacggcagctagccggaggcgggaacaagctattgcgattgggaaggaaagacgggaagccttgatccgtgcaaagcgtgtgtgtcgagctccaatttctggcagtgatgaagctgaaatggaagagggtgatatggtggtcgatgaggagaaagcatgtcttgaggcaaagactgctcatgctgttgaagaattgaaatctgctttgtcaatccaggggaaaggcgttcagaagaagaagatagaggcgcttcgtgatttgagacgcttgttgtcacagcctgaagtacctctagttgatactgcaattaaagctggagcagtccctctttagtgcaatatctatcctttggatcatcagatgagcagttgctagaggcagcttggtgccttacaaacatagcagctggggaaccagaagaaacaaaatccttgctgcctgctctaccattgcttattgctcaccttggtgaaaagagctccacacttgttgccgagcaatgtgcatgggccattggtaatgttgctggtgaaggagcagagctgagaagcacattacttgcacaaggtgctttgcggcctcttacccgtttaatgttctccagtaaaggttctacagcaagaactgctgcttgggctatgtcaaatctcatcaaggggcctgatccaaaggctgcaaatgagcttattaccattgatggcgtgctaaatgcaattatagcgagcttggaaaaggaggacgaagagttagcaactgaggtggcatgggttgtggtctatctttcagcactttcagacagaggtattagcttaatagtaagaagttctgtgcctcagctgctgataggacgactgttctcatctgagaacttgcagttgctgatcccagtgcttcgtggtttgggaaatcttattgccgctgatgactacatggttgattcagtcctaactgttggacacaatatcattgatcaagcattgtcaggtcttataaaatgtttgaagagtgataacagggttctcagaaaggagtcatcatgggcattgtcaaatatagcagcaggcagttttgagcacaagaaactgatttttgccagtgaggccacgcctgtgctgatacgccttgtcaccagcatgcaatttgatattcgcagggaagcagcatacaccctaggaaatctgtgtgttgtccctactggaaattgcgaactcccaaagataatcgtggaacatctagtcgctatcgtagatggtggagcccttccaggatttatacacttggtcaggtctgctgatgtagataccgcagggcttggtcttcagttcctagaactggtgatgagggggtatcccaataagcaaggcccaaagcttgtggaaatggaggacggcattgaggccatggagaggtttcaattccacgagaacgagcagatgaggaacatggccaatggtttggtcgacgaatacttcggtgaggattatggcctcgacgagtgactcaactaattaccattcgtacatcaggttaaattgtaatggcagcagctgttcatgtgttcgtactgtaaaaatgcattctcagtttctaacagcactggaactttagaatgagaaaatcatttgcttgtt

SEQ ID NO: 563 - DNA, 730 bp, Oryza sativa
  ref <308>: DATABASE ACCESSION NUMBER: AK058680
  ref <309>: DATABASE ENTRY DATE: 2001-12-06
accctcctcgcgaaaaccctaaccccgccgccgccgccgctcctcgccacaagatcgtttcgtcgcagtcggtgttccggtcttttgagcgcggagatggcggaggagaccccagttgagactccagctgccccggttcttggggagcccatggatctgatgactgctctgcagcttgtgatgaagaagtcaagtgctcatgatgggcttgtgaagggtctccgtgaggctgccaaggccatcgagaagcatgctgctcagctttgtgtgcttgctgaggactgcgaccaacctgattatgtcaagttggttaaggctctgtgtgctgagcacaacgttcaccttgttaccgtgcctagtgctaagactcttggcgagtgggcagggctttgcaagattgactctgagggcaaggcaaggaaggttgtgggctgctcctgcgtcgttgtcaaggactatggtgaagagtctgagggccttaacatagtgcaggactatgtcaaatcgcactagatatagcattcttatatccagaacgtgtgctcgacattctgtaccttttgttttaatttatgcttggttctagggcttgctaggagataagaattcttttcaagtgcgagccagggagatatgagcaaaatttgaacctctgaatttatgtttaccgtgctgaaaatcgtctgcttttaatacaaatcatcatccgaagctgaggatctgtttgccc

SEQ ID NO: 564 - DNA, 1532 bp, Oryza sativa
  ref <308>: DATABASE ACCESSION NUMBER: AK058681
  ref <309>: DATABASE ENTRY DATE: 2001-12-06
atgcggtggtattatccaattatattggaattctattcttgaaagatgcttggatataaatgatcaagtccgtcaaactgcactaaagattgttgaaattgttctccgccagggtttggttcaccccattacttgtgttccacaccttatagcactagaaactgacccactggaggggaactcaaagttggctcatcatctgctaatgaatatgaatgaaaagtacccttcattttttgaaagccggttaggtgatggcctgcagatgtcatttcgatttttcgagtccacaatcagcaatcatgatatggtggccacaaacatgaaatctagtccaattgcgtttgttaaacctgggatatctcgaatataccgcctcatccgtgcaaaccggaattccaggaacaaatttgtacactcaatagtccgtaaatttgagggtgataaccgcagttaccccacaattagctttctcatgtactgtgctgaagttcttgcgtctctcccattcacaagccctgatgagccactttacttgatatatgatataaatcgggttattcaattaagagctggagcagttgaggcaaatttgaaaaattggacttccatgtatcagcagcaagaaatggtgggtatgccaagagacactggtgatgttatgcatgagcctgggggatgctctgaccaaaatttggttgatgtctctcaaatgatgcttggcaatacatgcagcacgccagttgttaacatggccaaacttcaggaggattgccatggcgcgatagccctgcagctccttctcaagctgaagagacatctgaaaactgtctatagtttaaccgatgcccggtgtcaggcattttctttgaaggatccaccaaaatctggcgaaacaatctccaagcagaatatcccattgaacattagtaataccaacaccagtttgccgagctgcccgcaggatgcagcacgtgtataccaggatttcaagacagtgctgcgagaagacaccgtggactacgggatgtacaccgtttcggcccagaaaaaacgtccgactccaagaagctcgtcgagagtaagaagaccggcggctgttacaagaggccgtggtggtggtggtggtggtggtgatgaggacaccgatgacgaagattggactggtggtggagcaagagtgctggacttcagcgctcagggtgggcgagtaacaaggcagagggtccaagtctgactggctgctgactgactgttgttggtgcttcttgtgtacattgtaggaaattttataggtaacaggggaggtttaggtcgtcttaggggccattgttagtacatagaagcagaaaaaaggaaaggaagatatctagcttttacttagatgccattaatttggagcactccttttcttttgcttgctgttgcccaatttagatgttgtaattgctctcgggctctggcaatactccaacaaacaggttgtgctcctttctaattcaatggaaaagaaatgctttcttttgcttctc

SEQ ID NO: 565 - DNA, 1562 bp, Oryza sativa
  ref <308>: DATABASE ACCESSION NUMBER: AK058682
  ref <309>: DATABASE ENTRY DATE: 2001-12-06
ttcttcctgcaatttaggctccatctactgatgtagcagttcaagagttgagtcatacagccgccgaagttagtgaaatagtctttttcttgctcggtgcaatgaccattgttgagattgttgatgcacatcaaggatttaagctagtgactgacaatatatctactcgaaatccaagaactcttctctgggtgatagggtttgtaactttcttcttgagttctatccttgacaatttgacttccactattgtgatggtttcattgcttcggaaactagtacctccatcagggtacagaaaattgttaggcgctgttgttgtgatatctgcaaatgctgggggtgcatggacaccaattggtgatgtgacgaccactatgttgtggattcatggtcagattacaacgttgaacacaatgcagggcttgtttcttccctcagttgtttcattggcagttccactggctctgatgtccctcacgagtgaagcaaatggatcttctcagaaatcttccagcttgctgtcatcagagcagatggctcctcgaggacaacttgtatttgctgttggccttggagccttagtgtttgttccagtgtttaaagctctcactgggctgccgcctttcatgggcatgatgcttggtcttgcaattctttggatcctgacagatgcgatacattatggggactctggaaggcagagattgaaagttccacaagcgctgtcacggattgatacacaaggagttctatttttcttaggaattcttatgtcagttggcagcttggaatctgctggcattttgaggcagttggcgaactatctcgatgccaatattccgaatgccgaccttattgcaagcgctatcggtgtagcatcagcaattatagacaatgttccacttgttgctgcaacaatggggatgtatgacctgacttcatttcctcaagatgcggacttttggcagcttattgcgttctgtgctggtacgggtggttctatgcttatcattggctctgcagcaggtgtggctttcatgggaatggaaaaggtggatttcttttggtatttccgcaaggtgagtggttttgcccttgcaggttatgcagctggtatcatcacttatctagctgcacaaaatctccctctatcccttcccacttcactagccgagatcccatttatctcggggtcatgaaagggtgaccagattcaggtatggaaatggacatattttattgtctggccagcttatgtaagcataatcaggatgtgttggcaaagaaaagatgtcccatgattacatgggatggaataaacgaaaaataaatatatgccctgatctccaacctccaagtttcccaacattgaccggaaggctttggggtgctggtgaactatggtatgctaagagaggagcgattttgataacacaagcttagaggctagagctgcacgcttgtaattcacgaattctattccatcttgttgagaagaaaagaggagctgcaccttgtgtaaaatttgaagatcctgaaatcatatcatcactgggttt

SEQ ID NO: 566 - DNA, 1809 bp, Oryza sativa
  ref <308>: DATABASE ACCESSION NUMBER: AK058683
  ref <309>: DATABASE ENTRY DATE: 2001-12-06
agagagcagacaccaccacaccatccaaccaaccaaattcctctctcctccgccgcgcccgcgccgcagcaagcaggagggcctccgcccgtgcgatgccggcggcggctaggctacgggcggcccggtgatggcgaccttcttccgcagcgccaacctcgcctccagggtcttcgaccgccagttcctctccccacgccccggcgctactgttaacactgttagacagttctatgagaacttggttccgagttacactatatgtgacatagattgcccagattattcatttcgtaaattcactgatgatggcaactatcttgtggcttttagccggaaccaccaagatttaatcgtgtaccgtcccatctggccaacattttcatgcaatgagccatgcgactctcatgatcttccacccaaagcaaagaaattcgacagcttctttaagcagctctactcaatttcacttgcatctagcaatgaatacatctgcaaggactttttcctttacatggagtgccatcagtttggcttatttgccacatcaactgcacaaagcaacgattcaagtgccactgagggtgctattcatggggtaccatcaattgagaaaattactttctatcttgtcaggctagacgatggcgcaatactagatgagaaagctttccgcaatgattttatcaatctggctcatagtattggagcttacttgtatgaggacctgctatgcattgtctctcttcgatatcaaacaattcatgtcctacagatacgagattcaggcaaccttgttgaagtacgcaaaattggtgcattttgccaggaagatgatgagctatttctccattcacatggtcaggctgcacgaggtgtttcttttcttcctggcatcaagcaacggttgttgtcatttatttttcgcaagacatggaatgaggaatctgatcagaccttgagagtccagcatctgaagaagaagttctattttcactttcaagactatgttgatcttatcatatggaaggtgcagtttttggatcgtcatcacctatttatcaagtttggtagtgtggatggaggggtttctcgcagcactgaacagaattcagcattctttgctgtgtacaacatggagacgacagatattgtttcactctatcagaattcttcggaggagctctattcattgtttgaatatttttatgaccattttcacacaaatccacaaaattcatcgcatggaaattttatctcgtcacattccaataatgttcatgctctcgatcaacttcggacaattaaaaataaagcaaacagcacctcacagtttgtgaaaaagatgatggcgtcactaccttacacttgtcaatcacaaagtccttcgccatactttgacctatcattgtttcggtatgatgagaagctgatttcagcgattgatcggcacagacactgtacagagcatccaataaaatttatatcagtgaaacagccaaatgttgtcaaattcaagataaaaccaggttcagattctggtgcttctgacagcagggcaaaaagaatatcttccttcttgtttcacccatttttccctctcgcactttctattcagcagacatatatgcagccaactgttgtcaatttacatttcaggagatagaacgatattgccgttccctcaattgtatttgtaacagttgtgagcggtgcacagctcagtaaaaattttggccgcttgtagtaggatgttttatcggcaaagatcttattataggcaaaggaaaaatgtgggtttaggttctc

SEQ ID NO: 567 - DNA, 463 bp, Oryza sativa
  ref <308>: DATABASE ACCESSION NUMBER: AK058684
  ref <309>: DATABASE ENTRY DATE: 2001-12-06
tcatctgctacggatatgatcaaacaagctcgaagcttgttgtgcacctgtctaagccctgtgaggtgagcttcaaggattcatccgtgatacggtacgcgcctcgtgtcaaggtgactctgtctcgaggcaagctctccgcgatcgaaggcatgaagaccaaggtggttgtgtgggtgaaggtggctagcataagcttggagagcttcaggtctgacaagatctgcttcatagccggcgtgaagaagctgaggcagaaggatgcttatgaggtccccagggaaggcatcgcagttgaggagttctgaacctgaattgatcagtgttatctcatagtttcattcttaccattttttttgagtccatgtggtgtgtgattctctggaggacacattggtgatttctggtgctgtgattcagcagatttgtatattggaaacatggagaatttgttcctcctgac

SEQ ID NO: 568 - DNA, 1293 bp, Oryza sativa
  ref <308>: DATABASE ACCESSION NUMBER: AK058685
  ref <309>: DATABASE ENTRY DATE: 2001-12-06
actatgatgttgctcttttagaggtcatgggagacttccagttgcaggtcccttcttttggctcgagtacaacctatggtcaggacgtatttgcattggctagggatgaaaacatgtgcttaatggttaggcatggaaaaatctcatggctggaatgtcccatgttattgaacaaccactatatgtttctgagttgtgatattcctgagggtggttcaggagggccagtgattgaccatgatggtaatatcattgggattgtatttgacaataacccgggtccggtagtaacctctatcactacaatcagaacttgcgttgagatgtggcatcagtttagccgtgttgctcgccccatacttggcatgcaattgaaggcggtggaactactggatgtctctaaactggaggaactctgtcttgacaacaatatcaccagcggtttcattgtgaatctggtgaaagttgattctattgcggagaggcttggtattagacgaggggatgtgattgtttttcaggatagttgttgttctactttacctcagttagaagactaccttctttctcttggctggggatacctgcaggggaaaagtttgacagtagatctcaagtcctaatctggaagcatcaagggagaagacgctaccatcaaaccgaattagagagagagaagaaagtgagcatgaaccataaacaagtgtgaatgattcaagtaaacaagatatattcatccaccagatacttccatcacattgcgcatgtgcatatcaagaccaagaggtacctcattgcttgtggcctgctggtatgggtgtctcacccaggccagtgcgggcgcgatggccgctgtcgaggttggaaatggcgtgggtagacaggggcacagggcacggcgttgcaaatagaggtcaggggcgagacggccgagaagatgtggtgctccaatccaatcattacgccggccaccacgccgtcatcaactccgctccgtcgcagcccggcgtggacgcgccgcctctgccgagcccctcggttgaagttcataatcttgttgactcatttagggaaaacattactttccctgtacaattctctgatgcttctaagtgggttgattgagggtgacttaaaaaggtgctgcattgtcacctagtaatatgactgaccatggaggatatgtgacattatcgaagaatgtgcaatccttgtttaatgaaatggcagtcttctaaacctatatgttgacaagctactagcaatagctctatatatgacacaaaatttgac

SEQ ID NO: 569 - DNA, 469 bp, Oryza sativa
  ref <308>: DATABASE ACCESSION NUMBER: AK058686
  ref <309>: DATABASE ENTRY DATE: 2001-12-06
acagatcaaccaaaaatcgccaccaaaaatccccaattccatcgtcgtcgatgtcggggcgcggcaagggagggaagggtctcggcaagggcggggcgaagcggcaccggaaggtgctccgcgacaacatccaggggatcacgaagccggcgatccggaggctggcgaggaggggcggggtgaagcgcatctcggggctcatctacgaggagacccgcggggtgctcaagatcttcctcgagaacgtcatccgcgacgccgtcacctacaccgagcacgcccgccgcaagaccgtcaccgccatggacgtcgtctacgccctcaagcgccagggccgcaccctctacggcttcggcggctaggagccttttgcattgtgtttgtcttgttaggaatctgcttgtttcggatgtagccctgtatcctgtaatgaagaagatgctagcagtaaaacttgtttgaattcacc

SEQ ID NO: 570 - DNA, 1180 bp, Oryza sativa
  ref <308>: DATABASE ACCESSION NUMBER: AK058687
  ref <309>: DATABASE ENTRY DATE: 2001-12-06
gttgtcccacccacacatcttgcggttgcgcggcggagagagagattgatgatgtcttcttggttgttccggcggagtgggccctcgggcttctcgtgggcctccaccgccgaccaagtcaccgccgggctctccgccgccggcctcaccgccatcgtcaccggcgcctccagcggcatcggcgccgagacggctcgcgtcctcgccatccgcggggcacacgtcgtcatggccgtccgcaacctcgccgccgcgcagcccgtgcgcgacgccatcctcgccgacgcccctgccgcctccctcgacctcatggagctcgacctcgcctccatgactccgtccgcgccttcgcctccgacttcgccgccaagggcctccccctcaatatcctcatcaacaatgcaggggtgatggcaactcctttctctctctcaaaggatggtatcgagttgcaatttgccactaaccatgttggtcattttcttttgactcatcttctcttggagacaatgaaaaagacctctcgtgaatcaaatgtggaaggaagaatcgttaatgtttcatcagaggggcacaggtttgcatatcgggaaggcatccgctttgccaagataaatgacgagtcggagtacaactccattggagcatatgggcagtcaaagcttgcaaacattttgcatgcgaatgaacttgctaggagatttaaggatgagggtgtcaacataactgcaaattctcttcatcctggatctatcatcacgaaccttcttcgtcaccacagtatcctagatgttctccatcggacacttggtaaattggtgcttaaaaatgctcagcagggggcggccaccacttgttatgttgcattgcacccacaggtgaagggtgtgtccgggaagtacttcagtgacagcaatgtgaacgaggcgagtgagaaaggcaatgacatggagctggccaagaggctgtgggagtacagcatcgagctcatcacctgacctgacctgacctgattcatgaactgaatgagagatactatgtaatgttgaagtttgagagagtgcctgtaaagtaaattgtggtaacttaactatggcagctaccatctggtgtgcgtgcgtacgtacatcaaaccaacatgatactagtagtgagtaataagcatatgcgaatcttcctc

SEQ ID NO: 571 - DNA, 881 bp, Oryza sativa
  ref <308>: DATABASE ACCESSION NUMBER: AK058688
  ref <309>: DATABASE ENTRY DATE: 2001-12-06
acaacaacggcaccggcgtgctcctcctctccgacgtcttcggcttcgaggactccgccacccgggacttcgcctaccgcgtcgcgtgccacggctacaatgttcttgtgccggacttgttccgggggagcccgtggaagaaggcggagaaggacggcttcgacgcgtggctcgccgggcacgcgccggagcgggtgtcgggcgacatcgacgcgtgcacgaactggctggtggacgagttcacggcggcgggggtgtcgaggaagctcgggataatcgggttctgctacgggggcggccggctggtggagacgctggcgcgcgacggcggcggcggcggcggcgcctacagcgcgggggtctgcttctacgggtccaggatggacgcgtcgctggcgccgcggctcgccgcgcccgtgctgttcgtgtgcggcgacggcgacccgctgtgcggggtggagacggtgcgggcgctggaggcacgcgcgaggggcgccagggccgccgtgtacgccggcagggggcacgggttcgcgcaccggccgcagtcgctggaggacgacggcgacgccgaggacgcgttcgcgctgatgcgggggtggctgcacgaccaccttctcgcactgatcatccttgttccgtttcaaactgttcgctcgtagacattggacagggttctatttatactattgactatgttactgcttgtgtaaatgtgtaatgcacatgggcattgcattgcacttgagaaatgagtagttgagtattgtaagttcaatagtttcgtttcatgttttggagtcggagctttcaatgtgtcactctggctgtggcatatttctctccaaaaataacacgaaacctttttagttgtccatgtg

SEQ ID NO: 572 - DNA, 643 bp, Oryza sativa
  ref <308>: DATABASE ACCESSION NUMBER: AK058689
  ref <309>: DATABASE ENTRY DATE: 2001-12-06
actcgccgccgccgccgccgcctccctactctctgccgccgccgtcgccgccgcttgctccgtactcctcctcttcagcggcgatgaagggacggcaaggccagcgcgtgaggctgtacgtccgcggcaccatcctcggctacaagaggtcgaagtcgaaccagtacgagaacacgtcgctgctgcagatcgagggggtgaacaccaaggaggaggttgggtggtacgccgggaagcgcatcgcctacgtctacaaggccaagacgaagagcaacgactccaccatccgctgcatctggggcaaggtcacccgcccgcacggcaactccggtgtcgtccgcgccaagttccggtccaacctcccgcccacctccatgggcaagaaggtccgcgtcttcatgtaccccagcagcatctaaaagcatccaaggtttcttgcctatgctgcgaaactgatagttgtcaccgtggagggttttatatcagctagtcacttggttaaccagtcagaaatttaagcggttttgaggagttttagcttttctttttatttcggactatttgctgtatcatgatgacaattatttgaaggctttttagcggatttgaagctacagaggtttagcatttgtatcgtgatctc

SEQ ID NO: 573 - DNA, 1080 bp, Oryza sativa
  ref <308>: DATABASE ACCESSION NUMBER: AK058690
  ref <309>: DATABASE ENTRY DATE: 2001-12-06
actttccatctcacacgacggccacactgacgagtagtagacggtgaacagcctacagggaggaggcatgggggtagccgtgacaatggcgagctacgccgccgtcctgcgcccgcacgcctcgtcgacgaggactccgcgcgggcctcgtcgtcccgcgggcgcggtgccacctacgccgcgccgggcagcgctgcgagctactacgcggtctcctccggctgtcgctgccactccacctccgcgggagcgggtgcagcagcagcagcagccgggtgacggccagacgacgacgcggctctactcgctggcgccgtgcccgctcctgctggcggcgctgctgccgggggccgagccggtgcgcgccgtgttcgagccgttcgtcgagctggtcaagacgtggggcctccccggctggctcgtgcactggggccaccccggcaacatggccgtggtgctctttgcaatgggtggctacggaacatacctgggcttcaggatcaagctatcggatgaccctgaagagaaggccaaggccaaggacctccacccgaagctcctcgccggcatgttcttcttcttcgcagctggcgccactggtggagtcaccgctcttctcacgtcagacaaaccaatctttgagagtccgcatgctgtgaccggcatcatcggccttgcactccttaccattcagtctatcctgccgacattgttcgagggtaatccttcgctgagaaatgcacatggactcctcggcagcggcatcatgaccctgtttctaatccacgcagccttcgggctacagctcgggctcagcttctaatcctcagccacaacatctggggtttgcttctctgtgattagctctcagaggcatccctgttacacacatcgaagagaaatgaaacacagagagagttttctctctcttgttttccctttgtttcttttcaccctgcgaatgttgacaataatgtagacctggtgttggattgtgtattgacgacaacgaattccatcgtgttgcgctgataattgtgtgctgggcactgtcaatttgaccgagacataatcagttgc

SEQ ID NO: 574 - DNA, 265 bp, Oryza sativa
  ref <308>: DATABASE ACCESSION NUMBER: AK058691
  ref <309>: DATABASE ENTRY DATE: 2001-12-06
tataaccttagataatgaggtctgaagataatgtagcatgcgaaaagagaacagggggacctactggagaactctgtatttgcaaaaccgatgtttttacctgtcaggttttctgtttttgtctccgcgactatgcggtttcactgtgtaatatagcagaaaaattaggctgcatttctcccggtacgaaatggaagggacaacacaaatttatatgtaatgcatcctttggctacatggacacttttatctgcaacgtgttctg

SEQ ID NO: 575 - DNA, 1522 bp, Oryza sativa
  ref <308>: DATABASE ACCESSION NUMBER: AK058692
  ref <309>: DATABASE ENTRY DATE: 2001-12-06
aaaaaaaaaccgcctcgacataaaaaagccgacgcgtctcttccaccacccaccatccccatctcccaccttctctccttccccccaactcgcctcctccgccgccgccgccgccaccggcggcgacttcccatatctccggaggcctacccttcccaccgccgcatcctcgatctgcgtgctgccaccgcgacgaacccctgtagcggtcgcctcctactcggtagaaccctagatccccccgataccccgcgcccctctccgccgccgccgccgtcccggctgacggtatgaaagtgaccgacgatctccagtaagatcccggagattaggagtccagcttcgcgatggcgatccgcatcaccatgtcgtactccggctatgtggcgcagagcctggcctcgccttttggcctgcgctgcaccgccgccgccgccgcctcctccggtgcggcgccgggggctggggctcgcttcctccaggacgcgctctcccgccccttctgcctcttcgcttcctcccgccactccgagtaccaccatgacgccgacgatcacaaccatccgaagcccaagcccaagcccaaggcaaaggctctccccgccgcctccgccatcgccgccaatggagggggccattcgctgctcctctcgcggtcgtgcgcaacgaaggctccggtgaatgacccgccatcatcgctggccatcgggttgctgatggtgttcacctccgggatgggctccgctactggccgcgtgggcgcctcatcgctctcggcgtcgccgtcaatatcgtcagcgttcaaccccgcggcgctcctcccattcctgcaggcgaccaagtggctcccttgcagtgacctcatcacctccgcggcgccatcccgcaaatcggctcgcccagttgatgtagctaaagcgcccactgctgcgcctgctgctacgcctgtgtcacgaactaagcctgcacctgcgccttcgccccgtcctgcacatgtgccctcgcctgcggtggctgccccttctaaggtgggcgtgaaagcattggttggtagtggtgtaatcaactccggcgtaatcaactccagtggtgcctcttctaatgtgggcgtgggcgtgaaaccattggttggtagtggcgcaattaactccggtgctgctggaatggtgagaaagagcagtcctgcacttggtgctgctgcagaggtgagcaggaggaactggctatcaaggtgggtgagctcctgttcggatgatgccaagactgtctttgccgctgtgactgtgccactgttatatagatcatccttagctgagccaaggtccatcccatccaagtctatgtatccgacattcgatgttggtgaccgaatccttgccgacaaggtaaagtcaatttcctgttgttgattgttctatgagtaagaatagtttgtgatgtgtgtttgctgatgttgttatggtattaggtttcatacgttttccgggagcctaatattttggacattgtgatcttccgtgcc

SEQ ID NO: 576 - DNA, 316 bp, Oryza sativa
  ref <308>: DATABASE ACCESSION NUMBER: AK058693
  ref <309>: DATABASE ENTRY DATE: 2001-12-06
gatgctcatggacgccacggcggcgatgctgatgcggcccgacggccaccccagccggtacggccacctgccgaaccagaaggtgcagctctacaacgactgcatccactggtgcctgccaggccccaccgacatctggaacgacatgctcttccagatgctcctcgtctaacgcgatcgatcgccaattcgccatcggtaaatgcgacttctactgcacagacaggattgctcttgctgttgtttcaaagcagttttgacaaggatttattcgaacttccccaatagattctttttttctctctcttttcccttc

SEQ ID NO: 577 - DNA, 1199 bp, Oryza sativa
  ref <308>: DATABASE ACCESSION NUMBER: AK058694
  ref <309>: DATABASE ENTRY DATE: 2001-12-06
acccgcgagcgcagaacggaaaaccgaagtctcctcgatggactcctccgcggcgtcggcggcggctgcggcggcggcgccggtggtgctggtgacgaacgacgacggcatcgacgcgccgggactccgcttcctcgtcggccagctcgtcgccgcccgccgctaccgcgtcctcgtctgcgcgcccgacacagacaggtcaggtgttagccactccatcacatggcgccctgcactccgctgtaaacgagttgatatagatggtgctacagcatttgcagcctcagggactcctgctgactgtgcttctttaggcatatctgggaagctctttgatggtttggttcctgatctggtagtcagtggaatcaatgttggcaacaattgtggatgccatgttatctattctggaacagttggcggtgctagggaggcattcttgtacgggattccttcattagccatgtcatatgattgggtcgcaagtcagagcagtgttaacgacctcaaagtagctgcagaggttgttatgcctctgataaataatgtgatggctgagataaagaatgggacatatcctcaaggatcattcttgaatatagatataccaactgatgctgcacaccacaagggatacaaaattacaaagcaaggaaggtatatggccagaattggttgggagcaaacagtttataagaagcctgcggtagaaagttaccagacagcaaacatggatgttgacagtgaaaaggacagtgaagtagatacttcatcagagaatgacctattgtttaaaagagtgcttgtgaggcgaagttatgatgaagaggaaggggatgatatcgaccacaagtgccttgtagatggatatattactgttacccctttgggagctctatcccgcgcagaagctgatgtcataccatactacaaagcttgcttgtcacgtctgtgatcaggatacttttgtggcccactaaactgaaaaagttggtgtcatggttgcaagttgcaaataaagttgcatgaatttcagttattctagatgattgttactgatgtattgccatattatgtacttccgtgattattcagagcatatgtatcacatagctcttactatttataactacagttccacaataattctttggtattatatttttctgagacttgttgcatatagagctatatcaatt

SEQ ID NO: 578 - DNA, 999 bp, Oryza sativa
  ref <308>: DATABASE ACCESSION NUMBER: AK058695
  ref <309>: DATABASE ENTRY DATE: 2001-12-06
aactgcttgcttggaggatggagataatgaagctgtgtgttcaagttgtttattcagcttctgcacgctttgtagagaccgccgtcatgttggggacaaatgtatgtcgcctaaagaaaaactacttattttggagaaacgccaagaagcaggaaaattacagggagatcagcataagtttctggaggaactacgcagcatcaaggcaattatgaaggactcaaaaatgtgcccgcggtgcaagatggctatccataagatagaaggatgcaataagatgtcatgtagtaattgtggccagtacttctgctaccaatgtaacagtgcaattgaaggttatgaacatttcaggggttcatgtaagcttttccctcaggaagagcttgatagatggaacatgcaaatgaatccgagggtccagcgtcaaaatgttgcacaagtgcaagctgaaatgtttcggcaatttgctcatccatgccctacttgccggcaaccatgtccgaagatgggaaacaacaaccacgtcttctgttgggcatgccagaagcacttctgtgcactgtgccggaaaactgtccacaagacctcacagcattttggtccaaaaggatgcaaacagtatactgcagatccctgagagttcttctcgtattacgcatcaccaaaaatacctcgacgacaatgctatttccagaggttctgtgcgcgtatgcgaatacatatactccttgcaccagggtgtattttcttcgagattccaaggtttggccgtgagtcttgttttaagtctcctgcttccttgtaccagtaaaagctcaaccatttatattggagggaattttgtgccgctcattcatttagctccggacttgttattgagaatactgtgtatattcaggatgcctgtcctcttacatcaggaacagaaacatgacaacaatctatggaaaaattcttgcaagattcttttcgagatgccagatagtgtttgttctgtcc

SEQ ID NO: 579 - DNA, 1275 bp, Oryza sativa
  ref <308>: DATABASE ACCESSION NUMBER: AK058696
  ref <309>: DATABASE ENTRY DATE: 2001-12-06
actcctcactcctcagtcctcgcctcggctcggctccctcccacgctccagctccgcctccaatggcgcctatggccatctccaccccgctcgccctccgcgcctccccgacccgcctcctctcccgcaggcggagcggagccaaatcaggcgtggctctcccaggtccacaatttgtaccacctggtatttcttcaaagttggacgagaggatacattgtcattcttctctgaggaaaaatacaattgtagcatcagagaatgaaaatccacctttaatgcctgccataatgactcctgctggtgctcttgatctggcaactgtattgttggggaaccgcattatcttcattggtcaatatattaactcgcaagtagcacagcgtgtaatatcacagcttgtcacacttgctgctgttgatgaagaggctgatattctgatctacctgaactgccccggcggaagtctctactccatcttagcaatttatgattgcatgtcctggatcaagcccaaagttggaacagtgtgctttggtgttgttgctagccaggcagcaattatacttgctggcggtgagaagggaatgcgttatgccatgccaaatgctagagtaatgattcatcaacctcaaggtgtatcagagggtaatgtggaggaggtgaggcgacaggttggggaaaccatttatgctcgtgataaagttgataagatgtttgctgcttttactgggcaaaccttggatatggtacaacagtggacagagagggatcgtttcatgtcttcatctgaagccatggactttggactagttgatgccctgctggaaacaagatactaacaaacaaacacttaggcacagtttgattagcagaggctggtacaaggattgtgaaactggagctgaagttgagattttcgccgtccttctagttcaaggactccaatgacaggaggctggatctgcgagacttgaatgcatcgccatcgctcctatgagcaaaacatctctgcgttgagtgtgattttttgctcttcttttttggatctggttttacatgccgccagcctatggtctcaatgcattggtcctgctaatgtttagtgtagaccagatgatcctttagacagcaaaacatcagttattactccgtagattttcccatgagctgattccagactgtgtgcaacttttgtgttccaattgcaaagtttgcaacccaacccaacccaacacatgggctgatgggctgttgacaaaggagagattttac

SEQ ID NO: 580 - DNA, 723 bp, Oryza sativa
  ref <308>: DATABASE ACCESSION NUMBER: AK058697
  ref <309>: DATABASE ENTRY DATE: 2001-12-06
ttcgccgccgcctctctcccgcaccaagctgcctgagccctagccgccgccgccgccgccgcgcgccaccaccgcaaccatggccgccgcgctcacccgcccgcctccaggcacggtccagtgcttcgggcgcaagaagacggcggtggccgtctcctactgcaagccggggcgcgggctgatcaaggtgaacggcgtcccgatcgagctgatcaggccggagatgctccgcctcaaggcgttcgagcccatcctgctcgcggggcgctcgcgcttcaaggacatcgacatgaggatccgcgtccgcggcggtgggaagacgtcgcagatctacgcgatccgccaggccatcgccaaggccctcgtcgcctactaccagaagtacgtcgacgaggcgtccaagaaggaggtcaaggacatctttgcccgctacgaccgcaccctcctcgtcgccgaccccaggcgctgcgagcccaagaagttcggtggtcgcggcgcccgcgcaaggttccagaagtcgtaccgctgagcgctcgccggaccgattcggagcggtgttctcttttccaccctatcaatggagctacttggcttgttctacatctatctagctactgcattactttcaagtttagtcttttaaaacttagccctgaaccttgcctttttgacattgtgaaatggatgtgattgaaatgtttaagactctactctagtctctgg

SEQ ID NO: 581 - DNA, 1034 bp, Oryza sativa
  ref <308>: DATABASE ACCESSION NUMBER: AK103997
  ref <309>: DATABASE ENTRY DATE: 2002-08-28
ggtgcaaagtgtgcagcgaactcgataaacattaaacaagctgtgtgaacttcttttttcgtgacaagtttaattctttctcgatcgatcgtcgtgatggctgacgagtacggccgcggcggctacggcaggtccggcgccggcgccggcgacgactacgagagcggcggctacaacaggtccagctccggcggcgccgacgagtacggccgccggccgggaggcggtgccggtggctacaacaagcccggtggcaccgacgactacgacagcggctacaacaagtccgccggcggcgacgacgacgactacggccgcaccggcggcggcgggtacaacaagtccggcaccgacgacgactacgacagcggctacaacaacaggtcaggggctaacgagaagtacggccgcaacaagtccggcgacgacgagtacagcggcggcggcggcgccgaagccgacgaggagtacgtcgacgggttgtcgtcccgggacgacccggagaagtacaggaaggaggagaaggagcacaagaacaaggagcgcctcggcgaggtgggcgccctcgccgccggcgccttcgccatgtacgagaggcaccaggcgaagaaggacccggagaacgcgcagcggcacaggatcgaggagggcgtggcggcggcggcggcgctggggagcggcgggttcgcgttccacgagcaccacgacaagaaggaggccaagcaggcggcgaaggacgccgaggaggaggcggaggaggagtccggctccggcgcccgcggcggcgaggggaagaagaagcaccacctcttcggctgatgatccatcgatcgatcgcgccatgcatgcggcggcggcggcgccatggccggcgtccgcgcgcacgcgtaaggtgtggccatgggcgtgtgcagctgaataagagccggggtttttgtacgtatgggctcagtatgtgtacacctcgtatatggtatggatgtacgtataagcgtatagtgtgtactataccaataaagctatctgttgctctg

SEQ ID NO: 582 - DNA, 1315 bp, Oryza sativa
  ref <308>: DATABASE ACCESSION NUMBER: AK058698
  ref <309>: DATABASE ENTRY DATE: 2001-12-06
atactagactactacacactacacactacacactactccaactctccaagagtcatgctccagccatgtcaaccaccgcgaaattagcaggattgcttcgcgatgagcaaggtcccgtcgcgttcaacgacgccgtcgacgaggatgccgtcccggtggaaccactcacggagcacgacgacgccatctccgccatgtcggcggcccactgcaacaacatgcagttccgctgctaccgaggattctggatatcggagatgtgggcgccgggtgtggtcgccgtgcaccgcagtttcgcacctcgcgccgacgacgtcctcgttgcgagcctgcagaagtctggtaccacgtggctcaaggccctgactttcgccaccatggcgcgcggcgcgtggccgccgtccagccacgaccacccgctccgccgcctcaacccgcatctgtgtgtgccttctctggaggtcctgtacaccctagggcgcgacgctctgctggacatgctgccgtcgccgaggctcttgtccacccacatgccgctctcgctgttgcctccttcgacctgcaagatcgtctatatttacagggaccaaaaagacacagcagtttctctatggcacttcatgaagcgtagacatcctgacttgacattctctgaggtacatgaggccttctgcaatggcatctgcatgggtggacctgcgtgggataatattcttgagttctggtacgcaagcaatgcagagccaacaagggtactcttcctgacctatgagaaggttcttcaagacccatgtgacgcagttaagaagctagctcagttccttggtcaaccgttctcgggtgctgaagaagaagctggtgttgtcacagagattgcagacctctgcagcattgacaatttgaggaaccaaaaagctaacaagtatggctccattggcgggaagatctcgcatgaatccttctttaggaaggggatggcaggggactggacgaaccacatgactcttgagatggcagagcgtttggattctatcctccgggagaagctcgatgggtcagggctaattgtgtgacgttattccttttatttattttgatttgtcttggtatgatgataaatctgtttccatgccaaaaataaatcggtattccacaaagtcctgatctttaccagctttctagtttcttttctccatacatggtttttaaggtcattcgggttgtgtgtgacggtagatgctggatttgtaatacacttttatgtaaaatcaaaggtgtttttaattattattctgtgatgaacaattggcatcgg

SEQ ID NO: 583 - DNA, 242 bp, Oryza sativa
  ref <308>: DATABASE ACCESSION NUMBER: AK058699
  ref <309>: DATABASE ENTRY DATE: 2001-12-06
tttgcatttgttttttttatggaaataaaggtgttcaaagtacagactctttctcctagctcctattatgttgtgaagtgtgtgatatgattgatcattgtacatctattagtcctgttgttccatctgcctgcttgactacaagcatgggaattttgcatgcgcggcacgctgatcacttgccagttgtatgtatgatctttggtgctaaatcacccgaaatgaaggaattttacctactc

SEQ ID NO: 584 - DNA, 338 bp, Oryza sativa
  ref <308>: DATABASE ACCESSION NUMBER: AK058700
  ref <309>: DATABASE ENTRY DATE: 2001-12-06
aagacatctcctcatttgagaatggggagatctacaaccaggctgatgctgaagggttcatcaggctatatggtctccctaccagagtccgggcaatgctggagaagggcatctaagcccctgttttctgcttaaaatgtacttctgtgctttggagaaaatgtagcaccacctcatgcagtgttgcctgcaggtaggcactgaatactttccgagttgtattagcgttcgaaagcttaactgccatctcaattcgattacaactttcgtgaagtgttgcatgatcatgtaatgaataatggggttgtacctgattttgacttggttgtctaaattgc

SEQ ID NO: 585 - DNA, 285 bp, Oryza sativa
  ref <308>: DATABASE ACCESSION NUMBER: AK058701
  ref <309>: DATABASE ENTRY DATE: 2001-12-06
tatatcatgtactaagaacatattgatgctcttcatcaaggttaaaaggtggatctacttccctttttcttttattggtggctaaagtagattgatgctaattattgacaagctggcaagaatattgaactctcatatctgcagaactggctacaaattcataggttctggatcatggagaagtaaaccttgatttctatttgtttttttttcatggccgtcttagtatagattgtaaaatatgtacaatataagttgcaattactacctgtgatgtgctgacac

SEQ ID NO: 586 - DNA, 1366 bp, Oryza sativa
  ref <308>: DATABASE ACCESSION NUMBER: AK103998
  ref <309>: DATABASE ENTRY DATE: 2002-08-28
ctcctcgccactctcccccctcccatcctcttccactctctcctctccccttcgtggcggcggcggcggcggcggcggcgtgacgaggaggagcaatggcgatggcctcctccgcctacgccccagcgggcggcgttggcacccactccgcgccgggcaggatcaggccgccgcgcggcctcggcttctccaccaccaccaccaagtcgaggcccctcgtgctcaccaggcgtgggggaggcggcggcaacatctccgtggctcggctgaggtgcgcggcgtcgtcgtcgtcggcggcggcgaggccgatgtcgcagccgcggttcatccagcacaagaaggaggcgttctggttctaccgcttcctctccatcgtctacgaccacgtcatcaacccgggccactggacggaggacatgcgggacgacgccctcgagcccgccgacctctacagccgcaagctcagggtcgtcgacgtcggcggcgggacggggttcaccacgctcgggatcgtcaagcgcgtcgacccggagaacgtcacgctgctcgaccagtccccgcaccagctcgagaaggcccgggagaaggaggccctcaagggcgtcaccatcatggagggcgacgccgaggacctccccttccccaccgacaccttcgaccgctacgtctccgccggcagcatcgagtattggcccgatccgcagcgaggaatcaaggaagcttacagggttttgaggcttggtggagtggtttgcatgattggccccgtgcacccaaccttctggctgtctcgctttttcgctgacatgtggatgctcttcccgaaggaagaggagtatattgagtggttcaaaaaggcagggttcaaggatgtcaagctcaaaaggattggaccaaaatggtaccgtggtgtccgaaggcatggcctgattatgggatgctctgtgacgggcgtcaaaagagaacatggagactcccctttgcagcttggtccaaaggttgaggatgtcagcaaacctgtgaatcctatcaccttcctcttccgcttcctcatgggaacaatatgtgctgcatactatgttctggtgcctatctacatgtggataaaggaccagattgtgcccaaaggcatgccgatctaagggagatgaactgagctgcaagagaggatagccaatatctgaattaggcttctctatattaggcactttctgtcagttctgtatttacttctgttgtccctgttgttatgtacttcttttactgtggttcttgtttgtggggaaataatattatgagaccttgattaagctcatccgaactcctgagcatggaatggatcgtgtgtagcataattagaatggac

SEQ ID NO: 587 - DNA, 415 bp, Oryza sativa
  ref <308>: DATABASE ACCESSION NUMBER: AK058702
  ref <309>: DATABASE ENTRY DATE: 2001-12-06
atttgacacatttttgctgcagcccataggccactcctcaagaaaaagaatgcttctgttctgacattgtttagatgcaggcatgcttgttgttagagaaagaaataagaggctgcagacagaattggtttttttcattacatgtacatataccatatagcaaaaacatgaaaccaattggaagatttgattctatggagggatggtggtgccactttgcagtggacagaagtacagggctagttgccaattgtagagagaagatagatgaagaaagacaatgtaattggtagggagataatgagggaggtggttgatgtctctttgcatatgcctctgctgggtctgtggtgctgatacatatatactacttgctgacatttttatgaataaaaatagcccaacattctttctt

SEQ ID NO: 588 - DNA, 1360 bp, Oryza sativa
  ref <308>: DATABASE ACCESSION NUMBER: AK058703
  ref <309>: DATABASE ENTRY DATE: 2001-12-06
aaaaagagacgtctatgagttcttctcaagagcagggaaggtccgtgatgttcgccttattatggacaggaactcgcggcgttccaaaggagttgggtacattgagttctatgatgctatgtctgttccaatggcgatagctctaactggtcaggtgcttcttgggcaacaagtgatggttaagccctcagaggctgaaaagaatctagttcagtcaaacgtggcatcaggtggaatagcttcaggtggagcaagaaagttgtatgttggcaacctacattccaatatcactgaggatcaattgagacaggtattcgaaccatttgggcaagtggagcttgtccagctgccggtagatccactaaccgggctatgtaaaggtttcggtttcatccagttcgcacggcttgaagatgcaaaagctgctcagagtttaaatggtcagcttgatattgctggaagagtaattaaggtctcggctgttactgagcaagctggtttgcaagttgggggtgcaactacgggagatttagatgatgatgaaggtggaggtttggcattaaatgcaagctctagagctatgctgatgcgtaaattggaccggagtggcactgcaaccagcataactggtggtattggtattcctggtgtgaacacatctgttgagttaccgtctgcatcggttactggtgctcctctgccaaccacttcactcatacaaccaacaatacctgctattggaacagttcctggcatacaaattcctggtactcaatctgcagatattggttcacctactgagtttctattgctgaagaacatgtttgaccctgcagtggagacagatcctgattttgatttggatattaaagatgatgtccaggatgaatgctcaaagtttggtgcagtaaatcacatttttgttgacaaaaatactgctggctttgtgtaccttcatttcgacagtgtagcagctgcgacagctgctcaacgcgcactgcatggtagatggttcgcaggaaagatgattacagcgacctttatgactgctcagcagtacaaaatgaagttcccaaactagcagactagtgatgggtggcaaagatcgagttggcatacaagtgtgtgaggtgaatctggagccgttcagccgttcgatcaaattcgtaatagtggagcagctacattagttcgtttcctgtaacattatggcgtattggatgaatctcggtccgaatagttgcatcgtaatgatgactgaatatgtgatcaactgcttatcaccctttttgataggaactgttcccggtgacaaggcccttctaaagaaatgcaagacaactctgatgtgttgccggac

SEQ ID NO: 589 - DNA, 1268 bp, Oryza sativa
  ref <308>: DATABASE ACCESSION NUMBER: AK058704
  ref <309>: DATABASE ENTRY DATE: 2001-12-06
aagcaagctacttctctcacatactacaaagttacaaagtcgcaacacctcgttgatcttgtttttgttagcgatggcggagcgcgtcacgaaggcgttgatgcggccattgttgtgttacattatcgtcgtcgccgtggcgccggccgggtgcgcggcgttcaacccgcggatgctgttcctggtgaagcccgatccgatcgtgctcaaggatcaccatggggtggtgctcagcgggaacgtcacggtcaatgtgctctactatggtcggttcacgccggcgcagcgcgccgtcgtggccggcttcgtgcggtcggcctcggcggcgcagcacccgcgtgtgccatccgtggcggcgtggtggagcaccacgtcgctgtaccgcggcggcggcgcgcggctgcggctcgggatgcaggtcatggacgagcggatgtcgctcggccggtcgctctcgctggacaacgtcacggcgctgacgagggcggcggggcaccaccgcggcgccgtcacggcggtgctcacggcgcccgacgtcctcgtggcgcccttctgcatgtcgcggtgcggcgtccacggccacggcggcggcgtcggcgcgcacggcagggcgcggtacgcctacctgtgggcgggcaacccggcgcagcagtgccccggccagtgcgcgtggccgttccaccagccggtgtacgggccccaggcgccgccgctcgtgccgcccaacggcgacgtcggcgtggacggcatggtcatcagcctcgccgcgctcctcgccggcacggtgacgaaccccttcggcgacgggtactaccagggcgacgccggcgccgggatggaggccgccacggcgtgcgccggcgtcttcggcagcggcgccttccccggctaccccggcaagctgctcaaggacccggtcaccggcgccagctacaacgccgtcgggctcgccggccggaagtacctgctgccggcgttgtgggaccccacgacgtcgcagtgcaagacacttgtctagacatggcgggagcggcgctcgcgggaagaagaaggcgaagtcaattgaatggtctagctcactagctagctgcatgagatcgaggagaacaaaaaaatggaaaataaatggctcatttattttcattcatcgtgttcacttgttgcatatatatccttgcgtgtgcatcctgtaatttgctccctgatcatgagaaggagagcttgtattgagttatgaacttatgatcgatgcattgtaggattgtagc

SEQ ID NO: 590 - DNA, 365 bp, Oryza sativa
  ref <308>: DATABASE ACCESSION NUMBER: AK058705
  ref <309>: DATABASE ENTRY DATE: 2001-12-06
cactccaacattccagctcacatttctccatgcttccgtgttaaggaaggtgaccatgtcatcattggccagtgcaggcctttatcaaaaactgtgaggttcaacgttattaaagtcatcccagctggttccacaggtggtgggaagaaagcattcattgcagcttgagcttatcgaaaatgcctaatcaatcactagttaaatatacaagtgttcacttagaattcttctagcttgctgttttgaccttctgtctaggtccctggagcatttgccactcatctgaaatgtatccgtgcaaattttgtttagatctctggtcatgcaaattgtggttgctgttgccctgtcgttgggccatgttc

SEQ ID NO: 591 - DNA, 298 bp, Oryza sativa
  ref <308>: DATABASE ACCESSION NUMBER: AK058706
  ref <309>: DATABASE ENTRY DATE: 2001-12-06
ggcaaaatctcagaagacacagtcgaagggtggtgctacccagaggggtgctaaaggtcctaagattggcggcggtggtgggaagcgctgaaagtctcttgcatcatagggagagttcttctggcttagccttctctccggccatatcgtagaaacagtaccttggtcaagttagcctgccgtctcgaattttcacctttttctgtgagatgacttgtcctgaatgcttcgggtattttgttagtcaatttacaattgcacttatgtttggctattataaaattatcaagttttctgc

SEQ ID NO: 592 - DNA, 700 bp, Oryza sativa
  ref <308>: DATABASE ACCESSION NUMBER: AK058707
  ref <309>: DATABASE ENTRY DATE: 2001-12-06
agcagcaaccggaggctgcggcggcggaggctggggtggcggcatatggaggcggcgtgatcgcgaagctggaggagcagtggcggaagacgaaggagcacgcggagacctacccatacgtgtggggatcctacatcctcgtctacggcggcctcgccgcctacctcacctggcgctggtgcaagctccgccgcaccgaggaccgagtccgcggactccaggcccgcctccgccaactcgccgccgccgaggagtcgcaggcggcttccactcctcctccgccgccgcagcagccgccgctgtctgggcccggcaagccaacctccggcccgtgacaaagtaagcccccgcagcttgaaaagaaaggtttacatgttacaaaacaattactgcatcatttgagctcgatgcaatgtttggttccttgcttagtagtaggtgatcctagattgggaggagataggtgaaatggagaatgctaagtggcctttggaaattcagtgctcgtactcgaaaccattctgccaaaggtttagatttttgcgatcaatgtatgatgatcattcccacgagcgatttgggtttttttgttgtcaccaaaacccatctttgagacatttgcatcatctctgtatttctcacattttagaggaaagacggtcacccacccagctttaattgaaagcataagagttcatgt

SEQ ID NO: 593 - DNA, 1178 bp, Oryza sativa
  ref <308>: DATABASE ACCESSION NUMBER: AK058708
  ref <309>: DATABASE ENTRY DATE: 2001-12-06
aaaaaaacaaggaggatgctggagcaaaatcatatgttcgagttccagctgaaatcaataatttggaaaaggattccttcgaactttacattcctggaaaaggttctgatcgagatctggctgatacaaaggctgcaaaacagaaagttgctgatatggctgccaaattggcatcagaacttatgccttctgatgttgcgaaggcattatggggaacgaccaagagttcttcgaagataaataaagaagtacaagagctcttaaagcttaccctcagcaaggctcgagtcaagctgactgagaatacaattttcaataggatcattactgacagtaacggctcagatccatttagtggtctctatgtgggagcatttagtccatatggaccagaagttgtgcagctccgtcgaaagttcggccattggaacagcacagatgaagtggagtttttcgagtatgttgaagcagtaaagttgactggtgatctgagtgtccctgctggacagataacattccgtgctaagattgggaagggcaaacgtcttgagaaccgtggtgcataccctgaagaatttggtgtgattgctagctataaaggtcaagggagaattgcacagcctggcttcaaaaatccccggtgggtggatggtgagctattggtgctcaatggcaagagcacgatcccacaccttggaggtgcggagcttggtttcctgtacagcgtgcctgagcagagtttcttggtactctttgaccggcttaaacttccagagtgatgagattatgctgaatcgagctgttctcacatgcaaattgcatgagtacagagagaagctgacacagtttcaagagaaacgtatagatgtcccgtcatcttcctgaaatcctgagatgcctcagctcctttattagtcagctcctacttgacaggagctgacctgtttgagctttttcagggtataagagagctgactattctggtctaactgaatactgctattcttgtccaatggaaaactggagcttcatatgagatcatgctaggctcttagatgacgcggtatagatataatttgtgtgacagttttgcattcggttttgccttaataatgaaggatgggaaagttttgtattgtctggatgctacagataaataaagccttatctttcaatac

SEQ ID NO: 594 - DNA, 1105 bp, Oryza sativa
  ref <308>: DATABASE ACCESSION NUMBER: AK058709
  ref <309>: DATABASE ENTRY DATE: 2001-12-06
gcgccgcaccatccgctgctcatccacgcaccgccaccaccgcccctacacgcgctggcgccgctgctcctcctccctccgcgcgtcggcgtcgccgctcctccttccgagcgccagagctggccctccctcccttcctccgcgcggcagcagccagtgccaccagccctccgtgcgtggagccgcccatccctccctccgtgtggcaacagcaggcgccggccccaccgctcctcctaccaccacgcgctggagctgcccctccctccctccttgcggcaacagctggcgcgctactcctccgcgcaccggcgccgccgcccatctgcgcgccggtgctgccccttcctctctccgcgtggcagcagccgccgccgctgctcctccatgcgctggcgccgaccgtcgtccctctcttcgctcgtcagcgccgctgctggcccgctcctggtccctccacgcgccggccagccaataagattcggatgagaatggcagaaggcagcggacctcgatggcgagggagttgctgaggaagtacgcgaggccagcgacggatgcgaacatcgcgcactcgacaagttgccgcgttctctcgagagcctgtcccaagtcctcttcctcttcatcataatcgtcacccacgcgccgtcgctcggctccaccgacggaggccagacgcggagggtttctagctcgagccgcggcggcggcggatcggaaggaggatttcgggatcgaatagacggccagctggcggcggagatgtgggtgcggtggcggcggcggaaagaggagagggcagggatgaaggcgaagaagcatagccgccatggctatccaaagttacgccccgatcgagtagcatgtgagccctggttcccctcgtgctaccacaggggaggcggcgacggagttgacacctcacagcggcggggatgagggagaagggcgcggggcgacggcggcagcggcggcgcggccggcggcgtggggaagaggaggcagaggacgcgatgctgttttgataaggatcgaacggacggtggcagttcactctccctccctctcgatgataaaagaggaccgtcaccgaagttttttt

SEQ ID NO: 595 - DNA, 1524 bp, Oryza sativa
  ref <308>: DATABASE ACCESSION NUMBER: AK058710
  ref <309>: DATABASE ENTRY DATE: 2001-12-06
tccataaacacagcaggctcacgcacacgcctccgccccggaggaaggaaggaaggaaggcaaggaagccaagcccgcgaccccgacctacccccaccaattcaaccctccctcctcagatccaccaccaccgagcgcccgcgatgacggccaagggcggcgccgcgccgtcgccgggcggcgcgggcggcctcccgaacggccgcttcttcaccgtggggctcgtcaccgcctggtactcctccaacatcggcgtcctcctcctcaacaagtacctcctcagcaactacggcttcaagtacccaatcttcctcaccatgtgccacatgtccgcctgcgccctcctctcctacgccgccatcgcctggctccgcgtcgtccccatgcagctcgtccgctcccgcgtccagctcgccaagatcgccgccctcagcctcgtcttctgcggctccgtcgtctccggcaacgtctcgctccgctacctccccgtctccttcaaccaggccgtcggcgccaccacccccttcttcaccgccgtcttcgcctacatcatgaccgtcaagagggagtcctgggtcacctacctcaccctcgtccccgtcgtcaccggcgtcatgatcgccagcggaggagagcctagctttcgtctgtttggattcatcatgtgcattggggccactgctgcaagggcattgaagacggtgttgcaaggaatcctcctttcatccgagggggagaagcttaattctatgaatttgcttttatacatggctccaattgctgttattctcttgctccctgctaccatcttcatggaggacaacgttgttggcattacaatagaactggccaaaaaggacaccacgattgtttggttgctgctgttcaattcctgtttggcatattttgtcaatttgaccaatttcttggtgactaagcatactagtgcattgactctacaggtcctaggtaacgcgaaaggtgctgtggcagttgttgtctcaattctaatattcaggaatcccgtatctgtaaccggaatgctcggttacactcttacagttataggcgtaattctttacagtgaatccaaaaaacgcaacaagccctgaatattttagaatgccgtaaatatggctgtcctttctcattccggtggatgcccagggctaatatatgacggggaactacatcggggacaatcgcaacaaatcctgcactgtatggagcctgattggatagcaaggatagaagtccaataatacatgtagtttgcccatgggatctgggaggcattttgttttgctaatggaaatgatcaatagaatattttttttttgtgtttagagaactgtggctcacgttgccaacattggttaatacggttagttcgtggaaattgtttgagtcattcatcggttattgtaagttcatgttcccccattttgttttttctctgaagattgcctgtaccaaactttgctccaggaccccctaatatattatgacagtgaatttaatccc

SEQ ID NO: 596 - DNA, 1362 bp, Oryza sativa
  ref <308>: DATABASE ACCESSION NUMBER: AK058711
  ref <309>: DATABASE ENTRY DATE: 2001-12-06
aacgagcgcccgatcaaaccctggagttgacaggtcaagccattgatttcttgagaggaattttcaatatgtttgacacagataatgatgatgctttgctacctgctgagctggatgatcttttttccactgcacctgaaaacccatggtctaataatccatatgtggactgtgctgaaaggaatgtcttgggtgggttgtcccttgaaggatttctctccaagtgggctcttatgacacttctagatccagcaaatagttttgccaaccttatatatgttggctattcgggtgattttggctcagcatttaccactatgaggaaaagacgagttgatcgtaaaaagcagcaaacgcaacggaatgttttccagtgctatgtttttggtcccaggggtgctggaaagacagcattgctacaatcattccttggaaggcaaccttctgatgctctgcctatgaatggtgaacggtttgcagcaaatactgttgaactatctgggtccagaaagacacttgtatttcgagagattcctgaagatgatgtcagaccattactggctgatagggaatccttggcaccctgtgatgtagcagtattcgtttatgatagctgtgatgaattttcttggcaaagaacaagggatttgcttgtggaagtggctacacatggagaaaatactggctatgaagttccttgtctgattgttgctgctaaggatgatcttgaccaatctccattggctctgcaggaatcaacgagagtgagccaagacatgggaatcgaaatgccaattcctattagcgtgaggttgagagatttgaacaatattttctgtagaatagtccatgctgcgcagcagcctcatctgagcattccagagactgaagctgggaaaacacgcagacaataccgtcaacttctgaaccgttcccttatggttgtctcagttggagctgccgttgcagttgtgggaatagctgcttaccgagtctatgcagctaggaagaacacatcgtcttgaagctctcctggacagtgctgaaataaagtgctttcctcctttcactgcccatcaaccggatcttttcagataattttttacttctgagcttcataacgtgaaactttgtccagagaacccttttatgtacagatgtgttttcagcaatcaatcgttctgcgtattggatttcgcattttgcggctataattatgtagctgataaactgctatgactaaactagctctggcaaaacattagtactgccgtacaattttgttcttttagcaaatgtgctgttactatatcatgtctcggttctttttttaattaatggccctggattcttttggcattg

SEQ ID NO: 597 - DNA, 1291 bp, Oryza sativa
  ref <308>: DATABASE ACCESSION NUMBER: AK058712
  ref <309>: DATABASE ENTRY DATE: 2001-12-06
gcagcgcgcgacgaaggggattggattgggttgggttggattggagagagagaatggcggcgccgtcgtccctcgcgtcctcccacctctcccgcctcgccgacctccgccgcgcaggcgtcgccgccgccgccccggcgcatccgcagcagctccgcctcgggtgctcccgccgccgcgcccagcgcgtcgtcgccatggccggatccggcaagttcttcgttggaggcaactggaagtgcaatggaacgaaggactctgtcagcaagcttgtgactgaattgaatgctgctacacttgaacctgatgttgatgttgtggttgcaccaccattcatttatattgatcaggttaagaactcactaactgatcgtattgaggtatctgctcagaatgtttggattggaaaaggaggagcatacactggagagatcagtgcggagcaattggtggacattggctgccaatgggttattcttgggcattcagagcgtagacatgtcattggtgaagatgatcagtttattgggaagaaggctgcatatgccttgagtcaaaatgtaaaggttattgcctgcataggggagctgttggaagagagagaagcagggaaaacttttgacgtctgttttaagcagatgaaggcttttgcagacagtattacaaactgggcggatgtagtaattgcacatgagcctgtttgggctattggaaccgggaaagttgctactcctgagcaagctcaggaagttcatgctgctgttcgtgattggttgaaaaccaacgtgtcacctgaggttgcttccggcattcgaattatatatggaggttctgtaaatgcagccaattgtgccgagctagcaaagaaagaagatattgacggcttccttgttggtggtgcctctttgaagggtccggattttgccactattatcaactcggtgacttccaagaaagttgcagcctgatgtaacccttctgtagaaataaatgacccagaggcagcgagacggctaccacaccatattgcttgatagagatacttcgtgttcaatcaccgtgcttgttttggcacacgagggaataatgcaagatgccactgtgttgttttttctcatagacctggctggcgttacgagagcctattatttgttagtgagtgagtgaccaataacacgtgaaaaattgctgctatatgtggtgttacccgacatctgtggaaggcaaggaatgttgtggtgttgagcataataatcgatgttgccgtaggatcgttgatcctccacacctt

SEQ ID NO: 598 - DNA, 1323 bp, Oryza sativa
  ref <308>: DATABASE ACCESSION NUMBER: AK058713
  ref <309>: DATABASE ENTRY DATE: 2001-12-06
ctgatgcagagtccatgatggcactgaaagattttgttaacaaaatgggttcggataaggtgctttgtgaaggaaatggtccaagtcctcctgcggatctacgttctaactacctaatgaatactagcattgctgggcttgagaaagctgatgtcttccttttggttggtacacagccaagagttgaagctgctatggttaatgcaagaatccggaagactgttagagcgacacaagctaaggttgcttatattggacctccaactgacttcaactatgaccatgagcatcttggcactggaccacaaacccttgttgagattgcagagggtcggcatcccttctgttcaactctgcagtctgctaagaatcctgtcatcattgctggggccgggttatctgaccgggaggaccaagatgcccttttctcaacgatagagactgtagccaaaaaattcaatgtggttagaccagactggaacgggcttaatgttctattgctgcatgctgcacaagctgcagcgcttgatcttggtcttgttgctaatcctacagagagcatcaagtccacaaagtttctgtatctgatgggagctgatgatgtagacttggacaaggttccggatgatgcatttgttgtttaccagggacaccatggtgacaaggctgtgtatagggccaatgttatcctgccatcatcagcattcagcgagaaagaaggcacctatgagaacaccgagggatgcactcagtggacaatcccagctgttcctactgttggtgatgctagggatgactggaagatcctccgtgctctctctgaggtggctggggctcaacttccttatgatagcctctcaggtgtgagggaccggattagcatggtagcaccaaaccttgtgcatgtagatgagagggagccgtgcactatttcctctgaagtgaagcctccggtaaagcaacaagtgagctctactccattcaaaactgttgtggagaacttctatatgactgatgcaatcacaagagcctcaaagataatggcccaatgcagtgcaaccttgttgaagaagtgaaatctacacctttcggaagctattcatcggcagaaaagattttagttccttgtttttgctccaaatttccccagttgttgcatgcttggttggaaattggagtataatttggactgcccttagatttgaagagcagcaaaacttggtctgtgaatttttcttgtgtatgagaagcagagcatactcaataagcttgttgtccttctgaatcatgcaacagccacaggcaataattttgttccttttt

SEQ ID NO: 599 - DNA, 1007 bp, Oryza sativa
  ref <308>: DATABASE ACCESSION NUMBER: AK103999
  ref <309>: DATABASE ENTRY DATE: 2002-08-28
agtgttagtcttagcgaatccagcagcagaagcagcagcagcagctcagccgccgccgatggcgtccacgatcatggccccaacctcccgcgtcctcgccgccaagacccccttcctcggccatccccgcccctccaatgcccccgtccgcgacatcgccgccgccgccaccggccgcatcaccatgagcaaggagctgtggtacgggccggatagggtgaagtacctggggccattctcggcgcagacgccgtcgtacctgaggggcgagttcccgggcgactacgggtgggacacggcggggctctccgcggacccggaggcgttcgcgaggaacagggcgctggaggtgatccacggccggtgggcgatgctcggcgcgctgggctgcatcacgccggaggtgctcgagaagtgggtgcgcgtcgacttcaaggagcccgtgtggttcaaggccggcgcccagatcttctccgacggcggcctcgactacctcggcaaccccaacctggtgcacgcccagagcatcctcgccgtgctgggattccaggtcgtcctcatgggcctcgtcgagggctaccgcatcaacggcctccccggcgtcggcgacggcaacgacctctaccccggcggccagtacttcgacccgctcggcctcgccgacgaccccgtcaccttcgccgagctcaaggtcaaggagatcaagaatggccgcctcgccatgttctccatgttcggcttcttcgtccaggccatcgtcaccggcaagggccccttggagaacctgctcgaccacctcgccgaccccgtcgccaacaacgcctgggtctacgccaccaagttcacgccgggctcgtgaatggcccagccgccattgtagactactctctctctccatcgctcgatgtaccaatgcttgcacagattgtacgatgctgtgatgaatctgatatgatccatccagaattcagaaactgaaaaaagttggggtttgcaacttatgtgtc

SEQ ID NO: 600 - DNA, 1418 bp, Oryza sativa
  ref <308>: DATABASE ACCESSION NUMBER: AK058714
  ref <309>: DATABASE ENTRY DATE: 2001-12-06
acctcgcctctctctcctctctctctctctagtttacttttcttggagccaccaagaaaccagccatgtccgtgctcggtgtcttcttggcgtcgctgcttctggcggcggtggcgccggcgagggcggcaggaggggggtgcgcggcggagaggttcagcagcaaccgcgtgtacgcggcgtgcagcgacctgccccacctgggcgcgtccgtgcactggacctacgacgccgcggcgtcggcgtcgctgtccgtggcgttcgtcgccgcgccgccgtcgcccggcgggtgggtggcgtgggggctcaacccgaccggcggcgggatggccggcacgcaggcgctcgtcgcgctgcccaaggggggaggaggcgggtacgaggtccagacgttcgacatcgaggggtactcgctctccgcgccggggaagctcaagtacccggcgaccgacctcgccgcggaggtcgccgccgacggccgcgtcagcgtcttcgggaagctggcgctgcagaacggcaccgccgaggtgaaccaggtctggcaggtcgggccggtctccagcgggtccatggtgccgcacgccatgagcagcgacaacaaggccgccatggggaagctcaacctcctcaccggggcagccacctcttccggcggcggcggcagcaacctcaggaagaagaatacccatggaatcctgaatgctgttagctggggtcttctacttcccatgggagccatatttgctagatatctcaagacattcaaatccgccgatcccgcgtggttctaccttcatgtagcttgccagctgattggttatggtgtgggagtttctggctgggccactggcattcatctaggtaacctgtctaagggaatcacctattcgcttcacagaaacatcgggatcacagtatttgcgcttggtaccctacagatctttgcgcttttcctgaggcccaagaaggatcacaaataccgtatctactggaacgcctaccaccactcggtcggttacaccatcatcatactcggcatcgtcaacatcttcaaagggatgtccatcttgaacgtggagcagaagtggaagacgggctacatcatcacgatcagcatcctgggtggcattgccgtgatcctggaagctgttacatggagcatcgtcttgaagaggaggaaggaggagaacaagtcctataacggcgcttcaaacggtcacttgccactctctatgtaattcttgtagaggcaggagggacttgtgatccctacttatatattcaggaggctatattcagttatgtttatgcttataggattaggccttgtgatcttggtatcccttcttttgtatgatatttgtatactgcacactatactggagatgagagatgccagtacagcttgtttgattttt

SEQ ID NO: 601 - DNA, 1437 bp, Oryza sativa
  ref <308>: DATABASE ACCESSION NUMBER: AK058715
  ref <309>: DATABASE ENTRY DATE: 2001-12-06
ttcttacttctggtggtgtttccatgggcgatagggatcttgtcaaaccttgtttggcaagcatggggaaaattcactttgaaaagattcggatgaaaccagggaaaccattaacatttgctgagatcgtaacagaagattcatcaaaaccatctaaaaaggttcttgcatttgggttgcctggaaacccagtgagttgtgttgtttgcttcaatctctttgttgttcctgcaatacgttcactctctggctggtcaaatcctcatctaccaagagtgcacgcacgtctactgcatcctttaagaggagacccacatcgtcaagagttccatcgtgcagtgatcagatgggtgcctgatgatggatctggtagacctggatatgttgctgaaagcacgggccaacaagctagtagccgcctcctaagtatgaaatctgcgaatgctttactggaagtaccattagtggggcagatgttggaggctggaacatctatgcaagctatacttatttctgatatgaccagttcaccttttgacaagctacccactgcttcaaatccgttgccatctcatttatttccttctgcaaaaagtgtttccacagatttgtctcaggttccagcctcacagaatactgaagttaaagtagcaattctgacagtgagcgacactgtttcattgggtgcaggccctgacaggagtgggccaagggcaatatctgtagtgaattcttcatcagagaaattgggtggagcgactgttgttgctactgctgttgttccagacgatgtggaaaaaatcaagaacattttggtgaagtggagtgacattgatcgtgtcagcctcatcttgacactaggtggtactggtttcacacctagagatgtcacaccagaggcaacaaaatctgtcatagagaaagaagcacctggcctcacatatgtcatgcttcaggaaagtttgaaggtgacaccattcgcaatgctatctagagccactgcggggatcagaggatcaacacttatcatcaacatgcccgggaacccgaacgccgttgcggagtgcatggaggcgcttcttccagcactgaaacacgccctgaagcagataaagggtgataagagggagaagcacccgcgccatgtccctcacgctgaagctgcgcctgtggaccagtgggatcggagtttccgagccgcgtcgtccggcaggggatgctcgtgcgagccatgatcggggccgatgagaatttggtcctcgcgggctatcggcgttcacttcgtcagcttgtcagttccttcgttagcccagccgcgttcagctcggagctaagcagtgacgattttggttctgctcactgttttgttttcacttcacccgaaccttacgaacaccagtgtgacaaataaagtggttacagtatatttgatcttgt

SEQ ID NO: 602 - DNA, 513 bp, Oryza sativa
  ref <308>: DATABASE ACCESSION NUMBER: AK058716
  ref <309>: DATABASE ENTRY DATE: 2001-12-06
gtcctgaggatttacagcaagatctggaaagaaagaaaaactggacacccaagaatatgtgcatgttatttgtatgacagtcttggtctgttttttttactacgggggcaggcaggcagcacaataagcggaggatcgggccattttgatgtcaatttgattgaatggcagatcctttggagctacgaaaagcagagaagtacattggttccttgttttgacaacaactcttccaactgtcctgcctgtactatctcatttctaaggatttcactaaggaagcattataatgttgtcacgttctgcattgtaaataaatgcctgcagaagtgtgtctagaatagtggcaaaagaagttaccctcaaatgacttgaaaattgacttctgagttctgaccaccacaattttagcagctaaactcatggctctcaattgtaattatttatgtacctaattcgatctgtgctacttccattgactagttgcaacaaataaaccacaccttcatttcc

SEQ ID NO: 603 - DNA, 650 bp, Oryza sativa
  ref <308>: DATABASE ACCESSION NUMBER: AK058717
  ref <309>: DATABASE ENTRY DATE: 2001-12-06
cagaggagagatgtttatggagcttgggaacaataccttggcttggaacatactgacacaacaccaaaaaggtcttatacagccaatcagaatcgtcacacttttgagaagcctgtgaaaatttataattgagaagatttatagctgggcttgaagccctgaacaaaggcctcgtctggatagcatgccatgccaaagagagatcacaaagtaagacaacctcaacagaagaaacatggcaacaaaacatatggccattacgctgaggcctatattgcttcccgctggttgacgccgttggtgcagcttactcgtgatgtagtgggcgtcagggattttttttcaaggctttccatcttgtttccgggcaaaacaattgtgtcgagtgtgatggccccgctaggataaggtagatgttgctttatttgtgtagagcaaagctggtacataagaaaaagattttggtaggggcatgtatacagaattatagccgtgactgattgctttatttgcttctcccgtttctgttagccttggagcagtgggagaatcgtataatggggtttggtgttggttccaattttccatgtctattgataaaatgtaagagaataatttgccagatagtgcagctttcagttcctgttagc

SEQ ID NO: 604 - DNA, 848 bp, Oryza sativa
  ref <308>: DATABASE ACCESSION NUMBER: AK104000
  ref <309>: DATABASE ENTRY DATE: 2002-08-28
attgcatctcaacagagcaacacaaactcacacattgccaattccctttcttggtttgattctggctgctgcaatggcttcgtcgctggccctggtagctctgctcctcgtgagctgcgccgtggtggcggcggcggcgaccaagtacaccgtcggcgacacgtccggctgggcgatgggggcggattacaccacctgggccagcgacaagaaattcaaaatgggcgataccctcgtgttcaactacgccggtggggcgcactcggtggatgaggtgagcgcagcggactacgctgcgtgcaccgctagcaacgcgctccagagcgacagcagcggcacgaccaccgtcaccctcaagaccgccggcaagcactacttcatctgcggcatcgccggccactgcagcaacggcatgaagctcgtcgtggacgttgccgcggcctctccagccccagccccaaaagccccgtccaccacaccgacgactccatctacgacaccagcgacaccggcgtcccctggcacaagctccggtctgacgcccacaaccccagcaacggtgctcgcgccgcccgccaagcagtccgccggtgcagctgggctcagggccaggtcatgggctatgctgggcctggcaggacttgccgccgtgcaactgggcctcttctagggccaaggccagggtggaggcagtgctgttaggttgcatgtcatttagacatcgacacacaccgtgtcaagtgtttgttcaggaagtgagttgaggtttcttttcacagagggaactggtgcttttgttgtggtgagctggcagtagttggatgctgtgtttgaattgacttcctgtt

SEQ ID NO: 605 - DNA, 1312 bp, Oryza sativa
  ref <308>: DATABASE ACCESSION NUMBER: AK104001
  ref <309>: DATABASE ENTRY DATE: 2002-08-28
ctcgagccgacgagttcgccgtcggattctcgcaaaagcggcggcgccgccgacgaggacgagggacagggggagcagtagcaggcgaggcgcggcgcggcgcgggtttagatggagggcggcgagcaggaggagtcgtcggcgcagcggcgggagcgcctcctcgcgctccgctcctccgccgcagcagccccctcgccgtcggccgcaccgcatccgccgccacctgcggcggacgcgtgggatctcccggtgcgcgacctgatggacgcctccgccaccaccaccgccgcggccccacgcccgcctccgcggttcgactactacaccaaccccgccgccgccttcgcctcctcgtcggctgcttcccacaagcgcaaggtcgcggagcccccgcctccgtgatcagggaactatggaagcggttatcctcctccacaccagcaccatatgaccccaccaccaattcacactccatcccgattgtcccatgattcaccagggggcagtccttggcgaagtcctatgcagttccaggctccgatgtcaggataccgaggacctcctcctggcgctccaccaccatggagcccacattctggcgttccaccaccatggaatccacattctgctcctccatctcaaggcctttatccacatccacctagctatggacccagaaactataatcctggccaaggaggcggccgaatgaactatggacccagaggtagaccagactcaccttatggaagagggaggggccaaaacaactacaacaacccaggatcaaggggaagagggggaagggatggctcaggcactcaaaactattctggatggcaagatggaagagttcgctaccacaaaagcatgactgatgacccatggcgggatttgcaacctattgttggcaacataatgatacccagggatggatccaagtcctggcttccagaatcactgcgtgcaaagaaggatacatctgaccgaggccaagtcaagcctccatcaggattgagcttggcagagtaccttgacttgtctttcaacgaggcttctaatgatacgtagacctttgtattgttaaaaatgctgttgttctcggtagagttttgtgcccgctgtgtttcactttgaacgtggttcgtttctcattttcattgcttccattggcctaggtagtacacacttacatcaggggttacaatgtcctggtgtccatttactagcactgtttatgaaattaccctcatgatgtggtaacatttttacggttatttgaggcactaatacatgtaggaaaaatgat

SEQ ID NO: 606 - DNA, 1269 bp, Oryza sativa
  ref <308>: DATABASE ACCESSION NUMBER: AK058718
  ref <309>: DATABASE ENTRY DATE: 2001-12-06
tgcattgaagatgaactacgcatgagatctttcaaatctcggttttaatggttggggaagaccctgaaacaagaatgaagggacaagaagggcacttgagggtgcagcccgtcggtgcaattgcaggcgaatcgcaggccgtcgccatatgtgcattgccctccgcttgctacgcatttggggcaatcacctgatgcccccgcccaatccaggagaaaaccactcatgctggcaacgtaaccatctctactcccattgggatgctcaaggatcggcaccatctctactctacatagaagtggggtttgtgtggatatgaaggaataaatggccatcttaagagaatttggaacgatagagggcatggaaaacctgctacctgaagatgtgctcagcaacatcatccaccgtcttgcaccacgctaccttgccatatcccgctgcgtctgcaagacctggtgtaccatcatcgaggcccacaacctgctgcatgtggacctcctcccacggccgttgtgtggaatcttcattaactttaatgagttaagcatgtcagagttcttctcccgcccctcaaaaggcccaacggtatctggcaactttgactatttgccttgcagctcctgcattatagaccactgcaatgggcttctcttgtttcacaagtatgtggttaacccagccacacgacagtcggcgccactgcccccatgcccatatatggtcgtagagcacattttccacagggagtaccttgtcttcgaccccacgttgtcaccgcattttgaggtattcatgatccctgagatccgacgatccaatgtgtggtataacatgttgaattcagatgacaagttagaccctgcaatagaggaattagaatggccaccgtcgccttgcatcctgcatgtgttctcatcaaggacaaaggtgtgggaggagaggtcatttgttcgagaaggggaggctgcagggaatgtttctgacatgcggttggatcacccatatgttccagacacttctgtttatgttccagacacttctgtttattgccggggagtactttatgtatattgccaaaacaagtatgttatgaggtaaatactcacttcattggcattatcattcatctttgtacctagtaatgaaacgaaaattcaattgtcgtttattaatatttctcaaatatttgattcttgtagaatatcattatccaatgggaaatatcaagtaatcaagccaccttcagattgtgaggggatggcatac

SEQ ID NO: 607 - DNA, 2082 bp, Oryza sativa
  ref <308>: DATABASE ACCESSION NUMBER: AK058719
  ref <309>: DATABASE ENTRY DATE: 2001-12-06
gaagtactggaaagtggtccagtgaaagtggaagagatggcaaagaagaaggaatttcttgacgaggaagatttggacaagttggaagacagaccccctattgtaactatcatgggccatgtcgatcatggaaagactaccctgttggattatatacgcaagagcaaggtggtggcatctgaggctggcggaataacacaagggattggtgcctatcaggttattgtacaggttgatggaaaccctcatgcttgtgtttttcttgatactccagggcacgaggcatttggtgcaatgagagctcggggtgctagggtaactgatatctgtatcattgttgtctctgcggatgatggtgttcgtccacaaacaaatgaggcaattgcacatgcaaaggcagctggagtccctattgtgatagccataaacaagatagacaaggaaggagctaatgctgaacgggtcatgcaagggctttcccaaattggacttatgccagaggcgtggggtggtgatatcccaatgattcagataagtgctcttaatggagagggtgtagatgaactattggagactatcattcttgttgctgagctgcaagaattaaaggccaatcctcatagaaatgcaaagggtacagttattgaagcatgccttgacaaagctaaaggatctcttgccaccctagttgtacagaatggaaccctaaacaagggtgatattgttgtgtgtggtgaggcttttggaaagatccgtgcaatgtatgatgatggtggaaagcttatcgataaggctgggccatccaatgccgtgcaggttattggcttgaataatgtaccccttgctggtgatgaatttgagtctgtggacaaccttgatgttgcacgtgaaagggcaaacgcacgtgctgaagcactgagaattgaaaggatatcttcgaaagctggggaagggaaagtcactctgtcatccattgctgcatctgtttcatctggaaaacaagtaggaattgatacacacgagcttaatatcatccttaaagttgattttcagggttcagttgaggccattaggcaagcaatccaagtgctgcctcaagaaaatgtctccttgaggttcctacttcaagctccgggagatgtgagtgtcagtgatgttgatctggctgttgcttcagaagggattatatttggttttaatgtcaaagctccaggatcagttaaaagctatgctaagaagaaaagtgtggaaattcgtctgtacaaggtgatctatgatttgattgatgatttgcggaatgccatggaaggacttcttgaacttgctgaggaggaagtaccaattggttcagccaaagttcgtgctgtttttagtagtggcagtggcaaggtggcgggttgcatgattactactgggaaagttgttcatgactgcaatgttcgggttcttcgtaaagggaaagaagtttatatgggtacacttgattcgttaagacgggtgaaagaaactgtaaaggaggttggtgctgggctagagtgtggcattggggtagatgattttgacgaatgggaggaaggtgatgtcgtggaggcattcaacacagttaagaagacaagaaccctagaggaagcctctgcttctgtgactgctgctctaaaggatgccggcgtccagctgtagaagtggcaaagctgataggcatccatcatacaacaactgcaggggaatcggagccaaatttatcatggcaagaaagaaagaaagacggggtgcattattgatcacattgctgttgttagcgaagaacaacaaactggttactcgatcgtaaatacgacgaacttatgcaagccatagtacagtagtcaccaaacctgagcttagccgtctcttatagcctgcatcagctgatgctgtattttgatgacataacaagagaggagacagctgttacctttttttagtttgccactaacaggtagataagcagtgttgtctaattttacaccacctgatttttgacacaggatgtaattactctgtaatggtgacaccatcattattcaatcatcattcatgcat

SEQ ID NO: 608 - DNA, 1121 bp, Oryza sativa
  ref <308>: DATABASE ACCESSION NUMBER: AK058720
  ref <309>: DATABASE ENTRY DATE: 2001-12-06
cgatgatatgactactatagcgatgctcaactttcagttagatgagttcatggaagccacagctggaccagcgttcattggccgcatggatgttctccggcgtatgatttgtgatttgcttcctttggacagccctgaaaaatgcgataataatggcatccggctttcaccaaggactaccgctaatggcctccattctccgaagccacgtggagcctctgataaatagtacgacaatgtcgagaaccacatatctcgatttctaagtcacattctcggccatccctcgattgcgagggcgagcgtgtgggacaagaagctgcttcgttgggaattgaggacttatctcctggcacacgtccaacaagctgaggatggaacgcgatttgagcagcgccaactgcacgggaaggatacctcatccgtttctaccacaacattctttcaatgggtgcgcaccacttcggctgatcacatctcatgcccatactcattccatttggtgagctgcatgcttggcgcatcattgactccaggagggggcgggcaagattgctttccatctgctggggaaaagtatctagccaaggatctctgcacacatctagctaccatgtgtcgcatgtataacgaccttggctcggcagtgcgagacctcgatgaaggaaatctcaattctatcgagtttcccgaattcgagcgccacgaaagtcttaatgcgaaaatgagtgagcttctcgtgctcggggagtacgagcgtagctgtatgttcaaagcatttacggagctccgcaactacggtactgtggacgcacggaccggcaatgatgcggaagcgaggaggctagcagaacgcagatttcgtatttggaacatgttctgcgatgaggttgacctttacgggcaagtctatgtcgtgcgagacatctcagctcgcttggaaaatcaatcaaagccatagctcaagcccatagctgcgtattagtcaagataggcttattaatagttgtaagcctagaagtaccatgtatagtcacgtggttacccactgactaataacactgtatttaaacttgctctaagcatcatgtactacaacatagacaatacttcttacctct

SEQ ID NO: 609 - DNA, 1160 bp, Oryza sativa
  ref <308>: DATABASE ACCESSION NUMBER: AK058721
  ref <309>: DATABASE ENTRY DATE: 2001-12-06
tactttgagacgatgaataacctctatctcgtcaccgaccttgcgcttggaggcgagctcttcgaccgcatctgtcgtaaaggaaactactacgaatccgatgctggcgacctgatcagggctactctttccgcagtggcatatctccacgaccatggtatcgtgcaccgagatttgaagccggaaaatttgctgttccgaaccccagaggacaatgctgatttacttatcgccgattttggactttctagaatcatggacgaggagcaattccacgtcctcacaacgacctgcggtacgccaggctacatggcgcctgagattttcaggaagacgggtcatggcaagccagtcgacatttgggctattggtgttattacgtattttctcctttgtggctatacccccttcgaccgcgactcgaatcttgaagagatgcaggccatcttggttgccgactattcttttacccctctggaatactggcgaggcgtctcactcacggcgcgcgagtttattcgtcgatgcttgactgtggatcctgcagcgcgcatgaccgctcatgaggctctttcccatccctggatcaccgagctcggcaagaacaatgctgatggtgaagaggatctgctgccaactgtcaagaagaacttcaatgctaggcgcacacttcacgctgctattgacacgatccgcgccatcaaccaactccgagctggtggcgctgcgggtatgatggacggtcagcggtcagcggaaccccgacggggggcgccccacgcgcgcattccccaaccggcagatgagcccgacgacccgatggagattgatagcaggggaaatggccacggtcagaccgaagaaatgatccaggaacaagagcggagaatcagggagacacagcagggattgtggggaaagcgctgatatttgagtcattgctttcaaggtcgatcaccttctcatttttcagcacacagaccagaagcgatttccatttgatttttttccatgtagatgttgtctggctacacatcattcttggatagacggcgacttcaatttaagtttggcatgatatcgtatgagcatattacttgatatagcctttgatagtcacctgggagcgtaccagctgggaaaaaccctcgattaccgtt

SEQ ID NO: 610 - DNA, 596 bp, Oryza sativa
  ref <308>: DATABASE ACCESSION NUMBER: AK058722
  ref <309>: DATABASE ENTRY DATE: 2001-12-06
aaaatgtcggaatcaaacaatgggatgagtttgtcgagacttttgatatttccaagagctcacagctgccaaagctaatcgtctgggatagaaatgaggagtatgaagtggtggaaggctcagagaagttagaggaaggtgatcaagcttctcaaataagccaattccttgagggatatagagcaggaagaacaacaaagaagaaagtcagtggcccatctttcatgggtttcctgaactctcttgtcagcctgaactcgctatacattcttatatgtgtcttcgctcttcttggtgtcatgatatactttactgggcaagatgatactcctcaggtaagacgagctcatgaagagtgaaagaagcttaccaaaagaggctatccaccaagagatacatatatatatagttcagaggtcaggtttcaaacttccaagtgatgcaatcctgaaggacctggttttattggttgattctgacattattgtatctctgtcggcaattatctagttgtgccttgtgcagttgtgctctcctgcggttctgccttctgttcctctgtttatttgttaattagaactaaaactagcttccac

SEQ ID NO: 611 - DNA, 1924 bp, Oryza sativa
  ref <308>: DATABASE ACCESSION NUMBER: AK058723
  ref <309>: DATABASE ENTRY DATE: 2001-12-06
atccaattccagcagatgagaatgagatgactagtactagtccccagatgcagatgaggagaaacaagctctcctcccacttccaaggagatatcgatgatgatggtggtgttggtgttgtggacatccgggggtcgccgatggggtcggcggagctggcgcgcaccggcgggtgggtggcggcggtcttcatcttcgggaacgagatggcggagaggatggcctactacggcctgtccctcaacatggtcatcttcatgttcaacgtcatgcaccgccccttcgccgcctccgccaacgccgtgaacaacttcctcggcatctcccaggcctcctccctcctcggcggcttcctcgccgacgcctacctcgggcgctactggaccatcgccgccttcaccaccctctatctcctgggcctcgtggccctcaccctctgcgccaccatgcccgccctccaggccccgggccaggacgagtgcgacggcttcgccaagctgctgggcaagtgccagcagccgcacccctggcagatggcctacctctacgccgcgctctacaccaccgccttgggcgccgccgggatccgcccctgcgtctcctccttcggggcggaccagttcgaggagcggagcccggtgctggaccgcttcttcaacctcttctacctggccgtcaccgtgggcgccatcgcggccttcacgctgctggtgtacgtgcagaggaaccacgggtgggcggcggcgttcggggcgctggcgctggccatggccgcatccaacgcgctcttcttcatggggacgccgctgtaccgccaccgcgtgccggggggaagcccgctgacgagggtggcgcaggtgctagtggcggcctacaggaagcgtcacatcaagcacaccacggaactgttgtacgaggtgggcggggccaagtcggcggtgcgcgggagcggcaagatcgagcacacggaggagctgaggtggctggacaaggcggcggtgagggtggagggccaagaagaaatcaataacccatggcgtctttgcactgtgacccaggtggaggaggtgaagatcctggtgcggctggcgccggtgtcggcgtgcacggtgatgctgagcgtggtgctgacggagttcctgacgctgtcggtgcagcaggcgtacaccctcaacaccaggggcctccccgtggcgtgcatgcccgtcttcccctgcctcgccatcctcctcctcctcgccctctactacagggccttcgccccgctcgcccgccgcctcaccggccacccgcacggcgcctcccagctgcagcgcctcggcctcggcctcctcctctccaccctctccgtcgcttgggctggcctcttcgagcgctaccgccgcgcctacgccatccgccatggcttcctcccgctcttcctcactcccatgccgggcctcagcgcctactggctcctcatccagtactgcctcatcggtctcgccgaggtcttctgcctcgtcgccctcctcgagttcctctaccaggaggcccccgacgccatgcgcagcctcgcctccgcctacgccgccctcgccggcggccttggctgcttcttagccaccgccatcaacaccgccgtcgactccatcaccggcgacatcgacgccggacgcccctcctggctcgcgcagaacatcaacgtcggcaagttcgactacttctactggctcctcgccgtgctcagcaccatcaacctcatcgtcttcatctacttcgccaaagcctacaagtacaggatcaagccccccaccaccccacataactagttcatagtatttctacaccactacagtctagtactagtagtatctgctaagtgacattatattgatcaatcaaacaaattaagggcatccaatatcttcttttttattgatct

SEQ ID NO: 612 - DNA, 738 bp, Oryza sativa
  ref <308>: DATABASE ACCESSION NUMBER: AK058724
  ref <309>: DATABASE ENTRY DATE: 2001-12-06
gagagcttgtacatcatggcattggagctgatgtccttggtgcagttctagagtcgatcaaagtagaaaagggggattcattcttgaatgaggccaaggcaagctccaacctcaagttggaggattttagaccacagcatctcaagagatcgaagttggatgccttcatgaaagcataaagaagctttgttactagcttaccgattcatgggtgttggcaccatggagtttttggcatcagaccagccttttttttattgacaactggaaaggcccatcagatgctgcccctacttggcatgcacccattaattcttccaggagctcatgctgtgtgaattttcttcatcctgttcagagttggttctgatggtaaattatggaattgtcctcgatgtttgttgccaatagttagtcccatttcgagtcggccgtagcgagtatcagggttatttttttgtgatcacaggggggagaagtctttctaaccaatgtttgttgggagtagggagaattctaggttcacagcttgatgcctcccgtggcttctgaccaatatttcattgtgataagactttgtagttgcttataacttatcggcattttcctgatagccaaatgtttcacatgactcacctaccactgccttttgtttaaatcttgctgtacgtatttctgtcgctctttacttggtatatatgtttgtgtgtatttcttggacctgacgtccatccgatc

SEQ ID NO: 613 - DNA, 592 bp, Oryza sativa
  ref <308>: DATABASE ACCESSION NUMBER: AK058725
  ref <309>: DATABASE ENTRY DATE: 2001-12-06
gaaacgcacgtctcgtcgtcttcatcatcgtcgccccgcgattcccgtgttgctttcgaaggtcggaggaggagaagaggaagaggaagaagaagaagaagggagcggagatgatcgaggtggtgctcaacgaccggctggggaagaaggtgcgcgtcaagtgcaacgaggacgacaccatcggcgacctgaagaagctggtggcagcgcagacggggacgcgcgccgagaagatccgcatccagaagtggtacaacatctacaaggaccacatcaccctcgccgactacgagatccacgacgggatgggcctcgagctctactacgactagccgacctgcctgcctgcctgccttcgagtatggccgatcgaatcgatctttaattatgatgaataattccgtcagggtttgtgtgtcttagaacatcttctggatatgatttggcttggtgtttgtgtgaacgatgtttcatactaatagaacgctactgtgagccgaatcacgttgatttgggggtgaattttttgttgcttcctgtttcctcgttggtgcttatatatctatacatatcaatccgtgccttagatcgg

SEQ ID NO: 614 - DNA, 1153 bp, Oryza sativa
  ref <308>: DATABASE ACCESSION NUMBER: AK058726
  ref <309>: DATABASE ENTRY DATE: 2001-12-06
aaggaggacgtcgccggctccgtgaccaaggtggtggacacggtggaccaggtcatcggcgtcggcggcaaggtggccgagcagtccgccggcgtgctcaaggcgctgggcgaggccgcgaagccggccctgcctgcgctgaagagcgccggcgagcaggcgctgaagctcgcctcgccggtggtctccggcgcctccaagcaagccacggaggcgctccagggcgccggcgtcgaccccgcccccgttctgtccgccgctaagaccgtcgcggacgcggcgcagcagggcacgaaggtcatcgacgccgcgaagcccatcgcgtcggcgacggtggagaccatcgggtcgctgggctccgcggactacgtcgtggtcgccggagcggcgttcctcgcgtacctgctcctgccgccggcatggtccctgctttctttcactctccgcggctacaaaggtgacctgaccgctgcacaagctctggacatggtgacctcgcaagattacgtgctgatcgatgtgaggaccgagaaggacaaggccaaaaccggcgtgccacagctcccctcgaacgcgaagaacaagctcatctctatcccgctggaagagcttccaagcaagacgaagagcatggtgcgcaacgcgaaacaagccgaggcggagatcgccgcgctgaagatctcctacctcaagaggatcggcaagggctccaacgtcatcatcatggactcgtattgcgacagctcgaagatcgtggcgaagacgctcaacagcgtcggattcaagaactgctgggtcatggccggcggcttctccggcaggaaagggtgggcgcagagccggctcgggacggactcgtacaacctgtcggtcgtcgaagtcgtcacgccgtcgcgggtaattcctgcggccgctgatcggctcgtgacggcttcgtcgtcggcttcacggacgaccacgagtcgtaagcttcttcccggcagcgtggacggctgaaagaggctggaatagtcactgtaaatcccatattcacctcatgttctagttgcaactctcgttttttttttggggtttttcagtaattgaaaagggagaatccgtataaacaatagttgtgccatgtgtgatattccaaatcggtttggatcctgtg

SEQ ID NO: 615 - DNA, 1358 bp, Oryza sativa
  ref <308>: DATABASE ACCESSION NUMBER: AK058727
  ref <309>: DATABASE ENTRY DATE: 2001-12-06
aaaaaagagcctatactggggaaaatcgagatccatcaaacaaaattcatcgaaaagaaaaacatggaatgggtgaattttccggcatggcaacgactggtgcactgtattctggacaagtaatgccaatcacttctagagacggttctggtaccaaacctaaaggcactagacttgagagagctattcgggatctgcaaaagattgctgctgaatacagaccaccagctatcgatattaacgaggtagatccaaatggccaggtagcagttaaaagacggttgcctccagaagtaaaacaaaaactagccaaagttgcaaggctatcggcaaaccatggaaagattcaagaacatgagttaatggatcgcctcatgggcatagttgggcatcttgtgcagcgaaggacactcaggagaaacatgaaagaaatggtagaatcaggtctgtccgctaaacaagagaaggctgataaattccaacgtgtaaaaatggagatcaatgaaatgatcaaatcgcgtgtggctgccaaggccaaggtcaatgaacaccacagtggatcagctgatgattttcagattgcgaatgatgaaaaaagatatttaaaaggaaagtctgtaatggatgctgctttggaggacaggatctgtgatctgtatgatctgtacgttgagggtatggacgaagataagggccctcaaagcaggaagttatatgtggagctggcggagttgtggcctgaaggttccatggataatgtcggaatcaaagatgcaattaatagatcgaaggagcgaaggagatcattatacaaccagcagaaggttcgcaacgaggagagaatgaagagaaaaaggttggctgcggcagctaaactgcaagatggctaccctattgtaatgcaaagcgcactgatccagcaagtggcacaaccacccataacaaaccctgtcgccacataccctgtgactgaccagggatcaaaaagttttgacagagttcgtgaaataagcgcgagtgcaaatcctgacgacatcaaccggaacactggcgagatgaagaagaaaaaaagaaaaccagaatctgaccttgtagatacacaagctaacgccatgaagggcccctctcagcatgtagagaagaacaagcctcctaagcgtgctgatgaggcagttgaaaccgtgctttgtctcccgttctatgaccaacaaccgagctgattgttttggtgtatgcattgatgaaatttcaatcctcctaggcgcttgtcggatgctgtaacaaatacccttgtggagaggatgccattggtccttcgtaatttttatgatctatatagttccttttccagccacagc

SEQ ID NO: 616 - DNA, 1461 bp, Oryza sativa
  ref <308>: DATABASE ACCESSION NUMBER: AK058728
  ref <309>: DATABASE ENTRY DATE: 2001-12-06
gggcacgactccgcgccgcggcggccgtctcgtcctctctccacatcatccccgttccctcgcacaccacagcgcgcgcccgcccgccagccatcccgctgccgtgccgtctccatcttctatccctcctcctgctgctgctgctgctgctacttaccccgcggtttctcttcctcttattactcttcctctcggctctcgctcgctcgctccccgcgcgatttctccacgccgcacgccgctcgcgagttagggatcgatctcgtcgggggcgggcgggagagggagagggaggagagatggcgggggatggtgtggactgggagagcgtggcggaggccacgtccggggcggtgggcgcgctcgtcagcaccaccgtgctctacccgctcgacacctgcaagaccaagttccaggccgagctccagacgcagccgggcgcgcacaagtacaggaatctttcagatgtcttttgggaagctgttcagaaaagacaaattctatccctatatcagggccttaagacaaagaacatccaatctttcatttcacaattcgtttacttttatggctatagctactttaaaagactctacttggagaagagtggagcaaagtctatcggcacaaaagcgaacttgttagttgcagctgctgctggtgcttgcacagttgttgttactcagccactagatacagcatcttctagaatgcaaacaagtgcctttggaaagtccaaagggctgcgggcaactcttgccgaaggcacttggcttgaggcatttgatggcttgggaatttctcttatactaacgtgtaatccttctattcagtatactgtatttgatcagctcaagcagaagctaattcagagacagagacgtaaaaatgcagaagcagggggtggttcttcaccagttgctctttctgctttctcagcatttctccttggtgccatctcaaaaagtgttgctacaatattaacctacccactaatcaggtgcaaggtcatgattcaggctgcagaccctgatgaggatgatgacgatgaatctgaaaggccaggaaaatcaaaatctcccaaaacaatgttgggcgctttgcatgccatgtggagcaaggaaggcatcccaggcttcttcaaaggattacatgctcagatactcaagactgtcctgagttctgcattgctgctgatgataaaggagaagatttcaagatttacttggatttcactgcttgccctgcggcgatatctctttgtttctcagaagagaatcaagagtgcataacttttatcattatcccttcgtaaagaaaatgtaatccatgtggtattgcggtattttgagatcctgtaccaaagaataagtctcaggaataaggaacagatacagaaaagcaaaacatcacgtcatacatgtggggtctttttaatagcgtcagggaatgtttctgagt

SEQ ID NO: 617 - DNA, 1192 bp, Oryza sativa
  ref <308>: DATABASE ACCESSION NUMBER: AK058729
  ref <309>: DATABASE ENTRY DATE: 2001-12-06
atcgctctactctggggaggtattcgtggtgctatgagcttgactgataggctcatctcattcttacgtattagcgaacgccccttatttcagaggatcatgggattttccttcatggtatttgtgctatggtctcctgttgtgattcctctactgccaacacttgtacaaagttggacaataagttcttcaacaggaattgttggatatgcttgcattgttggactgtatgtgtctataatgatacttgtcatattgtggggtaaaagaatacgtggctacgaaaatccagttgagcaatatgggatgaatcttgcatctgtatcaagggtacaagaatttttgcaaggtcttgctggaggtataactgttgttggattggtgcattcagtaagcattttacttggctttgcagctcttcgtgcagggtcatattcattcgtgactaggccacttgatcttctcaagtcttctagtaatgtactattgctagctctcagaggatttgtcacagcaactagtattgctgtggtggaagaagtagttttcagatcatggcttccagaagaagttgctgttgaccttggctactacagtgccattctgatatctggggttgcattttctcttattcaccggtccctaccttcagtaccaggcttcttgctactttcactagttctttttggacttaaacaaaggacgcaagggaagcttgctgcacctattggccttcgttctggaattatgacagctagttatctgatacaaaccagtggtattattcaatccaaacctggtacaccattttggatgatcagcacgtaccatcttcatccttttgatggtgtaattggcttaagtgtttgcgcattacttgctatccttttcttcccccaagaacctgttcagaaggattcttttgtatcgtgacaagaaaacaagtaccctcaacgtatagcttcagaaaaagatgcgatcatctctgtacaaaatttgtgtgagcaaaggactgctctagtataccattttacaccgcggctccatgttcagagggaagcacccagttacctcaaaaagaatctcagagattatgctgatgcatcaactttgtgcttgtccttggggcatctgcaatgttcatattcttaaacttgtacactaccgtgtactgttttgatttttcgggaat

SEQ ID NO: 618 - DNA, 460 bp, Oryza sativa
  ref <308>: DATABASE ACCESSION NUMBER: AK058730
  ref <309>: DATABASE ENTRY DATE: 2001-12-06
ggctggagttcctgctctcagaactggagggcaaggacataacagaagtgattgctgctggaagggagaagtttgcttctgtgccctcaggtggtggtggtggcatagctgtggcagctcctacagctgcaggtggcggtgcagcacctgctgaagaggcaaagaaagaggagaaggtcgaagagaaggaagagtctgatgatgacatgggtttcagcttgtttgactaagtaccttcggctgcatatttacccccgttcaccccagtatctttctgcattgcttgctttatcactatgtgtgcaaaaatgagcaatgtgatggctctatgtgtttctgctattttttggtcgagactgtatatgtctagtatcctaagaagtttaatgtaaaatttcagggaactggtcaaaacatgtaatgtttgctatcgtgagttagcattatctactctcaccgc

SEQ ID NO: 619 - DNA, 1783 bp, Oryza sativa
  ref <308>: DATABASE ACCESSION NUMBER: AK058731
  ref <309>: DATABASE ENTRY DATE: 2001-12-06
gtgctagacagccaagtaggttggcttttgggaaagaatggtagtgtgattaagcaaatgtctactgacagctgttgtgaaattcgagtttcaaaggacaagcttccattatgtgctttaccccgagatgaactttgccagatcactggagagctcgactcagtcaggaaaggtctgaatacagttgctcagttgctatttactcatcctcctaaggagagtgatgttcttggtgctcataattctggttcatctcgttcattcttcaatcaaccagatgttcttcctccaggaatgcaacctaatctccatctcccttttcaagggccaaatgttgctcatcttcccaattttcctgaagctctaatgcatggccatggctcagtcccacctgaaccccttacttttaggttgttatgctcaagtgacaaggttggaggtataatagggaagggtggaaacaatatcaagtctattcagaatgatacaggctgtgaaataaaggttcttgatactgttccaaaatctgaagatcgcatcgtatttatctcaggacctgcgcatccgggtgatggaatttcccctgcacagaatgcaattctgcatgtgcagcgtaaaattgtaccgacctccaacaccaaggagggtcctgcgatatgtaggctgattgtttcaccgaaccaagttggttgccttcttggcaaaggtggtagtatcatagctgaaatgaggaagctatcaggagcacatattatagtgctgagcaaagacaagatcccaaagggtgtcccagaaaatgatgaagttgttcagattagtggggcctctgaagctattcaggaagctctaatgcagataactgcaagactgcggaaccatcttttccgggacagaatggcttcaacagtccctaatgtgcagccaccttttggtttggtggatcctcagtttggttcatatgcgggaaaccatgattctatatctcctaggatttttcctaatgtgcctcagtttcataaagattttataggacgaccattggatgagatgtctgctccttggaccatgaagggcatgcaggttgttggtgatccaatttcattgcctgatatcccaggaatggcgcatagaggaatgggtggatttcctgggcctggtcagccatctatcgtatcaaccataactgcagatgtcatggtcccaaaattagttttaccttctctatgtggggaagatggaggctgtttaaacagaattcgtgagttttcaggggctaagataactgtcgcagatccgatgggtaatgcaatggacactgctattttgatatccggcacaccagaccagatgcatgcagcccgaagtcttattcaagcatttgtcctaagtgaaccactagccccctgatatttcaaatacctgaaggtagtgaccatggactggttgagttgctggtgatgatgattgtgtgggcaatgaagctagtgaccttatgtgttcatatttatgaatatgcgtgccctgtttgcagacttgcatatggtcgaagaggctaattatgctgaatagtgactaaatttcaacatgatggatctttgctaggttctttggaaaatatcccagtcttttcattgtgagatagaaatgctatggttagctgcacagttctcttttcatgcaagctatatgcttggagcttgaaagcttcaaacttttttttgtatgatgagcccatcatgttgattttctaaacttatattaaggaaactagcctaattattgc

SEQ ID NO: 620 - DNA, 278 bp, Oryza sativa; identical to SEQ ID NO: 97
  ref <308>: DATABASE ACCESSION NUMBER: AK058732
  ref <309>: DATABASE ENTRY DATE: 2001-12-06

SEQ ID NO: 621 - DNA, 1187 bp, Oryza sativa
  ref <308>: DATABASE ACCESSION NUMBER: AK058733
  ref <309>: DATABASE ENTRY DATE: 2001-12-06
aaaaaacatttttcttcactaaacaaaagtaaacactagaaccaactactccgtggcactgtagcaactactagcatgtactaggatggattctatgcacagctaggcaggctctccactgtgccagattcggcgctgctcctgtttctttctgcccggtcgaattttggcaggaccagcagctgcaggaggaatccgtcctaccagcgtggtccacccgaatcctgcagatctcacggtgtagtggtggctgcgtagccaggtacaggagtattagtagttaagaaacgtttttaagatagatttgattataatcaaaatggatttggactggtctgattttttttctctgtggtcactgtttgcagggtctagaggtcgtcgacaacagctacttcatcaccgaggacaacgtcggcatgctgaagctcgccaaggaggccaacagcatcttgtttgactaccgtatcccgctgtccgggtcggagacgtgcggcgcacaggccgtgtcgtcggacaacagccacggcaacggcatggtgatgaacggcctccccatcagcatctacgcgccagagacggtggggtgcgcggtggtggactccagcggccacaccgcggcggccacgtccacgggcgggctgatgaataagatgacggggcgcatcggcgactcgccgctgatcgggtcggggacctacgcgtgcggcgcgtgcgcggtgtcgtgcacgggggaaggcgaggccatcatccgctccacgctcgcgcgcgacgtcgccgccgtgatggggtacaggggcgccgggctgcaggaggccgtcgactactgcgtcaagaagcggctcgacgaagggttcgcggggctcatcgccgtgtccagcacgggcgaggtggcgtacgggttcaactgcaccggcatgttcagagggtgcgccaccgaggacggattcatggaggtcggcatctgggagtgaggtgggcagcctttgtgcgtgcgtgcgtgggcctgtggccatcatgcgattgccatagagtggtgtcttggggtcatgggccgcctcccgtgtgttcgtgggctagaattagtgggtattaattagtggattggggagattggaggtgggcttgaataatgacgatgatggcgataattcgtctggaaataataatgtgaaaagttatattgc

SEQ ID NO: 622 - DNA, 1117 bp, Oryza sativa
  ref <308>: DATABASE ACCESSION NUMBER: AK058734
  ref <309>: DATABASE ENTRY DATE: 2001-12-06
tgcgagtacttgggaaggcaccaacaattgcagctgcagcgtacttgagattagctggaagacctcctatccttcctacaaatagtctctcttattcagagaacttcttgtatatgctagactctttgggtgacaaagaatacaagccaaatcctagacttgctagggttctagatatcctttttattctccatgctgaacatgaaatgaactgctctacagctgctgctaggcaccttgcttcaagtggtgttgatgtcttcactgctctttctggtgctgttggagctctatatggtccactgcatggtggtgcaaatgaggcggtacttaaaatgttaaatgaaattggaagtgtggagaatattccagatttcatcgagggagtgaaaaacaggaagagaaagatgtcaggttttgggcaccgtgtttacaagaattatgatccccgtgctaaagtcatccgaaagctagcagaggaggtcttctctattgtcggacgggatcctcttatcgaggttgctgttgcgttggagaaggcagcattgtcagatgattattttgtcaagaggaagctgtatccaaatgtggatttttactctggcttaatatatagggcaatgggattccctacagagttcttccctgttctgtttgcaattcctcgcatggctggttggttagcacattggaaagagtcacttgatgatccagacactaagattatgaggcctcagcaggtatacactggtgtttggctgaggcattacacacctgtcagagaacgagtcccagcaagccagggcgaacagcttggtcagattgctacctctaacgcaacaaggcgtcggcgtgcaggttctgccctgtaagatagcttcaaggtacagcatccagcgtacaaaataaaagcaaagcttcatccctgtgctaacaagtctacatatctgcatgaatctgggagctgtaagtcttaagttgtcaagttcacgtatatatgggtaataaactaataatgccacaccagagagcactgaggcgtgcgttgtaatcgtgctcacccaatgtacattttctctttaacttgaattctcccaagcatggagaatgaaaggat

SEQ ID NO: 623 - DNA, 1507 bp, Oryza sativa
  ref <308>: DATABASE ACCESSION NUMBER: AK058735
  ref <309>: DATABASE ENTRY DATE: 2001-12-06
gtgcacgtttgggccagctccctcccccgcttctgctaggccgttcatcgtaacagatggaaggagagtcattagtaagtcacgttatcaaccagtgcctgtaccatttcatattggatttgagaaggaagggcgtcgaaacagctcagaaatggtggaaagtgtaattgggattgctcctctacctgagctgaagaaatcaaaaagggagaggcagggatcacacaatggagggatgggtttgtctgctttcgagagtagtaagccatcaaaatcaacagatttacttgctcgactgcgcatattctctactggtgtcagtattggtattatatcatccactttatcaaacaagaatgagcttgatgcattaaagggtacagtgaaacgaatggagaacttgattcaagatctgcatgatgagctggagatgagagagggtttaactgtaaaggaattgcctaatgaaatgtctgtaaaaattgatgatgatgagagcaaagctcatgtaactgattcagagcccatgagcaaaatcgaagaagagcttgaagctgagcttgcgagattggaattaaatataacttcaaactgcttgaaagaacaaacatttgacttcagtgaggttgaacaggatctcattggagatattgtccagggagaactgaagatcgatacaacccattgtgatcttgctgaccacagcagtgagagtgcccatggcagggatagtagagaaagctccccagattacacacatgatgcaaactatcctgtctcacctagggatctcagcctccgtctccacaaggtaatccaacagagactcgaggagcgaatcaaggaacttgagacaacacttgcccagagtgagatgcagacgcaggtgcaagtgatggccaccgagcagatcttgtgtgaaagaacctgctcagacagtgattctggttctcccaaccaggaaagtccagtgtatatacaagaaactaactccttggtagaaccgttctgtctaaacctagctggagacgcgctagaggcttacgatgaagcttatgaggaattcatgagaattgcggactccccttgcaccacaagtaccaacgggaagcctcaagttcatgaagattactcggtggaccgcggcttgatctggggcttggaggatggcagtgcaaggaagctgaaaaaagtgcccacttgggagcgaattttaaagagcagagagcctaacagaactcaggagagtgacggagatgatgaagatgaatttgaagatgatgaccaggatagtaagatgctcatccaacagattatagagagaactaaacaaggctcacctgtactaattcatgctcaaagaatgttgttttctgtggatgattagattgttggactatattgaattagaatttagtgccaattgattgtttagagaaaaaaacataatattattcttttcatcatcttccggtgatacaatttttcaatgtgtgttataagctct

SEQ ID NO: 624 - DNA, 1464 bp, Oryza sativa
  ref <308>: DATABASE ACCESSION NUMBER: AK058736
  ref <309>: DATABASE ENTRY DATE: 2001-12-06
aaacaaagtgcaaggccgagctgagctgagctgagctgcagcgagtgacagctccacagaaaagcaaagcaagcaagctacctctctctctctctctctctctctcggtagcttctctctcttgctggctggctctctgcgcgtggtgtgtactcctgctgtccctgctgcggctacagctactgttgcagctcgagcacccagaaggccagaaacccagaacaagtctcacaccctcctcctcctctcgtccatactagcaccaccgctgctgctgttgctcctgctgctgtgctgccgccgcctgctcgtccaagaatcttccagctttccccaatactgagcagccaactcctgctaccgcttcttgatctgtgggattttcttcttgtttcgaatccaagatcacttccaatccatagttttggcttttggcttccctccagcatcagtgaaaattggttctttggaggggaagaaatggatagcggctggatatgcttcttgagccagattgctgatttgatgcaataagatttctatcttatttcttgctgcagtatcacaaatcaaactaggagaactgactgagaagtgaaatattctgcttccaagaatcaatcagataaactgattccaagaaaataacaagaagtaatcagataacagaagcagctgcagctgcagcagtagcatctttctgttcccagtaattgcccaatccaactccagctagatttaatcagatagagaagtaatctgctggattgaaatccatgggtaggggaagaggcagagggaggaagctcaccaatggcaggagccatgaggacaagggcagcagcggcgaggaggttgtgcctgcgaggaagaggaggggaaggccgcagaagcgcattgtcgacaaggtggtggatcaagcagaggccaagaatctaaccgagggcgacgacggtgatgctgactaccaacaaggcgaaggagaagacggcggtgcgaagccgaaggtgtcaagaacggagaagagctctgcagggaagggcaacaagaggaacaggctgcccaaggaggaagaaagctcaaaccttgaccttgaggagaacagctcaagcacccggtccagcaacgatgaatccaccaggtccaatggcttccggcagaatggcagccggcgtaagagcacgccgcggcgagccgcggaggcggggatatagcttggaaactttggaatagggtggggaggacagtttcatcagggattggttcttgggttatatcatcagttaggcaagctgctcttcagttttgtcatcttcagattcggcaagttttccttcaaaattttgtcatgttcatgtttgctaggcaccaacatgaatgtaatgtaaacatatactaatccgcgagacatcggagttttgcttctggtgatgaaaattgtatgaactagcatcggcttatggt

SEQ ID NO: 625 - DNA, 612 bp, Oryza sativa
  ref <308>: DATABASE ACCESSION NUMBER: AK058737
  ref <309>: DATABASE ENTRY DATE: 2001-12-06
ggacgcagcagccgcagcggaagagggaagcgaagcaagcgaagctcgaggggagatggcgcgcggcgtggcggcggcggcggggggcaagggcggcgccgggaagaagaagggctccgtcaccttcgtcatcgactgcgccaagcccgtcgacgacaagatcatggagatcgcgtcgctcgagaagttcctgcaggagcgcatcaaggtcgccggaggcaaggccggcaacctcggcgagtccgtcaccgtctcccgcgacaagaccaaggtcaccgtcacctccgacgggcccttctccaagaggtacctgaagtacttgaccaagaagtacctgaagaagcacaatgtgcgtgactggctacgggtgattgcatccaacaaggaccgcaacgtgtacgagctccggtacttcaacatcgccgagaacgagggcgaggaggaggattagatgcactgcctttttctatgtcttgtgaacttttgaacttgctggaacactatgctgtagtcactgaagagaagaattttgatgtttcatttatcaatgtttccctgtgtgcttaaaacctatgcttaggtaagcaagttgaagaattattggttctcacc

SEQ ID NO: 626 - DNA, 2269 bp, Oryza sativa
  ref <308>: DATABASE ACCESSION NUMBER: AK058738
  ref <309>: DATABASE ENTRY DATE: 2001-12-06
gcagagagaccaaaaacgatatccaacagcagcggccaccacgcgcccaccgctcccggcgcgcgccacaatggcggccgccgtctccgcgccccttctccggttccaccaccaccaccgctgcctcctccgccactcctcctcgccgcgccgctacccagccggcttctcgcgtgggctcagctccgtctcgttcggcctcccgcgcagcaccaccaccgccgcgcgctccaccgcctcgccctcggcgccgtcggcggcggcggccgaggccacggatgcggcttccgcccaggcgggatccgacggcaagggggatgggattggggaggaggagcgcgtcgtgctccccaccaacgagtcctccgaccgcctgctccgcatccgccacacctgtgcgcatgtgatggccatggccgtccagaagctgttccccaactccaaggtgacaataggtccctggatagacaacggcttctactacgacttcgacatggagcccctcacggacaaggacctcaagaggatcaagaaagagatggatcggatcatccggaagaatctcccattggtgagggaggaggtgtccagggaagaggcccaaaagaggattgaagcgcttaatgagccatataagttggaaattttggagggcatcaaggaagatcctatcacaatctatcacattggagaagagtggtgggatctctgtgccggacctcatgtcgagtctactggcaaaatcgatagaagagctgttgagcttgagtctgttgctggtgcttactggagaggtgacgaaagtaatcaaatgctacaaagaatatacgggactgcatgggagactgaagaccaattgaaggcttacatccacttcaaggaagaggccaagcgccgtgatcatcggcgattaggtctggatcttgatctattctccatacaggaagatgctggtggcggtttagtattctggcatccaaaaggtgctattatcagacatgttttagaagactcatggaaacagattcacttgcaacgtggttatgatctattatacactccccacgttgcaaaggctgaactttggaaggttagtgggcatatcgatttctacaaagagaacatgtacaatcaaatggatgttgaagatgagctatatcaacttcggcccatgaattgcccttaccacattttagtatacaagagaaagctacattcatacagggattttcccattcgagtggcagagcttggaactgtctacagatatgagctatctggtagtttgcatgggctgttccgtgtcagaggatttacgcaggatgatgcccacatattttgtctggaggaccagataaaagatgaaattagaggtgttcttgatctgactgagcaaatactgggccaatttggctttcggtattatgagataaacctttcaacaaggccagaaaaatctgttggcagtgatgacatatgggaaaaagcaacacttgcactaaaagatgcactagaagacaaaggttgggagtacaaggttgatgaaggtggaggcgctttctatggcccaaaaattgatttgaaaattgaggatgctcttggaagaaaatggcaatgttccactgtgcaggtcgatttcaatttacctgagcggtttgacattacttatgtcaattcaaatagcgagaagaaacggcctatcatgattcatagagctatccttgggtctttggaacgattttttggtgtcctcattgaacactatgctggtgattttccactttggcttgcaccaatccaagctcgtattctacctgtgacagacaatgagctgcaatactgtaacgaggtggcttcagaactgaaatcaaaaggcattcgagctgaggtatgtcatggcgagcgtctaccaaagctaatacggaatgccgaaacgaagaaagtgccgctcatggcggtcgttgggcctaaagaagttcaggccaggaccctcactatcaggtccaggcatagtggggagattggtactatgcctgtggatgaattctttcgcagaatccaacttgctattgcgaacaaatcttcttcactatgaacatttaaatatgctaaagagcagttgatattgtagagtattagatcttgtgcacatacacgatatagcagctgtgctctagaagaagttagcaactgaggtctggaagagcagatcaaataattttgtgcataatcgccatcgccgtgttttgcaatataacaaatgtccagt

SEQ ID NO: 627 - DNA, 451 bp, Oryza sativa
  ref <308>: DATABASE ACCESSION NUMBER: AK058739
  ref <309>: DATABASE ENTRY DATE: 2001-12-06
gcaagctaattaagctagctacatatatactctctcaaaagtttacattaattgctgatagctcatcatcagtttgatcgtgtccggaggtgtgaggtcgtcggcgagatgagctccggcggcgaggaggggaagacgtcgtggccggaggtggtggggctgcgggcggaggaggcgaagaaggtgatcctcaaggacatgcccgacgccgacatcgtcgtggttccggtggggacgccggtgaccatggacttccgccccaaccgcgtccgcatcttcgtcgacaccgtcgccggcacccccaccatcggctagagctagctactagcctcatctgcctgccttcagcatcctgcttatcttaattaaataatcacatgcacgcaagtgatatgtactgtgcatgtttcgatcgatccatcccccatctgaataatgttggttttaccct

SEQ ID NO: 628 - DNA, 513 bp, Oryza sativa
  ref <308>: DATABASE ACCESSION NUMBER: AK058740
  ref <309>: DATABASE ENTRY DATE: 2001-12-06
atcgaacttggttgaacctggtggcattgtggtcgtaacatcgtgcaaccacacaaaggatgagcttgtgcaagaggtagaagatttcagtaagacgaaatctggtaaggaacacttggatgaaggtgaaggtaatgtgccacagatcttccggtacatcgatcatgtccggacataccctaccattatgtttggaggggttgagggttctcaagtgtgcacggtggccttccaacgggtgtgagaactgagaaccactcattcttggccgtttaattatgttgtcacccgaagaactagagagaaggaagttacgtacttcacctctgagattattatcatctctgctcatcgtagtttagcccttctgtacggtgtagctcaatgtatccttggttataactgttactataccagactagagcacgggactgttccatttcagttacccagaaagagagtattaggacatctccgaagcaatttttgcaatcaggcatccttacctgtact

SEQ ID NO: 629 - DNA, 526 bp, Oryza sativa
  ref <308>: DATABASE ACCESSION NUMBER: AK058741
  ref <309>: DATABASE ENTRY DATE: 2001-12-06
aagcaaaatccccaaatcctccagatcgtcttcgtcttccacctcgagctcttacgcatcgtcagccatgtcgggccgcggcaagggaggcaagggtcttggcaagggcggcgcgaagcggcacaggaaggtgctgcgcgacaacatccagggcatcaccaagccggcgatccggcggctggcgaggaggggcggcgtgaagcgcatctccgggctgatctacgaggagacccgcggcgtgctcaagatcttcctcgagaacgtcatccgcgacgccgtcacctacacggagcacgcccgccgcaagaccgtcaccgccatggacgtcgtctacgcgctcaagcgccagggccgcaccctctacggcttcggcggctgagttcccggccccctgtgctcgatccagatctgatgccgttagcgttgcttagggtttcgttgcggaaattgtactacttcgttgtttctgcttgtgcaaagtgaatggatggttggattaaatgaatcattttctctcttgattagt

SEQ ID NO: 630 - DNA, 996 bp, Oryza sativa
  ref <308>: DATABASE ACCESSION NUMBER: AK058742
  ref <309>: DATABASE ENTRY DATE: 2001-12-06
gttattcataaggtgtatgcattcttggctccaaaaataattgggggagtgaatgctccaacaccagtcggtgaactagggatgaatcaaatgactcaagcgattgatttaattgatgtttcttacgagcagattgatagggacatgctcatgagtggattcatccaacctattcctgatctctcacctgtaataccatctgtggatgaaatgccttcagttgatccaggagtatctccatatgaaactaatattatatccttctacaagacttgggatacctttggtgccttctctaacttttctccccatccaattcacatgcccgatgaaaatggagactatttcacatggccaacagtggagcactattaccaggcacacaagtttattggtgttgatgatcctcaagcaagagagattgtccaagaaataaagctggctaagagtcctgaagaagctgctagaataggacgcactcggcaaagagaatttcaagaattggtacgaccagattgggattccatcaaaattgaagtgatgtacagagctacaaagcgcaagttctcaacttattcccatctgactgacatgctgttgtcaacggctggctctgttcttgttgaggcgtcgccccacgatttattttggggcggtgggcgcgagggcgaaggtatgaattacttgggtagattgctgatgcaattgcgatcagagattctaggaacaattcaaacagctgttgaggtaggggagccagcttgatttgctggagaggtgatcataacagcagacgttttgatctggggtatttatatgtatcattatggtgattgccttcaaaattttgtgaaacatttgtttctttatctctctaaattcctgtagaaatttgagatgctttcgttgccgaattttatttgttatcatcttgttgtactggtctggtctgcaaatataaaatcagagcagagatagaggatgcatatatcaccc

SEQ ID NO: 631 - DNA, 1308 bp, Oryza sativa
  ref <308>: DATABASE ACCESSION NUMBER: AK058743
  ref <309>: DATABASE ENTRY DATE: 2001-12-06
aaaaaggggaaaaaaaaaagaaaaacaagagcgctgtgtcggagaccaccgccggaccaccaccgcgacccctcgatcccggcgatcccacagcattggtcggtccccgtcgatccggccgccgtggggtttggtctggtactctctggtggtggtggtggtggtcgccgtcgtgaacgattcctttttctgcttggattttttttgttgcttttggttgttgtgatccctgtggggctcgggttccggccggtgtaggggaggggagatggatttggagtcggtcaacccggagctcgccgagatcgacggccagatcggcgacatcctccgcgcattgcaaaatgggttccagaagctggataagatcaaggatgccaatcgacggagcaggcaactcgaagagctcactgataagatgcgggattgcaagaggcttatcaaggactttgagcgagttgtcaaagatatggcaggaagtaccgatcctgagactgctaggatgcttcatgataggaaacagtcaatgatcaaagaattgaactcctatgttgctttgaagaaacaatatgcaagtgaaaataagcgagttgatctttttgatggcccaagtgttgaagatggctttggtgaagaaaatgtcctgttagcatcaaatatgacaaaccaacagttaatggatcaaggaaaccaactaatggatgagactgatcaagctattgcaagatctaaacagaccgtccaagagaccatcaatgtaggtacagaaactgcagctgctctcaaatcacagacagagcaaatgagcagaattgttaatgagctggattccattcatttctccattaaaaaggcatcacaaatggtgaaagaaattggtaggcaggttgcaactgatcgctgcatcatggccttgctttttctcattgttgctggagtcatagcaataatagtcgttaagattgtaaacccacagaacaagactatccgagacattcctggtctcgctccaccagttagcagaaggctattgagtattgtagaagacatctgaacttcatacatgtgaacaaatcaaccaagagcagcttgtgctgtttaactcgaaggtcgcaactactacttgaacatgatgcacagtgttgtaatactatacccatgggatccgtgtgcgaggtactgtaaaattgtacgagtatgttatgactctgacaagcaggtttgcttgtaagaactgtattctgtgaacattcacatatgtacacgagcatatcaatcttttttaagagtgacagcagcgtatggatc

SEQ ID NO: 632 - DNA, 1256 bp, Oryza sativa
  ref <308>: DATABASE ACCESSION NUMBER: AK104002
  ref <309>: DATABASE ENTRY DATE: 2002-08-28
acacgctcgcctcctccctctatccccgactcgaccaccaccgccgccgcgcgccatcgccgtcgaccaccaccacccatggcgttcgcgctcaaggcctcaactgcctccgccgcggcggcgtccacggcctcggcctcggcctcgtccctgtccgtggctgcggccgcgcccgggaggcgcggcggcgcggcggggagggtctcgttccgcggggtccctgctcccatggtggcgatcagggcggaggcggctgccgtcggggaggacgagcgcgtcatctccggcaccttcgccaagctcaaggagcaggggaagaccgcattcattccattcatcactgctggtgaccctgacttggcgactacagcgaaagcgttgaagattcttgatgcttgtggttcggatctgatcgaattgggcgtgccttactctgacccattggctgatggccccgtcattcaggcttctgctacacgtgcactatcaaaaggcaccacatttgaggatgttatctctatggtaaaggaggtgatacctgagctgtcctgccctgtagcgcttttcacatattataacccgattctgaagcgtggcatcgcaaacttcatgactgttgtaaaagaagccggtgtccatggtcttgtggtacctgatgttcctctggaagagacaaatattttgaggagtgaagctgctaagaacaaccttgagctggtgctactgacaacaccaactacaccaacagaaagaatggagaaaattacaaaagcttctgaaggatttatttatcttgtaagcactgttggagttacaggtgcacgtgcaaatgtcagtggcaaggtgcaatctcttctccaggatatcaagcaggtcacggacaaagctgtggctgttgggttcggtatatcgactccagagcatgtgaagcagattgcgggatggggcgcagatggtgtgatcattgggagcgctatggtgaggcaattgggcgaagctgcttcacccgaagaaggattgaagaagctagaagagctagccaagagcctgaaggctgcattgccctgaaacaatcagttccatgaggaaagaaaatacagtccatttttttgtagtcaggtttgaagcatagtgttgggagcatgacttttgctattggggttttcggggttactgttgtctgttgaaaataattaagtcattgtgttagttgcttgaacgaataaatcaaggtaagaatgatactaaatgttgcg

SEQ ID NO: 633 - DNA, 1830 bp, Oryza sativa
  ref <308>: DATABASE ACCESSION NUMBER: AK058744
  ref <309>: DATABASE ENTRY DATE: 2001-12-06
aagcgagaagctgaagctgcaggatgctctgctcaagatcccttgccgacttagtatctcagttgatatgtggcgatcgaatacacagatggacttcttgtgtttgacctgtcactatattgaccatgccaatgatgagtggaaagttaggaaaaaaattctgaactttgtgcatgtggaggcaccttttacagatgatcagattgctagtctcattctagagaagttgcgtgagtggggtattgacaggaagctagctgccattgtactggacaactgcgcctctggtgagattgttgctagagagcttctcgtagttctgcagcctaggagactcctcctattaaatgggaatttgttccaggtgcgctcttgtgcgcacattcttaacctcacagtccaagaaagcttagaacagacatctgatataattactagagtccgtgagatgattcagaatgtcaagttctcacaagaaaggttcgaaaagtttcaggatactgcaaaactgttgcagatggaccaaaaactgctagttcttgattctcctaataactggccgtctacatacttaatgtttgattctgcatgttactatcatgatgttctcatgcgccttgcagaacaggaagcacattatggtgcttttctcactgcgaaggagtgggccgatgtgaaagccctcactgaaatacttgatgcgctctatcataagatggagaagtttcctgtggaaaatccgactgcaaatctctattttaatgacatgtgtgaggtgcatgttcttttgaatacctggcgtaatagtccatctcctgttgttgcacaagtggctgaccgaatgctgacaaaatttgaggggtactgggatcttactagaccagtaatggcattcgcatctattctggatcctcgatataagatgaagtctgttgagtacttctgtagactcatttatgctgctgatcaatttagagcaaagacaacaatagatgacattcggcagagttttaccaatttgtgcagtgaatatgaacagtcaggaaattcattcaagaatccatctgctctcttctactctgcaaccagtaattcttgcatgagttcggtatacagcaatggtgatgattttaagaccttctcccgtatcacattatctgatgctcgaaggggacttgatcaatatatacaggagacgtcatcaggccaatcctttaagtctgacttagacatgtaccttgaggaaccggtctatcgccaaaaggaagggcatttagataattttgacatcctgggatggtggaagtcctttgcagcaaagtatcctgtcctttctcaaatggctcgtgatattttagctgtccctgtatctatcatcccattggacagtgatgctcggacattaaatgagtatctcagtaccatggacccttcaacagtgcagggattggtatgtgcgcaagattggttgcgggaagatacagaagttgctagttcagacggtcatgcagatgacaaagcggcacgtggtgatgaacttatcgtgttaccaaaatagttgagacttctgattgatggctcctgagtcctgaggagaccaaggaggcgaggacgcaagtaactgcattatttatgttcaacagtccaatttccaggcttccagctacacccctgtaaatgtatcgttctagttctagatctgtttgtacaatgaagtcgtaggtacctccaagaaggtagtatcaatttaggcaattgactctgcattaatgacttaatgtgtattatgctgctaagctaagttatctccatcgtagctaagttatctcc

SEQ ID NO: 634 - DNA, 1984 bp, Oryza sativa
  ref <308>: DATABASE ACCESSION NUMBER: AK058745
  ref <309>: DATABASE ENTRY DATE: 2001-12-06
atatatctgtacataacccaatatcttcctcatcagagacagtcgttgcaaactttgcaggtagccagccactgtgagagtgtgagctgaggtgagcatcgccatgggagaggttgcagaagacatctacacccaagatggcaccgtggacgtcaagggcaacccggccaccaagaagaacaccggcaactggcgtgcctgcccctacatcctcgctaacgagtgctgcgagaggctggcctactatggcatgagcaccaacctcgtgaactacatgaagacgcggctcgggcaggagagcgccattgccgccaacaatgtcaccaactggtcggggacttgctacatcaccccccttctcggtgccttcttggctgatgcctacatgggcaggttctggaccattgccagcttcatgatcatctacatcctgggtttggcgttgctgacaatggcgtcgtcggtgaaggggctggtgccggcgtgcgacggaggagcgtgtcacccgacggaggcgcagacgggggtggtgttcttggcgctgtacctgatagcgctgggcaccggcgggatcaagccgtgcgtgtcgtcgtttggcgcggaccagttcgacgagaacgacgagggggagaagcggagcaagagcagcttcttcaactggttctacttctccatcaacatcggcgcgctggtggcgtcgtcggtgctggtgtacgtgcagacgcacgtcgggtgggggtgggggttcggcatcccggccgtcgtcatggccgtcgccgtcgccagcttcttcgtcggcacgccgctgtacaggcaccagcggcccgggggcagcccgctgacgaggatcgcgcaggtgctcgtcgcgtcggcgaggaagtggggcgtcgaggtccccgccgacgggtcgcggctgcacgagacgctcgacagggagtccggcatcgagggcagccgcaagctggagcacaccgggcagttcgcgtgcctcgacagggcggcggtggagacgccggaggacaggtcggcggcgaacgcgtcggcgtggcggctgtgcacggtgacgcaggtggaggagctgaagagcgtggtgcggctgctgccgatctgggcgagcgggatcgtgttcgcgacggtgtacgggcagatgagcaccatgttcgtcctccaggggaacacgctcgacgccagcatggggccgcacttctccatcccggcggcgtcgctctccatcttcgacaccctcagcgtcatcgtctgggtgccggtgtacgaccgcctcatcgtgccggcggtgcgcgccgtgacggggcgcccacgcgggttcacccagctgcagcggatgggcatcggcctcgtcatctccgtcttctccatgctcgccgccggcgtgctcgacgtcgtcaggctgcgcgccatcgctcgccacgggctctacggcgacaaggacgtcgtgcccatctccatcttctggcaggtgccgcagtacttcatcatcggcgccgccgaggtgttcacgttcgtcgggcagctggagttcttctacgaccaggctcccgacgccatgcgcagcatgtgctcggcgctgtcgctcaccaccgtcgcgctaggcaactacctcagcacgctgctcgtgaccatcgttacccatgtcaccacccggaacggcgccgtcgggtggatcccggacaacctcaaccgcggccacctcgactacttcttctggctgctcgccgtgctcagcctcatcaacttcggcgtctacctcgtcatcgccagctggtacacctacaagaagacggcggattcaccggacgacaaggccgagcacgccggagcaaactgagccacgaggtgaagctgattatgacatacaagggggaattgaactgaattgtggcgtgtgaatgtcagaatgtgtggggttctaaacaagttcttgggagataaaatggaaaggaaattagtgtcgtttgtgaccttc

SEQ ID NO: 635 - DNA, 1391 bp, Oryza sativa
  ref <308>: DATABASE ACCESSION NUMBER: AK058746
  ref <309>: DATABASE ENTRY DATE: 2001-12-06
gctcgtagaagaatttccttggataaacaaggacccactgtagttcatcaaaaaccaagtcatttgcagacgatatttggacttcctccagatgaggttgttgaacatagttattcatgtgcacttgagaggtcatttctgtatcacgggcgcatgtatgtctcttcatggcacatttgcttccattcaaacgtcttctctaagcagatcaaggttatgcttccgttgagggatattgatgagataagaagaagccagcatgcagttattaatccagcaatcacgatatttcttcgaatgggagctggaggacatggggttcctcccttaggaagtcccgatggaagagtcagatataaatttgcatcattttggaatagaaaccatacatttagagcattgcaacgagctgtcaagaacttccatacaatgatagaggctgagaaacaggaacgtgctcaatctgcattacgtgcacacagtagctcaagaaaaagtagcatgaaggagataaatgttccagaagattgtgctgatttaacaggccaattacaaccttttgtcaaagaggaagttctagtcactgtattcaatggatcttttccatgtactgcagaggagttctttaatactctgttaagtgatgattcaagttacatcacggaatttcggacagctcgaaaggataaagatatcaatttaggtcaatggcaccacgctgatgagtatgatggtcaggtgagggaacttaattgcaaatcaatatgccatagtccaatgtgccccccatattcagcaatgacagagtggcaacatatggttctttcagctgacaaaacagatctggtatttgaaactgtacagcaagtacatgatgttccatttggttcctttttgaggtacactgtagatggtctgtgaagactaccagttctgactcatgcagtcttaacattagtgctggtgcacatttcaagaaatggtgcataatgcagtcgaagataaagagtggtgctgtggacgagtacaagaaggaagtccaggagatgttggaatttgcagagtcgtatatgcgcaaagttagaacttctaaccaagacaatggtacacctactgagcaagacaacggcgctgtgactgagcaagaaaatgtggcgccggataatacaccaaatgatgaataatttttctctaagttatgtcttctcctgtaggatgacatctaccacccgttgatagtagtttgttgaaatgttatagcagaagaacaggtggacctgtaattataatccacatgtaatagggtttagccggaaaaagggggtgcttacaagatctaacagtgtataaattgtctatacattttggctaatgtatatttgaaaacgcat

SEQ ID NO: 636 - DNA, 1151 bp, Oryza sativa
  ref <308>: DATABASE ACCESSION NUMBER: AK058747
  ref <309>: DATABASE ENTRY DATE: 2001-12-06
aataacttgaaggtgcaggaacggcaaaaccgtgtctgcacaactgtcgcaattgccattgttgctgaaacctgctcaccttttacggttctgcctgccctgatgaatgagtaccgagtcccagaactcaatgttcagaatggtgtcctgaagtctctctctttcctctttgagtatattggtgagatgggcaaggattacatatatgctgttactcccttgcttgaagatgctctaatggacagagatcttgttcaccggcaaactgctgcctctgctgtgaagcacatggctcttggtgttgctggcttgggctgtgaggatgctcttgtccatttgcttaactatgtctggccaaacatatttgagacatctccccatgtcatcaatgctgtcatggaggcgattgaggggatgagagttgctcttggtccagctgtgatcttgaattactgccttcaaggccttttccatccagcaaggaaagtacgtgaagtatattggaaaatctacaactcactatatattggtgcacaagatgcgcttgttgctgcttatcctgcactggatgacgatggggataatatctacagccgtccagagctggcgatgtttgtctgatcaatgcaggatgtacatttccatgtaccgtcatccaatatatgcgtgtgaactgtgaagcttgaactcggtggtatttgagttagctgatattcaatttatggtgtttacttgtgatggatgcattttcattgaagttgcatttcttttttctttatttgcaggcttgttgcttctgaagggggtgcaatgtttaggatatatttccccctggtttacttgtgtaatgtaatgataaattgctacctgttctgatgtactgacgtttttgttactggttttgtgttcagggtattttgacccggtttgctgaggagttcccttagattaaagatcccaaggagatgatatctgtcctgaatgtttactttgttgccgttgcatgatcccctccgctctgaagagaaaatgatcaacatagtattactgctgtcccaataactgtattattagcaaaaaaatgttataagctactatcgagattgtgaacttgtcttattattagagtctgtattattaatgttattact

SEQ ID NO: 637 - DNA, 1129 bp, Oryza sativa
  ref <308>: DATABASE ACCESSION NUMBER: AK058748
  ref <309>: DATABASE ENTRY DATE: 2001-12-06
ttgaatttttatgggccccctttacatttcttctaggatataaggatccagagccttccaaggcaaacttacccctgctacatgaatggcatttccgatctggccttgatcgatacatatggattattggaatgatctatgcttacttccaccctaatgttgaacgttggatggagaagttggaggaatctgagactaaggttagactgtttatcaagggagccattgtcactctttctttgacggctggttacctatggtatgaatatatctacaggctagacaaaattacatacaacaagtaccatccctacacgtcatggattcctatcactgtttatatctgcctacgcaactgcacccagcagttgaggagtgcctccttggctcttttcgcctggcttggcaagatcacactagagacatacatttcccagattcacatttggctcaggtctagcacgccaaatgggcagccaaaatggctcctatcttttgtaccagattatccattgcttaacttcatgcttactacagcaatctatcttcttctatcataccgggtgtttgagatcacaggtgtactgaagggagcttttattcccagtagagacaacaatcggctatatcaaaattttattgcagggattgccatatctgcatgcctgtatttctgctcacttattcttgtgaaaattactattgtataggtagaattgccaagtaaatgaccttgatagaaggtcgttcctgaaaattgtgtgcttggtatctggtggtaagatattcagctcaggcctcaattccattttgcatttggaggtaaagatacagttcccatgaaggacctgccgatcttctagttgggaattgaattgccagaggatgtaggtatagaagtcaaattttgatttatcatttcccccatttaaaacactgtacacagttagcgaagttgtgcattctttgggagttgtagatgctttcctaagttgatacaacagtgtaagaatttcctcccctcaaagcactgtaacatgtggtgtactatacagaatgatactacaaggaagggtttcccttttgtaaaacgaaatataaagggcaagccccaatctttctttctttc

SEQ ID NO: 638 - DNA, 1331 bp, Oryza sativa
  ref <308>: DATABASE ACCESSION NUMBER: AK058749
  ref <309>: DATABASE ENTRY DATE: 2001-12-06
aacctatttccctttcccgccgctgctctcaccgcgaaccctacgcgccgccgccgccgccgccgcggctgcgcacgtcgagcagcccgcgatggagaacgcctgcgaggccggcctgccgctgtcggtggccgtgtcggtgccgccggtgatggttgacggggagacggttccgaaggaggtggaggagtgcgaggacgaggaggaggaggaggagtacgccggggatgcgccgccgccgtggaaggtgatgggttcggatgatgagggcgagacggaggccggcgaggaggaggagattgccgaggccgacggcgaggaagaggcggcggacgtggaggaggtcgagtacgagttctacgacagcgacggcagcgaggacgagggcgacggcgaggaggttgacccggcggtggcgagcgccgcgcagttcgtgccggaagggcagtttcttgggtcggcgcagttcgccgcctacggctgcgccgccggcttcatgcgggtcgccgccgtcgaggcggacccggccgacggccaagagatcctcgtgctctaccgctacaccctcctcaagagggcatggagcgatccggcgggcgtggagctgtccatgtgggcgaaggtgtcgaagatacaccgcctccggttcatcgtcccggcctccggcgacccggcgagctcgctgccattcgccgggctatctctgtccccgctgatctaccacaacgactacgtcgaggagctcgagacgctgtggtccaagctggcggcgcaggtgcgcgtcccgccggtagccacgcgcgtccaggtgatcgtcgacgtgggcatcctcagggcgggggacaacacgccggagcgcagggagtacatgcgcgccgagctggaggccaagaaggagatgccatggccggggaagctcctcggcatggagctgcacgtgccggagccggtggtggcggcggcggcgtcgtgcaagagggacagcagcgaggaggtgttcgacgacgcgccagcgccgccggcgaagcggaggaaggtgttcgacgccggggaggagtgccccgtctgcctggacgagctcgaggacggcgtcgtggcgtggcctgggtgctctgtcgcccatgtcttccatggccaatgcttggagacaactctcaaggggagccagatgtgccctatctgcaggcgtgatcttggcctgaaaaccttgcaggagtagactgatgttgcagacttgcatttgaaacagaatgaatgaatgaattgtaggttgtagtagcagattgattgttctgcagttgtagccttcaattcgatcgatttcttgtgtg

SEQ ID NO: 639 - DNA, 1915 bp, Oryza sativa
  ref <308>: DATABASE ACCESSION NUMBER: AK058750
  ref <309>: DATABASE ENTRY DATE: 2001-12-06
aacacagcctacctagcttctccttctcgctcgcttcgcccgcataagtctagccacaaacccgccgccgccgccgccgccgccgccgctagcttccgcggagcggggcgagatgttcatcgagagcttccgcgtggagagcccgcacgtgcggtacggcgcggcggagatcgagtcggactaccagtacgacacgacggagctggtgcacgagagccacgacggcgcctcccgctggatcgtccgccccaagtccgtccgctacaacttccggaccaccaccaccgtccccaagctcggggtgatgctcgtggggtggggcggcaacaacggctcaacgctgacggctggggtcatcgccaacagggagggaatctcatgggcgaccaaggacaaggtgcagcaagccaactactatggctcactcacccaggcgtccaccatcagggtcgggagctacaacggggaggagatctacgcgcccttcaagagcctcctgcccatggtgaaccctgatgaccttgtgttcgggggctgggacattagcaacatgaacctggctgatgctatgaccagggcaaaggtacttgacattgatctgcagaagcagctcagaccttacatggagtccatggtgcctctccccggcatctatgaccccgacttcatcgccgccaaccagggatcccgcgcgaacaatgtcatcaagggcaccaagaaggagcagatggagcagatcatcaaggacatcagggagttcaaggaaaagagcaaagtggacaaggtggtggtgttgtggactgcaaacactgaaaggtacagcaatgtctgtgttgggctcaatgacacaatggagaacctcctggcgtctgtggacaagaacgaggcggagatatcaccatcgacactgtatgccattgcctgcgtcatggagggtataccgttcattaacgggagtcctcagaacacctttgtgcctgggctgatcgatcttgctattaagaacaactgcctgattggtggtgatgatttcaagagtggacagacaaagatgaagtctgtcttggttgatttcctagttggtgctggaataaagcccacctcaattgtcagctacaaccacttggggaataatgatggcatgaacctttccgcacctcaaacattccgatccaaggagatctccaagagcaatgtggtcgatgacatggtctcaagcaatgccatcctctatgagcttggcgagcatcctgatcatgttgttgtgatcaagtatgtgccgtatgttggagacagcaagagggcaatggacgagtacacctcagagatcttcatggggggtaagagcaccatcgttctgcacaacacctgtgaggactcactccttgccgcgccgatcattcttgatctggtgctccttgccgagctcagcaccaggattcagctgaaagccgagggggaggagaagttccattccttccatccagtggctaccatcctgagctacctcaccaaggcaccccttgttcctcctggcacaccagtggtgaacgccctggcaaagcagagggcaatgcttgagaacatcatgagggcctgcgttgggctggcccccgagaacaacatgatcctggagtacaagtgagggaggctgccgaggccgagcagccgtggcatgtggcaaagaggcgaatgggatggagcaagaaagacgtgattagctagctctaagaattgttttagcttctcttgtgatttttcggtctttcccattcttaaccttctgtgctttgtgtgagactcttatcgggctatgcaactagcagcagccttactatggtactggatgatgttatggagaatgttagctagttcccctctatttataacttattagtatcggagatttcagttc

SEQ ID NO: 640 - DNA, 778 bp, Oryza sativa
  ref <308>: DATABASE ACCESSION NUMBER: AK058751
  ref <309>: DATABASE ENTRY DATE: 2001-12-06
atattaaattctggaatgtgcagtgaggtatttcagtttgacatttcgacggcttctagcaatcctggtggcattatacctgcatctcctgttgtgaactcgtcaagtgtcaatgctaccgagaaaatcccagcacattctgctgcttatcatggcaagctgaaaaacagaagagtcatgtacaatgaagcgattccactcaccgggaagacggcgaacaacacagagccttttaacagaacctctgaaagcagcagcaagttacctgatagcaagccagcatcatcagttgttgtctcggtgctagccgatccaagggaggctggtaatggggatggcgatccgagagtatctccgaaacccctgtccaagatatttgttgttgttcttgttgacggtgtgagatatgtcacttactcctgcacgcttcctttcaagagctccagcccacatcttgtgaactaagcggctgggttgttcgccaaaaactgacagatgaatagatttatacaatgatctgatgctgtttcctaaccaaggactaaacttcctatgcactcaggctgaggtaattcaagtttgtcgaaggttcggagtgatgagtgcgagtttagttaatgtatgcagtttttgcagtgctgtgataatcgggttcgtttgctgtacctctagctgtaacggtgatgtaatcatgtaatactgtttgatcgttgagatataagtgcaactagtaatatgggtagtcgagaacacgtgcagaatatacatgccttttttt

SEQ ID NO: 641 - DNA, 377 bp, Oryza sativa
  ref <308>: DATABASE ACCESSION NUMBER: AK058752
  ref <309>: DATABASE ENTRY DATE: 2001-12-06
ttgatcactggcaagaagctagaaaatcttcatgatgcactttcaaacactggaactgatggtactggtgctctgctccgcgagggagcagctgcatacctcaactccattgtgaacaagaaattcccttttaccacccaacaggttaaggattgcatcgtcgtggccatgacctctgatggcgctgcttcttcccaggctgagatcttcaagaaggcaaatgattatcactactagttcaagaggtgtttcctggctaaattatttgctcctatgtgtttcttcattgatgtaatcttgctgtttgataaatccattgtattcttttggtttgcaatgtaataccaccatctaagatatttgatttttataaatcc

SEQ ID NO: 642 - DNA, 1852 bp, Oryza sativa
  ref <308>: DATABASE ACCESSION NUMBER: AK104003
  ref <309>: DATABASE ENTRY DATE: 2002-08-28
atatcgtaggcagcttccctctgcatacaagaggctgcctcccatttctcttctctgtcggtgttctcctcaagatctgtcttaagttcttgagatctgtttcagaactaagctgagaagatggtgaagatctgctgcattggagctggctatgtcggcggcccaaccatggccgtcattgccctcaaatgcccagcaatcgaggtggtggttgttgacatttccaagcctcgcattgatgcctggaacagcgaacagctcccgatctacgagcctggcctcgatgaggtcgtgaaggagtgcagaggcaggaacctcttcttcagcactgatgtggagaagcatgtcgccgaggcgaacatcatctttgtatctgtcaacacccccaccaagacccgtggtcttggagcaggcaaggctgctgacctcacctactgggaaagtgctgctcggatgattgctgatgtctccaagtctgacaagatcgttgttgagaagtccactgtccctgtcaagactgcagaggccattgagaagatcttgacccacaacagcaagggcatcaactaccagatcctctcaaacccggagttcctcgcggagggcactgcgatcgaagatctgttcaagcctgacagagtgctcattggtggccgggagacccctgagggcaagaaggctgttcaggctctcaaggaggtgtacgcccactgggttcctgaggacaggattatcaccaccaacctgtggtccgctgagctctccaagctcgcagccaacgcgttcttggcacagaggatctcctctgtgaatgccatctccgccctatgcgaggcgactggtgccaatgtggccgaggttgcttactctgtgggaaaggactccaggattggccccaagttcctgaacgccagtgttggctttggtggatcctgtttccagaaggacatcctgaaccttgtgtacatctgcgagtgcaatggccttcccgaggtggccaactactggaagcaggtcatcaagatcaacgactaccagaagagccggtttgtcaaccgcgttgtgtcctccatgttcaacacagtctccggcaagaagatcgccgtccttggctttgcgttcaagaaggacaccggtgacaccagggagacaccagccattgatgtgtgccacggtctgttgggtgacaaggcacagatcagcatctacgatccacaggtcaccgaggaccagatccagcgggacctcgccatgagcaagttcgactgggaccactcgatgcacctgcagccgaccagccccactgcattcaagcaggtgagcgtggtgtgggatgcatatgaggccaccaagggggcccatggtgtctgcatcctcaccgagtgggacgagttcaagaccttggactaccagaagatctttgacaacatgcagaagcctgcattcgtctttgatgggcgcaatgtggtcgatgccgagaagctcagggagattgggttcatcgtctactccatcggcaagccgcttgatgcctggctcaaggacatgcccgcggttgcataataattttccatattccacacctgaacctcatagctctctacactctgctggtgctgaagagagtctgcgtcgaagaggaatttggttgaccatcattttttatagctcgttgttcgtctttacatacaggagaggctaccattttgtcaaacagaaagttgatttctgttagtatctttgttcaagtttttcttgtgttgcaccattgtagatctgaaatcttcaggcctctaccgtttgagtgccaccctcaatcttgtatgatgacatgaattcttatagccgattt

SEQ ID NO: 643 - DNA, 1623 bp, Oryza sativa
  ref <308>: DATABASE ACCESSION NUMBER: AK058753
  ref <309>: DATABASE ENTRY DATE: 2001-12-06
gcgcttctgcccttttacgaccgaagaggtagccaacccacgcatcccccccctgacctgccccctccacagccgccgccgccgccgccgctacggctcacgagagtaccgaacgatctgctgccacccccaacccaagtgaccaaccgaaggcggagggtagcaacttcggtctgctcatcccaagttaggcatggcatcaactgttgccatcaatttgattggtgctcaggctggcattatctcaaagttaaggaattgcgacatcacaagctacagtggcttaaaggcaagatcatctattagttttgagtcaaggtcatcattcctgggtcagaatgcatctcttcgatcatctatctctccaaggattgtaccaaaggcaaactctggatctcacatttctcctgaggcatcttacaaagtggcagttctcggtgctgctggtggcattggtcaaccgttgggcttgttaattaagatgtctcctctggtctctgcactacatctgtatgatattgcaaatgtcaaaggagttgctgctgatctgagccactgcaacacaccttctcaggttctggactttactgggccctcggaattagccaactgcttgaaaggtgtggatgttgttgtcatccctgctggagtcccaaggaagccaggaatgactcgtgatgatctttttaacatcaatgcgagcattgtcaagacacttgttgaggctgttgcagacaattgtccagaagcctttatccatatcattagcaacccagtaaactcaacagtgcccattgctgctgaggttctgaaacagaagggtgtctataaccccaagaagcttttcggagttaccaccctagatgttgtcagagctaacacatttatagctcagaagaagaacctgaagctcattgatgttgatgtcccagttgttggtggtcatgctgggattactatcctaccattgctgtcaaaaaccagaccatctgtcaccttcacaaatgaggaaactgaagagctgacaaggaggatacagaatgctgggacagaggtggtggaggcgaaagctggtgctggatctgctaccctgtcgatggcctatgcagctgccagatttgttgagtcatccctccgtgcattggctggtgatccagatgtttacgagtgcacatttgttcaatctgaattaactgagctgctgttctttgcatctagggttaagcttggtaagaatggtgttgagtccatcatttcttccgaccttgagggagtgactgaatatgaggccaaggcccttgagtcattgaagcctgagttgaaggccagcattgagaagggcatcgagttcgtccacaaacagcaggctgccgctacttcttgaagtgtggagaatgactatcggcatgagagaagataataaatgcagaaatggttctcaatagcttttagttttgaaggcggaatttttcgtgtctagttgttgcttgtttagtctcttctgatcacatgagggcgtggatgcccaaactgttgcctgttttcatgagctatttgacccttgtgcctgcatcttgatgagatacacaaactaaggaataaagtagtttttgattgttgcct

SEQ ID NO: 644 - DNA, 267 bp, Oryza sativa
  ref <308>: DATABASE ACCESSION NUMBER: AK058754
  ref <309>: DATABASE ENTRY DATE: 2001-12-06
agttccttcccccttttcccgccgccggcgaaagatccggccgccggaggcttggcaacttaatttagtatattgctggccacatgattacataaaatgatatatgatcgttgcttcgtcgcttcctccattattttcctttgttttttctattttgctttttgtttttgagatgatggttgttgttctccatttctgatcaattgaaataataagcaggttggcaaccttcgatatgataatatatatgtgatgaatcgatttctt

SEQ ID NO: 645 - DNA, 156 bp, Oryza sativa
  ref <308>: DATABASE ACCESSION NUMBER: AK058755
  ref <309>: DATABASE ENTRY DATE: 2001-12-06
gtatgtagtgcagtgttgttggtaattactgaatcgccttgctaatgcctaatggctgccctgcttgctatcatatgcatgccaatgtgaaggacaggtttggcttggtttgaacgctgagagagattgaataacacgagacctcctgtatctggc

SEQ ID NO: 646 - DNA, 433 bp, Oryza sativa
  ref <308>: DATABASE ACCESSION NUMBER: AK058756
  ref <309>: DATABASE ENTRY DATE: 2001-12-06
atctttcttctgtcccaatcgatcatatattttgcaattggatttgaattcatgggcgtcagtgtctccagttagatcaaggcagggcaattgcaagatctgctccagaagcaggatccatgttaaagcagtcaatggggaactcttgtgccttgcatgtgacaggaaagctcaacgctgcggcaattgagggcttcaacaaattgcgataagcatatgggagataagaacacattgagcaagaagaagatcatctagtattgtcaacgtatttaataggcaagtgctatctttagtgaagagtagcttcgcatcttatgtaacttagcatgttaatagtgacaattatcatttcagagctacagatattgtagcacgacatttaacacctatgaacttcaatggaatacatttacgataacaaaactggagg

SEQ ID NO: 647 - DNA, 610 bp, Oryza sativa
  ref <308>: DATABASE ACCESSION NUMBER: AK058757
  ref <309>: DATABASE ENTRY DATE: 2001-12-06
atgagcagaagtctttcgccagggacgaggagaagtctttggccagagatgagcagagctcccttgccagggatgagcagaagtctttcgccagggatgagaagtctttggccagggacgaggagaagtccttagctagtgatgagcagaggtcattcgatgatatgtgcaaacagtttccattgctcgcaaaggaaattaaggtgctcatggagggacaacctgctatcatggaattgttccctaggttggacggcgaccaagttgtcgcaattgagaaaaagttggagaacctgaggtggattgatatgaagaggaagaaaaagatggcagttaagatggccaagattagaaagggactaatttacaagctcgaaggagctgcgatcctagctgatggtaatatgatccactagtctcccctcgtcatcttcggttccatagttaagtatcagttagctctatactctataggttaattagtagtgtccttttgtgatggtaattatgtccttttggtggtttgatagtgaatagattgggcaagtatgcaaaatcctgctgacattctaagttaatatgatgcttatggaagaagctgtatgttggg

SEQ ID NO: 648 - DNA, 224 bp, Oryza sativa
  ref <308>: DATABASE ACCESSION NUMBER: AK058758
  ref <309>: DATABASE ENTRY DATE: 2001-12-06
aatgcatgaactgaactgtaggtaggcggtctgattcagatgcttttccagtggcgatgcactctagttagttaaaggaactaacagcaattatgtaattagcctgtgcaaggggctgggctcatatcagtagatttttttccattgtctttttatttgtgattgtctttttctaatatttttactgtacgatggtgaaatgcgcaaaataccctgttgtgccc

SEQ ID NO: 649 - DNA, 759 bp, Oryza sativa
  ref <308>: DATABASE ACCESSION NUMBER: AK058759
  ref <309>: DATABASE ENTRY DATE: 2001-12-06
aagatgcttcaggcaattcgattcttcttgatgttggtctttggttatctcaaaagataaaagagcatttcaagaaaatcaagactactataaatctcaagtatatagatcctacatacatgatacgtgccattcctagcaatgcatctgacaatgtgtattgcacactgttggcacacagtgtggttcatggagccatggctggatacactggtttcactgttggccaagtaaatggtcggcattgctatatcccgttttacaggatcacagagaagcagaacaaagtttcaattactgataggatgtgggcaagacttctctcctcaaccaaccagccaagtttcctcagcaagaaagatgtggaggacgcaaagatggaagaagagagagcatccaagtttttcgatgggccgcctcccaaccccaaggttgaagacaaagtcgcttccaatggcaaggctgtgaagtgaggcagaaggctactgatctattatgtgcagatggattaattattactcaataatgtcagtaatctatctatggctagtgagatggattagtaaataatattagtatatctatggcaagtgatgctcagctcttcctgtccaaattaaaatgccgagaatagatctcctctagcaggttatcgtcattatatttatgttactgctgtttgcttgctgtttatggtaggcatctcttggaatgctataattttttttcacatctaatgtgatatgtctatattgcggt

SEQ ID NO: 650 - DNA, 602 bp, Oryza sativa
  ref <308>: DATABASE ACCESSION NUMBER: AK058760
  ref <309>: DATABASE ENTRY DATE: 2001-12-06
cgatgcgttgtcagcgttgtaatgaagcaggccattctacacaattctgttctgttgacaaacttagcttatctgcagtaaaacctatgagtgaacggaacatgaaggattcctctgctaaaaggaataaaacatttgaagctactaatgtgatagcagctgaaaaagctgcttccagaccagcagatcaatctgagcacattgtgaaatgtggtccttctcacaacccaatgtgtaggcctaaagatcttttatccacctcatttggccatgtaaagaagccctcacaattgtacgggcaaaccaatgagcaggatatgagaaacacttcgagcaacaaagcttccacagatggtagcaagttgaaacccaatgagtgccagactgtatcagtcaagacaggaagattagttgatggcagcttaactatgccagatgctctgatggacaaatcttcaactgttccagagttggatttcatatggcagtaagaatttcctccttttatatctcataagcatttctcgctttttgcaaaaagtttgctgttgattcagctgccatcagccaagcattgtgaatcattttgtaagaaaatagtg

SEQ ID NO: 651 - DNA, 1210 bp, Oryza sativa
  ref <308>: DATABASE ACCESSION NUMBER: AK058761
  ref <309>: DATABASE ENTRY DATE: 2001-12-06
acacgcccaccccacgcccgccgcgcgcgcgagagagatcgagatcgaccgccaccgtgagcgcctcgcgcttccccgcccgcggccacggcaccgccggcctcagccggcgccgcctccgcagcagccaagaggagaggcacagccagctccgcctcctccgcctcttcgacgccttcatcctcctcgccgccgccgccgccgcatccgcgacaggggtcccgtagcgcggccgccgtcgcgatggccgcgtccgttctcgcgctcgccgtcgcgttcctcctcggcgccagcggctacggggtcgacaggggcgccgcggccgcctccccggcggcggagggcgtcgaggtggcttatgggagcaccatcaagctgatgcacgagaagacgaagcaccggctgcactcgcacgatgtgccgtatggctcaggcagcggccagcagtccgtcactggcttccccgaagtcgatgattccaatagctactggatcgtgcggccctctccagattcatcagctaaacagggtgatgccattgaaaccggtagcatcatcaggttgcaacacatgaggacacggaaatggttacatagccacttgcatgcttcaccattatccggtaacctagaggttagctgttttggtggggatggacaatcagatactggagattattggaggctggagattgagggaggtggaaagctatggaaacaggatcagaaagtaagactccgacatgttgatactggaggttatctgcacagtcacaacaagaagtacaacaggcttggtggtgggcagcaagaggtatgtggcgttagagagaagcgagctgaaaatatttggttggcaacagagggcgtctaccttcccgttaacaaaagcaagtaaactcaacattcccatgggtgcgtccaaggttaacatagcaccagaattttactgacattttgttctgctaatgcttttaaatttaaagaagggacctaaaccctgagtcccgagtattttgttggttatagatgacgatgtgcagaaaatgagaaatatacaaacgtttcatgtagccaatttactttctaatattcagaacgacaagctgttgtataatttgtatttgctcttcatgctgacgctagcaagcacacctatcaactatgtttgtttactattaagctaagtgcaattatgttaagcttggtat

SEQ ID NO: 652 - DNA, 407 bp, Oryza sativa
  ref <308>: DATABASE ACCESSION NUMBER: AK058762
  ref <309>: DATABASE ENTRY DATE: 2001-12-06
cagtaactggtgagatgagaattgcattcgatcaacatccattccatgtgaagctcaactctttgcagaaacagaactacagactgcaaacttttccgcgcagcgttagacatgcaattcttggcagaagaagtttcaagtgttcgaatttttcacatgattcaggatcttcgcacaattttgcaaatgaagcatgtgcaagaggtttgagttgagcaattaccaacagccagttttttaggactctgtaagtataggtatttctgtacagcttagatgaagaatccaccatccaccgtacacccctattatttttgacttgttacacaattttcttgaacatcgtatttctgtaaagtttgtagttaacaagtttaggaattcggcaatcttacctgattcttgtg

SEQ ID NO: 653 - DNA, 1359 bp, Oryza sativa
  ref <308>: DATABASE ACCESSION NUMBER: AK058763
  ref <309>: DATABASE ENTRY DATE: 2001-12-06
attaaacgagagatatctgtgatgaaattagtgaggcaccccaacattgtacagctgtatgaggtcatggctaccaaatcgaagatatactttgtgctagaatatgtcaagggcggtgagttgtttaacaaagtagctaaaggtaggttgaaagaagatgctgcaaggaaatacttccagcaattagtaagtgctgttgatttctgccacagtagaggcgtttatcatcgcgatctgaagccagagaacctacttgttgatgaaaatggaaacctgaaaattaccgattttggattgagcgctcttgctgaatcaagacgacaagatggccttctacacacaacttgtggaactcccgcatatgtggcgcctgaggtgatcagccgaaaagggtatgacggtgtcaaggttgacacatggtcttgtggtgtgatcctgtttgttctgatggctggttatctgccttttcaagattcaaatttgatggagatgtacagaaagattgggaaagcagagttcaaatgcccagcttggttttcgtctgatgtacgaaaattagtttcgagaattcttgatccaaacccaagaagtagaatgccaattacaaaaataatggaaacttactggttcaagaaaggacttgatagcaagctaatccttaagaacgtggagacaaatgaaccagttacagctcttgctgatgttaatgttgttttctcctccatgggtagcagtagtagcaaaaagactgaggagaaacaggatgcaggaaagctaaccaaccttaacgctttcgatattatttctctttcggaaggctttgatctttctggcttgtttgaggagactgataaaaagaaagaagcaaggtttacatcaagtcaatcagcttcagctattatctcaaaactagaggatgttgcctcatgttcgaagttgacagtgaaaaagaaagaaggtggtgtgctgaaaatggaaggtgcaagtgaaggaaggaaaggtgtattggcaatcgatgcagagatcttcgaggtgactccttcatttcatttggtagaaatcaagaagaacaatggagatacgctagaataccaacatttgtggaaggaggacatgaaaccagctcttaaggacattgtttgggcttggcaaggtgaacgccaggatcagcaacctgaagatcatggccagccatagaattgtttcaatgtcgaaatgtttcgttgccttaggaaaggcactgcttatccttttgcttattattcgttctatcttctgtcttcccaaaatccatagctcaatgaaattcgcacaacaatgtaattggattctaaggaatctgaacttataatgcagtgt

SEQ ID NO: 654 - DNA, 457 bp, Oryza sativa
  ref <308>: DATABASE ACCESSION NUMBER: AK058764
  ref <309>: DATABASE ENTRY DATE: 2001-12-06
aacaagtttttctccaaagtgctcaataagggtgatgtgttcgtattccctgtggggctcatccacttccaatttaaccctaacccctacaagcccgcggtcgcaattgccgcacttagcagccagaaccctggtgccatcaccattgcaaatgcggtgtttgggtcgaagccaccaatctccgatgatgttttggccaaggcattccaggtcgaaaaggggacaatagattggctccaagcccagttctgggagaacaaccattactgatcatcttactgattgcatttaagaaaaagttatgtgcagttacagagatcctgcataattaactttatatactacaataaaatgacttctatttcgtgtaccactactagctatattctgtgatgtaattccaatacatgtgtatggttttcctgtttaattaatgaaatacagtgttctttgtgac

SEQ ID NO: 655 - DNA, 497 bp, Oryza sativa
  ref <308>: DATABASE ACCESSION NUMBER: AK058765
  ref <309>: DATABASE ENTRY DATE: 2001-12-06
atcaccctctgcccagacccgaagacgaccagctgctgcggagctcttgaatcatggattggatagtggagtgagtgaacctgccggctacggggagctcgccggaccaggtagaagatgatgaaattgaagtgttgtcaagtttctccgagaaagcccggtgaggatggcaaacatggagtgaagagggtatggtgtatgctgtggcccgaagaagggcctcctatgatggaaattgtgagcaaggctggccctcgaatccttttttttcccctgatgaatatgtaatttcgatatgctgttggaatcggttgaaatctatttgtaactccactgtctcatttccgcatcatatatgtatccattgctgaaagaggtgtaaagaggtaaatagatagcgtgtacccgagcggactatgcatcattggattgtatctatgtttctgatggtcttgtgggtttgaggccttgagcttgagaatgtattttttttcttt

SEQ ID NO: 656 - DNA, 273 bp, Oryza sativa
  ref <308>: DATABASE ACCESSION NUMBER: AK058766
  ref <309>: DATABASE ENTRY DATE: 2001-12-06
gatttctggtgggggaatgtgatgccggcccgggagctggtgctgctggggaaggaggccgaagctagatcctttgaaccacagcccaagcaccggtcgacaaacctggtgatttttagaagcaggaagctagcttctgaagccaagttgttgtgcaaggatattggcggtcatgtagaattcttcccatgagtagctctgccaatgactgcacactgtattcagattatttattctttcaatcaaaaacattgaattgaatgactagttctc

SEQ ID NO: 657 - DNA, 492 bp, Oryza sativa
  ref <308>: DATABASE ACCESSION NUMBER: AK058767
  ref <309>: DATABASE ENTRY DATE: 2001-12-06
ttggaggagtagagtatcccggtcaaagccatcagccatctcgacgttttcttccatctcgcatatttcctgcaatggcagggaatgcgtcaggggtgcggaggctctacctctctctctacaactggattgtcttcatcggatgggttcaggtgtcgtggttcatggcttcgtttgccacagtatatccagtcttgtttcgctacttgatcgccctgcggaagaaggccttggcaaaagcaaaaccacataactactgaagagctatctaatctggtttctgctcgcagctacagctcaggttgctaccgtttcttcagcaaataagtaaaagtgtattagaatggaaatgccgaaatacatggactatcttttcccttggtaaataaaaatgtacacgagtaccattttcatgatttgctaattaatggtgtgttgtaccaaactttggcttttccatatgtaaataaaattgcactccgtatcgatgcc

SEQ ID NO: 658 - DNA, 288 bp, Oryza sativa
  ref <308>: DATABASE ACCESSION NUMBER: AK058768
  ref <309>: DATABASE ENTRY DATE: 2001-12-06
ttcgatttaatttatacctcacatcgccgatgacggcatcatgtcccgacaacagtgtgtttgttgctggattattttttttgcattctccttgtaagaaccttggtacagagaccatgtggtattccgtgttgtaaatttgtcgaggttttgtaagggggtaaccgagtcagtgctgtaagaactaatctggcagccgataggctgttggtgtgacattgttgttgatgtatggcggcgttcgcagatcctatggtattgtatttaagcatcaacttgttattgttg

SEQ ID NO: 659 - DNA, 282 bp, Oryza sativa
  ref <308>: DATABASE ACCESSION NUMBER: AK058769
  ref <309>: DATABASE ENTRY DATE: 2001-12-06
aaagtgcttagtaggcacgtcagaatgattttaggtgatgacaagctcactgctaccgtacagatgttatttcccttgtacggtgcttgagtcactgaagtatcggtgacgccactcgattgttagcatgtaataaagcttagaattgttatggacagaagccaatctctttgttatgagggctgtttatgtccaggtcttgtatgctattataatacttatggcttgtgctatggatggtataatctgtgctccaaactatacagtaaatatttttgcggg

SEQ ID NO: 660 - DNA, 319 bp, Oryza sativa
  ref <308>: DATABASE ACCESSION NUMBER: AK058770
  ref <309>: DATABASE ENTRY DATE: 2001-12-06
gacgagttgttgcttatctgctcgtgttcgtatttggttactatagtggttaggcaggctgtcagcttctctaactatttgctcttatttgtttattcgcacgattatttgtaatgcatgattacatcgtgaaaatatataaatatgatttggaatgcgtattgtctaaatcgttgtgtgctgcctgaatcatattacttttcggggattgctgcctgaatcatataagaggtagaagccaaatgaaatgcctcttcaaattatctcaatcattgagaggtccttaacatgaattgagaattttgccggcttagccgtg

SEQ ID NO: 661 - DNA, 1510 bp, Oryza sativa
  ref <308>: DATABASE ACCESSION NUMBER: AK058771
  ref <309>: DATABASE ENTRY DATE: 2001-12-06
aacatcccactcccccttccaagcttcttgtctcctctcctctccccaactcccacgccatctcgccaccaccaaccgattcaggccgcgcacgccattaatggagtacgagcgcatccacggccccccgctccaacgtcagtcgggtggattctccccagctaagctacgagcaatgcttctcggactagagaaaaatcagcacaacggggaggacacatcgcctggggccaacgattccggcgagctggacgaccagaggagcatggagtgctccacctccaccgaaatgtcgagcaacagtggccacagatcaagaaaccgagctcaggacgacgacagcttcgactccgagagcagctcgtcgggcccgccgacggtgaagaggccggcggcggtgaccgccttgctgccaccgttctctaggccgacgccgtcgaagtgggatgatgcagagaagtggatttctagccccacggcgaaccgcggtggccgtgtggggagtgcagctggggctgcgccgaagaaatcggcgctggcatttcctgaacatgtaagccggcctccagccgttgctaaggtggttgctgaggtccccatcaacactggaaccttggtgaagaattcagttgctctcgcacagcctatttcatttaatcctgcacaaagtgcttcgatagttgatgaaccagctcctgcagttaggtctgtttcgatgagagacatgggcacagaaatgactcctattgccagccaggagccctctcggactgggactcctattatagcttctagtccaacctcctctcggacaccaacaccacaacgtaatgcagaaatcagtattggtgaatttggtccaaataagatggaaatgtctgaggaggaactacaaatgaatacaagaaaggaaatcatggatcttggccgacggctgggaaagacaactatagctgcatgggctagcaaggaagagaaatctacaacaagtttcgcaaatgtcataaccgacaaggctgtagaaatcgacagagaggctcgtgctgcagattgggaggaggcagagaaagcaaaatatcttgcaaggtttcagagggaagaggtaaagattcaagcttgggaaaaccaccagaaagcaaaaattgaagctgaaatgaagaggatggaggcaaagatagagatcaagagagctcgcgagcaggacaggctttcgagcaagttggcagctgcaaggcacaaggcagaggcgaggagggaggccgctgagtccaggaagaaccaagaagcagcaagaactgaggagcaggcggctcagatccggaaaaccgggcacataccttcctcaatctcctgctggtgctggtgcctgtgattcttcactctgccatgatcatctgttatttgggtagaagaaaaatacttgctccttgcacgaccatgtaaaatattcgctactggttggttcatcgttcagtgatcaatgccaatgagtcgccatttttgtcctctc

SEQ ID NO: 662 - DNA, 563 bp, Oryza sativa
  ref <308>: DATABASE ACCESSION NUMBER: AK058772
  ref <309>: DATABASE ENTRY DATE: 2001-12-06
cttttaacgttattttacttattccgtgagtcggaagcggggcctggcccctccttttggctctaaggcccgagtccctcgggccgatccgggcggagccggcgcgggtggtgctgcgcgtgctgcctgtggatgacgctggtggtggtggggctggtgttcctgggcgccatcgcggcgggggtgttctacgtggcgtaccacccgcagctccccaccttcgccgtcacgtccctccgcctcgccgcgctcaacgtgtccgactccgacgccgtcacctcccgcatcgagttcaccgtcaccgcccgcaaccccaacgacaagatcgccggtgaggtcggtcgtcaaggcctcctcctcctcctcgagcacgacggacgccaagtgtaagctccgggtcaagatctggatttggacattttgacggatttgacggtagagaagacttccttcttccttcttcttcttgttttttccctctctcaatttttcaacctttttttctctctctcacagtgtatgtggatttattggagtatagtttatatgattttcttttactc

SEQ ID NO: 663 - DNA, 536 bp, Oryza sativa
  ref <308>: DATABASE ACCESSION NUMBER: AK058773
  ref <309>: DATABASE ENTRY DATE: 2001-12-06
gatcaggcggaacctggccgagcagatggcgatgacgctgacgcgtgacccaagcttcaaggcggcgctcgtcactgccctctccggccgcatcctcgagctctcgccgaccaaggattgacgattgctactgatcgacgcggcggattcgatcgcttcttcttgcaactgcgggcatggccattgccatcctctcctgtctctgcctctctgttcttggtggcgccagcaagaacacgatcgacgcggtgtccatccatggcggagttcgatcgatcgattgatcggctagggaggaattgatgattcgctgtatataacctagaatttttacacgattactcgagggatagatcgacgagcaacattttcggccggcgcccatggctgatcaaccaacgatcatcggcggcggccggacgtgagcaagacgattcagaaaaaaattcagatatttgcgtcggcaaaagacgcttgtaacatgtagagtagggaggaaaattatttgaagtgtacgtagtgcagtccttttgagc

SEQ ID NO: 664 - DNA, 591 bp, Oryza sativa
  ref <308>: DATABASE ACCESSION NUMBER: AK058774
  ref <309>: DATABASE ENTRY DATE: 2001-12-06
agctggagtacggtaggggcagagggaatttccggtggagcggtgaaatgcattgagatcggaaagaacaccaacggcgaaagcactctgctgggccgacactgacactgagaaatttcatcgtgatggggatagatcattgcaattgttggtcttcaacgaggaatgcctagtaagcgcgagtcatcagctcgcgttgactacgtccctgccctttgtacacaccgcccgtcgctcctaccgattgaatggtccggtgaagtgttcggatcgcggcgacgggggcggttcgccgcccccgacgtcgcgagaagtccattgaaccttatcatttagaggaaggagaagtacaagtgcggatccaacgtcttctggaaatggtgatgatctgatgatgatcatcgatcgattggccagccatgaaaacattcctgtacctagaacctttgtgatatgacacaactgcatgcataattgaacgcttgtcgtgctcactgtgtatttgtatcatctgagtggagatttgtagcgaattttctctcgattcgtcgatctcactttgatttctaatcatgcatcttatattggttc

SEQ ID NO: 665 - DNA, 1018 bp, Oryza sativa
  ref <308>: DATABASE ACCESSION NUMBER: AK058775
  ref <309>: DATABASE ENTRY DATE: 2001-12-06
acaaaacccttgccccttcatgcagacttcctccatcagctcacacaagcaactcgcattctcctcctccttcctttcccccacgcaaaggaactgaccatacaactgataaggtcggagttcatataaccaacagcctaggacaggaacgccgccgagaaccgataacttaacaatggggttcctccatcggaagacctccaagcagacgagcaagctcaagaccctcctggggctcgccgtcttgcgcatcgccaccgctcgccggccccacctcgctcgcaaatccattgccaccgatgatgttcgccagcttctcaccctcgaccacctcgatcgcgccatccaccgggcagagcaggtcatagcggaggacaacatgttggaggcgttcgaaatgatagagatgtattgcaagcgactcatcgagcatgctgcgaagctggacaagcctggggagtgcaccgatgagatacgagaggctgccgcgtcggtcatgttcgccgccggttggtgcagcgaattgccggagttgctgttcgcgcgcaccatccttgcggataagtttggcagcgacttcaccgaggcggccaaggacggcaccggaatcgtcgatcccatgttggtgtggaagttgtccagtgatgcgaaaagcatggagctaaagaggaaggtgacgaaagagatagccatggagaacaacatcatagtggacttctctgagctccaagatgcgatcaaggatgaagaagactgataccatcgggagcttgagcacaacacatcatgctagaacaactatgggagctcagagtactcaagacgacaaccctgtttctaactctgatggatcttattagtgtatatcacaagtcaggtggggaagcaccggtgctcacaggaagctatacttcctttgataccagctcaaaaaaaaaaaaaaaaaactaggtgctgtgtgtgcactccaagattaccaagctgtgaatatacatgtggatgtccacccgttttttac

SEQ ID NO: 666 - DNA, 325 bp, Oryza sativa
  ref <308>: DATABASE ACCESSION NUMBER: AK058776
  ref <309>: DATABASE ENTRY DATE: 2001-12-06
accattacagtacaccacctcaagctagtagccaccttctccccaagcacacactctcctccccccagcgccgccgccggcgtctcccccgccgccgcgtgggtcgccgccgccgccgtggccgccgccgccgcgttctactgagatcgaggctgatgagatccgccgaccacctcattaatttattacccgtccatcagagggacccaccattcctcctcctcctctcctgatctcctccttttccttcttcatctgtggtggtggtgttgagctgtttattttatttctctctctatcttttttttcttccatttttttgggc

SEQ ID NO: 667 - DNA, 456 bp, Oryza sativa
  ref <308>: DATABASE ACCESSION NUMBER: AK058777
  ref <309>: DATABASE ENTRY DATE: 2001-12-06
accgccaagatcatccgcgaccgcctccgctggtgctaccgcatcgagggcgtcaaccaccaccagaagtgccgccacctcgtcgaccagtacctcgaggccacccgcggcgtcggatggggcaaggacgcccgcccgccggagctgcacgatcccaagaaggtggttgaggccgacgagtagctttgctgctgctgctgttcctgggctggagaggttatctttctattggatttgaaaggagtaaaaatgaactgctgcagtccttattttgacctctctagttgctcatggatttacaataaatgatgatgtcgaagtaacattgttgtgtgttgcctgtatttttccctgcccgttctataagagccgagcaaatacatgcttgaatttatctgccttgttcttgtactcaacgatatgaatgatatttagttttcatttaccctgcgccat

SEQ ID NO: 668 - DNA, 1373 bp, Oryza sativa
  ref <308>: DATABASE ACCESSION NUMBER: AK058778
  ref <309>: DATABASE ENTRY DATE: 2001-12-06
agctttcaagatcatgactgacccatttgtgggatcattgacatttgttcgcatatactctgggaagctggttgctggttcatatgttctcaatgcaaacaaagataagaaggaaagaatcggaaggcttctagagatgcatgcgaacagtaaggaagatataacagttgctgtggcaggtgacatagtagctcttgctggtctcaaagatacaattactggtgaaactcttagtgacccagataagcctgttgtgcttgaacgcatggaatttcctgatcctgtcattaaagttgctattgaaccaaagaccaaagctgatgctgacaaaatggcaaccggactaatcaagcttgctcaagaagacccatcattccacttctctagagatgaggagaccaaccagactgttattgaaggaatgggagaattgcaccttgacatcattgttgacagattaaagagagaattcagggttgaagcaaatgttggagctccgcaagtcaactaccgtgaaagtatttccaagatttcagaagtacaatacgttcacaagaaacagtctggtggatctgggcaatttgcggacattattgtgcgattcgagcctttggaggctggaagtgggtatgaattcaagagtgaaataaagggaggggcagttccaaaagaatatgtaccaggcgtgatgaagggaattgaggaaagcttgcccaatggtgtccttgctggttaccctgttgtggacctccgagcggtgctggttgatggctcataccatgatgttgattcaagtgtcctggcattccaaattgcagccagaggtgcattccgtgaaggattgaggaaggctggtccaagactcctggaacctataatgaaagttgaggtgataacccctgaggagcatttgggtgatgttattggtgatttgaactccagaagaggacaggtcaatagcttcggggataaacctggtggcctgaaggttgtcgatgctttcgtgccacttgcggagatgttccagtacgtcagcacgctgagaggaatgaccaaggggcgcgcgtcttacacgatgcagctcgccaagttcgacgtcgtcccacagcacatccagaacgagctctctgcggcgaaacaggaggaagctagtactgcttaattttttttccagattttggtagatatactaaacggcgacaccggagcaggtggataataggacatccaagtgtatgtagctttgtagcgtcaagcccctcggggagatattgtttgccattgttttggacctgataatggccttgtcaagttcttttcttctttttgaagactgccttgttaaggttttcagaagagaaagcggtacctat

SEQ ID NO: 669 - DNA, 651 bp, Oryza sativa
  ref <308>: DATABASE ACCESSION NUMBER: AK058779
  ref <309>: DATABASE ENTRY DATE: 2001-12-06
gtatgatgctcattcgggtggagagcgtgaaattcagagaaccatgttggagttgcttaatcagctggatggttttgattcaaggggagatgttaaagttattttagcaacaaatcgcattgaaagtcttgacccagctttgcttcgacctggtcggatagacagaaagattgaatttccgttaccagatattaaaaccaggaggcggatcttccagatacacacatctaagatgacattggcagatgatgttaacctagaagagtttgtgatgaccaaggatgagttttctggtgctgacatcaaagcaatatgtacggaggccggattgctcgctttaagggagcgcagaatgaaggtgacacatgccgatttcaagaaggccaaagagaaggtcatgttcaagaagaaggaaggtgtaccggaagggctttatatgtgagacatccaccactcatcagcaccagaattacccccaggacacggttaagtgtaatagagaactggtagagctggtgtttggttcaatgttcggagaatgtttgcttacacccttcttattcagcaatgtcgaactaaagaaccccctgaacaatgtatggctaccaggaatgcatgcagttacggttcaatgttaaatgctctttgatc

SEQ ID NO: 670 - DNA, 1190 bp, Oryza sativa
  ref <308>: DATABASE ACCESSION NUMBER: AK104004
  ref <309>: DATABASE ENTRY DATE: 2002-08-28
gtcttctcctcctcctccgcttcgcctcctcgcgcagatcccgacgcacacctcgcgcccgcgccgcctataaattcccccgcctcgccgttgccgccgccgcgggaagcgaggcgaagcgagggagcgcgtctagatccgcaccggcgaaacgacccaagctgcctttcccgtcgccgcacgcatcatccgggctctgttgctgctgctataccgcgcccgttcgctgtagcagcaggaggaggaggaggaggagcggagtggtggcgatggcggcgaggaagaatgccggtgtcctcgcgctcttcgacgtcgacggcaccctcaccgcgccccgcaaggtggtgacgccggagatgctccagttcatgaagcagctgcgcgagcatgtcactgtgggcgtggttgggggatctgatctggtgaagatttccgaacaactcggcaaatcagttactactgattacgattactgcttctctgaaaatggcctggtcgcgcacaagaacggcgaactcattggaactcaaagtttgaaatcgtttcttggagatgatcagctaaaggaatttattaacttcacgcttcattacattgctgacttggacatcccaatcaaaaggggtacattcatagagttccgaagtggaatgctgaatgtgtcgcccatagggagaaattgtagtcaagaagaacgtgatgagtttgaaaagtatgataaggtacataacattcggcctaaaatggtctcagtgcttcgtgaaaagttcgcccacttgaacttgacattttctattggagggcagattagttttgatgtgttcccacaaggctgggacaaaacttactgcttgagatatcttgaggaatttcaagaaatccatttctttggggacaaaacctacaagggaggcaatgattatgagatatttgagtctgaccggacaattggacatacagttaccagtcctgatgatacagcagagcagtgcagatctctcttcatgtcgaagtgacctgattaccgtgcattttatttattttacatagcattcctcacatttcctgtatttccctttttttttataccatacaagtgctgcttcttacagaatgtacttctccgtattcacaagtttcagattatatgtgtacactttggttcaaataaatgagagctggcattgttt

SEQ ID NO: 671 - DNA, 415 bp, Oryza sativa
  ref <308>: DATABASE ACCESSION NUMBER: AK058780
  ref <309>: DATABASE ENTRY DATE: 2001-12-06
atatgatgttacttcttttatggatgagcaccctggtggcgatgaagtgttgctagcagtaactggcaaagacgcaaccaatgattttgaagacattggccacagtgaatcagcaagggagatgatggagaagtatctcattggggagattgatgcttcaaccatcccagtaaagcgtactcatgtcactccccagcaagcgcccggcaacccagacaagggcgatgacatgctcattaagatcttgcagtttcttgtccccatcttgatcttggggcttgcatttgctatccggcagtacaccaaatctgagtagatctgttattacaatgttgataatcaatatggtccatgaagctatattaggtgaaatgatttggatcaaaagaactaaataatgatatttgttgagggg

SEQ ID NO: 672 - DNA, 967 bp, Oryza sativa
  ref <308>: DATABASE ACCESSION NUMBER: AK058781
  ref <309>: DATABASE ENTRY DATE: 2001-12-06
aacaaaaaaactcctatacctcccctcggcggcgaggcggcggagctccggcgagcctggagcacgtcggggtttcccctcccgcggcctcgccgtatcggatcgccggcgtatggcctacgtctacctaggtattccttccatgcatggcctccgtgctccggctagccgtcccgcccccacggtcgccgccgtgtccccgcgtgctgccggccacctccggggcgcggcggtgcggcgggctcaagctgtaatcagccgaagaggcctcgatatcccttatcccaccacctgcagatagtgatacagtgctccaagtgtgcgctaattctctgaagtctgaacatgcccttggcaaccgatttaacccagtgtcagcgatactctattagttgagttcagatactatgcgaggaattgagagacagccgagcttcagcacaaataaaaatggagcatcttccatatcccaacgaccctgatgtagcctgcaagagactgcatatctcttctgaaactttgaaaatataaaaatatattgcagaataagagctttgctgtgatgactaatcttctctagttggtggtcccatgtggtcagaggtgtctctaaggaagctaagaaagagctgaactctgtgattatcttagtggcctgggaaatttggaaacaccggaatgactgcatcttcaataatgccacacctagtactgctgccgtattggatgctttggcaagggagagtttattattgtgtactgctggggcaagagctcttcatgaactcttggcccggtcgctctccacctaggagcttagctcctgcgggagttgttgcgcatcgcctcggcgatgtttttgtgtttttctcttcttttttcagagtgttcctttgtgaagcactctgctgtacataccttttcttctccttaatgaaatgaaacgcatggctcttgcgtttttgag

SEQ ID NO: 673 - DNA, 897 bp, Oryza sativa
  ref <308>: DATABASE ACCESSION NUMBER: AK058782
  ref <309>: DATABASE ENTRY DATE: 2001-12-06
acgtcttgcgcacgcccacgcccacgcccacgcggacgcagcgggtggtgggttgttcggtgccctccgccgccggctacctcccctcctccgctcctccccatcttcacaaataccatcccaaccagtgatccagatcgagccaaccaccacccccaatcggatccctcacccgattggcccggccagatcgccgccgatccgaccccgcgcaaccctctcccgcggccgcgagcgagaaccgaatccaatatggctgccttgccattagccacagccgaattatgtgatgcaaatgcacatttgatcatgaatggcgagcttcgtgctctccagcccgtcttccaagtctacggaaggcggcaggttttcgccggccctatcgtgacgctgaaggtctacgaggacaatgttcttgttcgcgagttcctggaggagaagggccaaggcagggttctcgtggtcgatggtggtgggagcctgcggtgcgccattttgggtggcaaccctgtgcagcaggcgcagaacaatgggtgggctggcatcgtcgtcaatggttgcatcagggacgtggatgagatcaatggctgcgacattggtgtccgagctctgaactcgcaccctatgaaagcaaacaagaagggcatcggggagaagcatgtgcctgtgaccattgcagggaccaggatttgcgacggggagtggctctacgccgatactgatggtattctcatctcaaggactgaattgactgtgtgaatctctctgtgtgtgtgtgtctgtacgagaattcggcgcataaatggagtgctgcttctgcccctcctggtgtattgtcaaaaactgtaataacgtactgttaaattaaatgatcacttggaataattgatgctctct

SEQ ID NO: 674 - DNA, 293 bp, Oryza sativa
  ref <308>: DATABASE ACCESSION NUMBER: AK058783
  ref <309>: DATABASE ENTRY DATE: 2001-12-06
ctgactgctgacattatactttgtttttctttttctttttcttttttgtttttctgctgcttctgcttcgtctgctatcaagtagcggaccatgatttttttttcttagacagcactacagcagcatgtcttcatcttggtttttccttttcctcaagtgctccttatacacgcctccggggttacagattttgtatcattgtctattttgcgttttagacagaacatcacaatcggcaacctgtatgtaaacaccaattcatttgcaagttttggaaagtcatttctcatgc

SEQ ID NO: 675 - DNA, 259 bp, Oryza sativa
  ref <308>: DATABASE ACCESSION NUMBER: AK058784
  ref <309>: DATABASE ENTRY DATE: 2001-12-06
aaaaaaaaaaacaaagctctgacaacaaacgggaagccgaaagaattattcttctctagtgatttatttgctattgtggagcataccaagaattatttggctatcgaagatgatgaaattgttcatattaaggacggcagtgtgtcgatccttaagtttgaccatgagaaagagaagccagcttctgttcaacgagcattgtctgtccttgagatggaagttgagcagataaagaaaggaagttatgaccacttcatgc

SEQ ID NO: 676 - DNA, 1154 bp, Oryza sativa
  ref <308>: DATABASE ACCESSION NUMBER: AK058785
  ref <309>: DATABASE ENTRY DATE: 2001-12-06
tttgctgtcttgggtttcctttctccatcaaaccgtggaggattgatgactgcgatgctgctcatttgggtcttgatggggctgtttgctggatatgcttcttcccgactctataagatgtttaaaggatcagaatggaagagcatcaccttgaagactgctttcctgtttccgggaattgcttttggtattttcttcgtcttgaatgctcttatatggggggagaaatcatcaggtgctgtccctttctccacaatgtttgccttggtgcttctttggttcggtatctcggttccacttgtctttgttgggagctatcttggtttcaagaaacctgccattgaggctccagtgaagaccaacaaaatcccgagacaggtcccagagcaggcttggtacatgaaccctgccttcaccattcttattggcgggattcttccattcggagcagttttcattgagctatttttcatcctcacttcaatctggcttcaccagttctactacatcttcggcttccttttcctcgtgttcattatcctcatcatcacttgtgcggagattgcaatcgtgctgtgctacttccagctctgcagtgaggattacatgtggtggtggaggtcctatcttacttcaggatcatctgccatctatctcttcctgtatgctgggttctacttcttcaccaagctgcagattactaaactggtgtcaggcattctgttcttcggctacatgcttctggcctcattctctttcttcgtgctcactggcacaattggtttctgtgcctgcttgtggttcacgagattgatttactcatctgtgaagattgactaggcgcagagttgctatatatccggcttccaatagttctgtatgattattgtggagaattgtgagacgaggatcagaatccactttgtattttgccgattttcaagaaaatttatatcgtagttcttagtttataaaccactgatgttcattcactataaatgagatgatacatctctgatatgaggttatataaggctaattacgattgttaatttcatatggcagagcatatttctcaattcttatggaccactgtatacattcattttattatatacagttgccgaatactactgttttctgcaaaaaaaaag

SEQ ID NO: 677 - DNA, 706 bp, Oryza sativa
  ref <308>: DATABASE ACCESSION NUMBER: AK058786
  ref <309>: DATABASE ENTRY DATE: 2001-12-06
aatcgatcaatcgagcaagggacgggacagggacgaatcgtcgccggagaagaggagagggagagagagagagaacagaggggcagaaggcgagacaagatgatactagcggtgctcttctccaactccgacggcaacatcctcatcgagcgcttccatggtgttcccgcggaggaaaggctgcactggcgttctttcctcgtcaagcttggcgccgacaacctcaagggggccaagaacgaggagctcctcgttgcctctcacaagtccgtctctattgtttatacaatgattggggatgtctgcctgtacattgttggcaaggatgaatatgatgagcttgctctggccgaggtgatatttgcaatcacatcggcagtgaaggatgtatgtgggaaaccgcctacggagaggctcttccttgacaaatacgggaggatctgcttgtgccttgatgagattgtttggaagggtctgctggagaacacggagaaggacagagtccggaggttgatcaggctaaagccgcccgttgagccatgattttttgatcactttggaatatgtgtgtatccttctcgtcgtgtaatcatatctctcgcagtttatttgctggcagttgtttttttattccctttgggatggatgattctgtatgtgtacaatcctaatacattttgccactgatgatttgtactgttacact

SEQ ID NO: 678 - DNA, 1293 bp, Oryza sativa
  ref <308>: DATABASE ACCESSION NUMBER: AK058787
  ref <309>: DATABASE ENTRY DATE: 2001-12-06
tgttgtggctgttactggtgatggcacaaatgatgctcctgcattgcatgaggccgatataggtctctcaatgggcatttcagggacagaagttgccaaagaaagttctgacattataatcttggatgacaacttcacatcagttgtgaaggttgttcgctggggaaggtctgtctatgcaaatattcagaaattcatccagtttcagcttactgttaatgttgccgcactcgtgattaatgttgttgcagctgtgtcctctggtgacgtgcctctaaatgctgttgagcttctctgggtaaatctaatcatggatacactgggagctctggctttagcaactgaaccaccgacggataaccttatgaagagacagcctgttggtcgaagggaacctcttgtgactaatattatgtggcgaaacttgtttgtccaggccatttatcaaatagcgatccttcttatctttgatttttctggaagaagcatactgcggttacagaatgatagtcgggaggatgctgagaaaacacaaaacacctttatcttcaacacctttgtcttttgccagatcttcaacgagttcaatgcacgcaagcccgaggagaggaatgtcttcaaaggaataacgaaaaaccatctcttcatgggaataattgctataactactgtatttcagatactaattattgagttcctgggaaagttcttcaaaactgcgagacttaattggagattatggttggtctcagttgctattggcattataagttggcctctggcatatctggggaaattcattcctgtgcctgtaagacctctccaggattatttcaagcctacttgttggagaagagcttcacggcgagatgaagaggagagtggacagagctaagaccggcaaatattcagtgtaaatatccaagggtcaaagaaaaggacaagatattgtttttgcaggcaactcctgtagtggaagctttgcatgcagcgccgggtcaagtgacaccctaatcgttgatatttggcttcacttgatcggagttaatataaatcaaattctaactcggggaagcaatctttaacctcgtgttatttaaaggggttcataaaactgtacatgtttgtaagtacgaaattgtcgtattcttttgtttgttttttgttgctaactaggataaagtatatacattaggactggagttttagcttaatttaatttccttctatcttgttttgatggattgaatgacggagcaagcaaataaagggatatttataagtgtttagttg

SEQ ID NO: 679 - DNA, 599 bp, Oryza sativa
  ref <308>: DATABASE ACCESSION NUMBER: AK058788
  ref <309>: DATABASE ENTRY DATE: 2001-12-06
gacattatttttttcctcgaaactcagctgcaaggagaaggagaaggtaggctccagccatggcttcccagctctccgccgccacatccgtgccgcagttccatggcctccggacctactcctctcctaggtccatggtgacgctgccatcgttgaggatgagcaagaagaggtcccagggcatccggtgcgactacatcggctcagccaccaacgttatcatggtgacgacgacgacgctgatgctgttcgcggggaggttcgggctggcgccgtcggcgaacaggaagtcgacggcggggctgaagctggaggcgcgcgactccggcctgcagaccggcgaccccgccgggttcacgctcgccgacacgctggcctgcggcgccgtcggccacatcatgggcgtcggcgtcgtcctcggcctcaagaacatcggcgtcctggaccagatcatcggctaatcaaattcattaagctagtcacacgaatcaatactcctatgtgtaatcgatgcatgagtgcctgtgtgatggacgatgtaatgatcatgtaaattgtgcgtggaatcagtgcttatctagcttaattttgtttctgtc

SEQ ID NO: 680 - DNA, 675 bp, Oryza sativa
  ref <308>: DATABASE ACCESSION NUMBER: AK058789
  ref <309>: DATABASE ENTRY DATE: 2001-12-06
cttgcatcccttgaacgaggagtaggaaaggagctgaaggagaaagaactcgaggtggaggccatgaacaggaagagcaaggaactgaacgaacagatcaggcaggttgcattggaagtccagtcatggcagtcggtagcactgcacaaccagtctgtcgctaacagcatgaaaagcaagctcatgcagatggtagcccatagcagcaatctcaccagggaaggctctggcgacagcgaagtggacaacacagcttccagtcagaatgtcaatgctgtgcctggggttttcttccagtcaggcctcctcggcatcaacagcatggctgatggtgggctgggagcatgcaggttgtgcagaatgaaggaggcagcggtgctggtgatgccgtgtcgacacctctgcttgtgtgctgattgcgagaaaaatgctgacgtgtgccctgtctgccgcttccccaagagttgcagcgttgagatcaacatgtcatagctagcaacagccttataatcatcagcttagacagtggtacactgaagccgtatatacaaagctaaatctctctgcccctcccccccttccagttgtcattcttacatggtgtgtagatttgttgattgggactatggaagctatggtcctccagagtctcttgataaccatatatatagtttt

SEQ ID NO: 681 - DNA, 1133 bp, Oryza sativa
  ref <308>: DATABASE ACCESSION NUMBER: AK058790
  ref <309>: DATABASE ENTRY DATE: 2001-12-06
tcagctcagctcagctccctccttctccccggagaagcagcggccggcacggcagcaatggagaccctcctctccccctccacattgctctcccctctccgcggctccaagaagaagccggcgagccccgccgcgtcggcgtcgtcgtcgtcgtcgtctcccgccaggtccgtcgtctcctgcgcgctcaggaggcagcagccgccgccgcaggcggccgccgcttggcgcggagacggcggccgcggtggcggcgtcgggagctgggcgacgttcttgcagcacggcctggccgcggcggcgctgtcgctggcaatcagcatggcgccggcgcccgcgccggccgtggcgtcggagttcgacgtgctgaacggcgggccgccggaggacacgtacgtggtggacgacgccggcgtgctcagccgcgtgaccaagtccgacgtgaagcggctcgtccgcgacctcgagtcccgcaagaacatcaggatcaacttcatcaccgtgcgcaagctcacgagcaaagctgacgcgttcgagtacgcggaccaagtgctggagaagtggtacccgacggtggaggagggcaacaacaagggcatcgtcgtgctcgtcaccagccagaaggagggcgccatcaccggcggcccggccctcgtgcaggccgtcggcgacgagatcctcgactccaccgtctccgagaacctcccagtgctggcgacggacgagaagtacaacgaggcaatctacacgacggcgaagcggctggcggcggcgatcgacgggctgccggaccccggcgggccgacgttcaaggacaacaagagggagtccaacttcaagacgaaggaggagacggaggagaagcgcggccagttcacgctcgtcgtcggcggcctgctcgtcatcgccttcgtcgtgcccatggcgcagtactacgcctacatctccaagaagtgaacagcagcggctacctgttctttccaacaaaaaaagagagaaaaaatgagcagcatatggtgctgctctgtacagtaaatttgctcaggagatggctaaatctcccggttttctgtcggaattttagaggcgaaacagagaattatgatgaacacaggtgcaccaccgtgccggct

SEQ ID NO: 682 - DNA, 668 bp, Oryza sativa
  ref <308>: DATABASE ACCESSION NUMBER: AK104005
  ref <309>: DATABASE ENTRY DATE: 2002-08-28
actccagtactccaccacaagctctagcttacagctcactaccagtgtacattgttgctagttagctagagctagatctcgatcgagacaatggcgggtgctcgcaggacgatggcgctggttgcgttggtggcggtggtggcggcggcggtggtggcggagagggcgtcggcggcggtgagctgcggcgacgtgacgtcgtcgatcgcgccgtgcctgtcgtacgtgatggggagggagagctcgccgtcgtcgtcgtgctgcagcggggtgaggaccctcaacggcaaggcctcctcctccgccgaccgccgcaccgcctgcagctgcctcaagaacatggcctcctccttcaggaacctcaacatgggcaacgccgcctccatccccagcaaatgtggcgtctccgtcgccttccccatcagcacctccgtcgactgctccaagatcaactaattactagcttgatcatctccagctgagatcgatatgtatgggaagatctagagagtgactgttcactgctagctttgtttattttcttgctgcatgcgtacgtgcactatataatgtaataatgcgtttcaatgtttacatgtagtgtactatgtacactacttatatatttttcatatatataataatctaataataataatgttgtactg

SEQ ID NO: 683 - DNA, 1298 bp, Oryza sativa
  ref <308>: DATABASE ACCESSION NUMBER: AK058791
  ref <309>: DATABASE ENTRY DATE: 2001-12-06
ttgtttttacacgtaatgctactgaagctatcaatttagtagcatattcgtggggcatgtccaacttaaaacaaggagatgagattgttcttacgatcgcagagcatcatagcgctattgttccttggaaatttgtttcccagaagactggtgctactttaaagtatgttgggctaaccaaagaaggggttccagacattgagcagttgaaaggtcttctgtcaaacaagacgaagattgttgttgttcatcatgtctcaaatgtactcggttcaatgcttcctattgaggatattgtaacatggtcaaacagaattggtgctaaagttcttgtcgatgcttgtcaaagtgttcctcatatgcctgtcgatgttcagaggcttggtgcagattttcttgttgcatcatcacacaagatgtgtggccctacaggcgttggattcttgcatggaaagtttgacctcttatcatccatggagcctttcttaggtggtggtgaaatgattgcagatgtgttccaagacaaatccacatgtgctgagcctccttctagatttgaagctggaacacctgcgattggagaagctataggattgggaacagcaattgattatttgtcacaaattggcatgcagaagatccatgagtatgagaatgagttggcgacctatctctatgagagccttattgctgttccaaatgttcggatctacggtccagctccatgccaaactgttcaccgcgccccattatgttcttttaatgttgaaaatgttcatccaacagatattgccgaaattcttgacctccagcatggcgtggcaattcggtcaggccatcattgtgcacagatattgcatcgaactcttggtatcaatgcaagtgctcgtgctagtcttcacttctacaataccaaagaggaggtggatgtctttgtcgatgcgctgaaagatactattgatttccttacttctgaacactagtaccacggttcgattagtatacggcattctccctttttacaagtttcaggttgactttatctagccaaggggtcatacaattacaaaatgaaacaaccaaccaaaacatgtgtattagattgcctactttggcctttcttgtaaatcaagtccctttttctcccatccctgaaattttgcagaagctgaatttgtacaacagaataatttaagtgttgcagcaagctgtgagaaagctcatgaccttgaaggtttatttgtaaattatgctgacctgtatgttctcttcgttgaaaatcataaacaaggttacac

SEQ ID NO: 684 - DNA, 458 bp, Oryza sativa
  ref <308>: DATABASE ACCESSION NUMBER: AK104006
  ref <309>: DATABASE ENTRY DATE: 2002-08-28
aatgccagtggactgtgagacaaactggtggagttcacaacaatctcatggtacatcagaacccgcgcctgctccaaggagactatttgggcaatggattggtgttggaagatcatctccggaaaatcgatcacccgagggctcatcgtatcggcaaatgcacaccccaaggatgtagaccctcatgaagggaatttaagttaatacttaacatttgaaatctgaagttgcttgtaagaagatggaaaacccattgtatgaaattaagcccgggtcgtgccgtaagcctcgaagcaaatctgagaagaagaaacagaaaataacccggggtggacattttgatttggtttattgagttccatcacgtacatatttgaaatcaagttgggatattcggagtttcacctgtgatacagtttcgtattatgcaatttgtttaattcatatacttttgcatt

SEQ ID NO: 685 - DNA, 614 bp, Oryza sativa
  ref <308>: DATABASE ACCESSION NUMBER: AK104007
  ref <309>: DATABASE ENTRY DATE: 2002-08-28
gtaactacatcaacttcaagagcttcacagctatctgaagccttcggaaagctatatggccaatcaaagcaagtggcaagcagtgatactgttgaaccatcaaagcctcgtggtggtgttcatgagaattgcataacttgcatcgtgccattgagaaaaggaaacgacagtattgtcaaacggttcagcacgtcaggattggatggtaagattgtggtatgggatgcagaaaaccacatcgacattaaaaaatagctccagggaaggtttctgatcaatcacatccaatgaacttatattgatgcatggaaacaatggcaacgagccctgcaggttttaaagatccagggctagggaggagaatgcttgttttttgttgtacctgtacacaaaccatttctttagctggctctttagcatagaggctattgggatctctataagttggcttcatttttttggggagtaactcggtcttgaattaatattgtgtaatacctgtaaaatcctagctaggcaattacataaattcgacatctcatcccaagtgtttcgcggtattctgtgtaaaataaccacacgtggaattcacccgaatgctttcacttttgctc

SEQ ID NO: 686 - DNA, 427 bp, Oryza sativa
  ref <308>: DATABASE ACCESSION NUMBER: AK058792
  ref <309>: DATABASE ENTRY DATE: 2001-12-06
ttacaaaggcttctaaaacttctagaggatctgccttatctaagcaaatcatggttgggagtttggaggatgtcttgaagaaaatggagatgaatgagaggaattctggttgggatgacttgatctttataccccctgggaaaagcctcaaccaacatattaatgaggtatcagcataattttgttcttgcagtgataccacagggtttgagcacacatacacttgctcacttcaaatgctgtgatggccagccaatcaatagtgtcaagttgctgcctgagcttctttttaatactttcttgctagtggttcttgtaacaaaaaagttcaggattaaagtgaaaaaatatgtgtggttttttcattgtttcaaccttcaaacatcaatacaagctccacttgaagctggcgaagtgtatgaggcgc

SEQ ID NO: 687 - DNA, 688 bp, Oryza sativa
  ref <308>: DATABASE ACCESSION NUMBER: AK058793
  ref <309>: DATABASE ENTRY DATE: 2001-12-06
gagagatggcacaggcaatggcgtccagaccggccgccgcgccgtgctcggcctcgtcgccaccgggatcgccggcggcgccctcgcgcaggcggcgctcgccgaggccgccaagcccatcaagctcggccccccgccaccgccctccggtggactccctgggacgctgaactcggaccaggtccaggctcgccgtcgtcagggccgacgccgccgccgccgacgtccagaccggccgccgcgccgtgctcggcctcgtcgccgccggcggaggcggcggcgagggcgaaggagtcggcccaggacatcatcaacctcaagccgctcatcgagaagaagcagtggccgttcgtcagggacgacctccgcctcagggcctcctacctgcgctacgacctcaaaaccgtcatcaactccaagcccaaggacgagaagaagggcctcaaggacctcaccggcaagctcttcgccaccattgacgggcttgaccatgcagccaagatcaagagccccgaagaggcggagaagtactacacgttgaccaaatctgctcttggcgatgtcctcgccaagctaggctaggatcggcataatggccatatggggtttcggtgtttttatgtttgttcatatggaaccggcaatgtaccctccatgttgatattgtatcagcaagcacttacgtatg

SEQ ID NO: 688 - DNA, 582 bp, Oryza sativa
  ref <308>: DATABASE ACCESSION NUMBER: AK058794
  ref <309>: DATABASE ENTRY DATE: 2001-12-06
aaatggcaaaccatcataatgtgtctgatgatccagcctcagatggcaactgcgatgaccagggtaacatcgattccaaaatgattgatcttaatatgagacccgtccgtactcatggacaaggttcaaactcacagactcagggcgtggatgttagcgtcaacaatcatgattctccaggagtggtgccaacatgtaatttcgaacgagaagccaacaaataaataccgtaacaccaggatgtacatttcttcggttgctgctatatagcagtagctctccgggaggttggattagctttggtcttcagccaggcagaatatgtgttattacatggtcctcttgtgtcgctagtagtatgattctagtagagctgaagttgaacgagttcatgtcaactcggcatgccatatgccgtggacgctatttatcgtcgtgtactcgtgttgtggttgtaagactggtgtcacatgggccatacgggaagcacagtgggctgtcacttgtgcttttgtggattgctgctgtgcgctattagaaactgttcaaaagattaatagacccatcattttttttcggtgt

SEQ ID NO: 689 - DNA, 886 bp, Oryza sativa
  ref <308>: DATABASE ACCESSION NUMBER: AK058795
  ref <309>: DATABASE ENTRY DATE: 2001-12-06
gtgctcgagctcaccaccaatctctcctcgcccacctctcccatctcggccaccaccaccgatcgcccctcgcgtgcatgtcgcagccggagtagcatcgcatgcgtgcaatgccgtctcctcctcctcatggccccatgtcgctgatggccagccggtgctactgctgttcgtcgccgccttcgccgtcgccgaagcagcggagagacgccgagagcaagcagcagcagcagcagcacatccgcggagcgcggctggcggtgacgacgaggagggcgctgctggccgccgccatcgtcgtcgtgggctccggcacggcggggcgcgccagggcgacggaggaaggcggcggcggcgagggggagggggtggtcggggcgatcaaatcgatatttgacccgaacgagaggaccaagtcggggaaggtgttgcccaaggcgtacctgaaggcggcgagggaggtggtgcggacgctccgggagtcgctgggggaggacgacggcggcgacgtggccaagttccggcgaggcgccgacgccgccaaggagtccatccgggagttcctcggcggctggcgaggccagcaagccgtcgctgctgaggagtcatacgttgcgctggagaaggccatcagatcactggcggagttctactccaaggcagggccattcgcctcgctgcccaaagatgtcaaggacaagatcctcgccaacctcaacactgcagacgcctttctgtagagatttattttcttctgtcagaaaaaaaaagtactaactgccaacaatcaacgagtgataattgcattgtagccagccttcactttgcctgcgaaaagatcattggcaaagacagaaaagagcagatagaacatatgattacaagt

SEQ ID NO: 690 - DNA, 1024 bp, Oryza sativa
  ref <308>: DATABASE ACCESSION NUMBER: AK058796
  ref <309>: DATABASE ENTRY DATE: 2001-12-06
gaacttcctgattttccatcattcattccattcttgcctcccctgagtgcagctaatctcaaaatctactatgctacgtgtttcactttgattgctgggataatggttttcggtggatttcttgcaccaattctggaacttaaactcggtgtgggaggaacatcttatgcagacttcatccgcagtgtccatttgccgatgcaactgagtcaggtagatcctattgtggcatcgttctcaggtggagcagttggagttatctccgctctaatggttgttgagatcaacaatgtcaaacagcaggagcataagcggtgcaaatattgtttaggaactggatacctggcctgtgctcgctgttcaagtttaggaactctggtgcttactgaaccggtttcaacattcagcgatggtgatcagcctttatctacgccaagaacagagaggtgcccaaattgttcaggcgcaggaaaggtgatgtgtccaacatgtctctgcacggggatggcaatggcaagtgagcacgaccctcgaattgatccgtttgattaaaatgcacgtcatagttcagaaattcttgtaccactatataaactgtttgtagataatagtattgacaggcgcgcctggggttccaggcttacgaatagggcaacacttcacatcttagtgatgtgcggagcgaatcgcttgaattgaacagtggacaattcagaggtgtatgttgtcaaagctgtatcactgtatctgtatagtatgtttatggcacccaacactaacagttcaattccacgaattatttatctgcgttttgcttgctttaaaaaaaaaaaaaaaaaaggccattgttggcctactggcttgattctatgggtggtggtgcatggccgttcttagttggtggagcgatttgtctggttaattccgttaacgaacgagacctcagcctgctaactagctatgcggagccatccctccgcagctagcttcttagagggactatggccgtttaggccacggaagt

SEQ ID NO: 691 - DNA, 1484 bp, Oryza sativa
  ref <308>: DATABASE ACCESSION NUMBER: AK058797
  ref <309>: DATABASE ENTRY DATE: 2001-12-06
cactcatcgaaggttggggaaagtgtttatggaagtgtgtataagggacttcttcggcaaacaaatgtggctgtaaagaagttgaatcctgaaagcacagagtcactgtcacagttcagtcatgaggtggaaatccttagcagggtgcgacatccgaatcttgtaactcttataggggcatgcaaggatgcccgagctcttgtctataaatacatgcccaatggaagcttagatgaccgcttggcttgcaaggacaattcaaagcctcttagttggcagttgcgtacccgcatcgcttccaatatttgttctgcactgatttttctccattccaataaaccccacagcattgttcacagtgacttgaaagcatctaacattcttcttgatggaaataatgtggctaagcttagtggttttggtgtgtgccgaatgttaactgatgaattcaaggccacaaccactctataccgccatacccacccaaaaggaacttttgtgtacattgatcctgaatacgctatttctggtgatctgacacccctatctgatgtatattcttttggtatcatactcctgcgactcttgactggaagatcaggatttggtcttttgaaagatgtgcaacgggcagtagcaaagggttgcttgcaagcaatattggattcatcagctggagactggcctcttatgcatgctgagcagttgtctcgggtaggcctaagatgctgtgaaatcagaagaaaaaaccgtcctgacctgcaaacagaggtttggacagtacttgaaccaatgttgaggtctgcttcctctatgctatgttcattatcatttaaatcagtatctgaagactttggtaatgtgccatcctacttcatctgtccaatacaacaggatgtcatgagggaccctttaattgctgcagatggtttcacctacgaagcagaggctataagagagtggtttgatagtggtcactatacatcacccatgacaaaccccgatctaccacaccgtgatcttttgccgaaccatgccctccgttctgcaattcaagaatggcttcagtcaaatgcagattaatatgtttggattctcatcatggaaagtaacaatgaaaattatgtcatatatcttctgaagatacatctcagaccagggttaataagcagaaaccacaggaaaccaaacgtcttgtgtctttttttgttctgaaggaatgactaattaaaggtatacacacggttgttcttttcttttcttttttttagcaaaacctgtatgtaaaaaatataataaattcggagctatctctgctccatcagtagcatggtagacattgtacaggtagtcacttgtcactttgtcagtgtagtagagagttgtgatatctgagcaatagccaaaaaaatgctcagctagagtgtatggaagtggaaatacatgtatgaatagaactatcagatcagaatttcaccatttat

SEQ ID NO: 692 - DNA, 775 bp, Oryza sativa
  ref <308>: DATABASE ACCESSION NUMBER: AK058798
  ref <309>: DATABASE ENTRY DATE: 2001-12-06
gtcaaagacaacgcgtgcgatccaagcagaccgagtcgacgaagcagcgaagcaaagcagcagcagcagcgagcgagcgcgcgcggccgccgccggtgaggcgaagatgtcgtggcaggcgtacgtcgacgaccacctgatgtgcgagattgacggcaaccacctcaccgccgccgccatcgtcggccacgacggcagcgtctgggcgcagtcccccaacttcccgcagtacaagcctgaggagattactggcatcatgaaggactttgatgaacccggcagtctcgcaccaactggtcttttccttgggggcacaaaatacatggtgatccaaggtgaaccaggggttgtcatccgaggaaagaagggcactggaggcatatgtgtcaagaagactggcctgtcgttgattcttggaatctatgatgagccgatgaccccaggccagtgcaacatgattgtggagaggcttggcgattatctgatcgagcagggttgctaagtcctcaatatgctattttggtcatttgggactaagtttactccctatttggttcagtaatgtgagcttgcatctgcttgcgtatcacatgatatggagtgaataatttagctccggtttgttggttggtgaacgtgttgaaaaatatttacctgtggtttatgtttggcatcgtgtcgtatcaaactcagctgtccattcactgagttctgtacatttacctggtcatggtacctgtgggttctgctttatgaagatgattgcattttattg

SEQ ID NO: 693 - DNA, 661 bp, Oryza sativa
  ref <308>: DATABASE ACCESSION NUMBER: AK058799
  ref <309>: DATABASE ENTRY DATE: 2001-12-06
aacaataacatcctctaagcatcaatcagaagcaaaagatttcacaggcctgacaagatcaagatgtcgtcgtacggatcaggattcataactctgtgcctccccagcagggaacaacattctatggatcttatggaggaaataactcgcaatcaacagcttcatcgtaccacaatggatcatcgaaaagcaccacaggaagagtgcctgcgcagcaatattcagattacaagtccaagactgcagaccagttctcctactactataacagcataagcagcggccaaggccagcagctgggaggtgctggctactacgacaagcagccaagcaagggcacgactaagaggtatccgtcactcaagggctgatcttaactgatttggcagtgcttgatgcatgatcgatgaagaataatcaacagattgcatatactcatacaagcaccgtatatacaaatagtcatattgagagaggaagtctgtgtgttgttgtgaatctttctgtaaacacatgtttgagagcagcaacttacctagatatgtagggttgtttaatttcttcatgtggttcattagccattaaataagatgtattactgatcggttagtgatcagttgtatattgggaatatcaaaataatgaaccttattttgggttt

SEQ ID NO: 694 - DNA, 217 bp, Oryza sativa
  ref <308>: DATABASE ACCESSION NUMBER: AK058800
  ref <309>: DATABASE ENTRY DATE: 2001-12-06
ttgagtgctccgtcgacgtcgtgtcctacaacggcgctgcctacgccgtcatgctggtattgcatatctacaatattgttggtaagaaatatatacattgttaatactcttatttcatatactcgtagtaggagttatggcttcaatccatttcacctgtttagactggagagcattgtaatggactgattatagacaacatgtctcaagattattg

SEQ ID NO: 695 - DNA, 527 bp, Oryza sativa
  ref <308>: DATABASE ACCESSION NUMBER: AK058801
  ref <309>: DATABASE ENTRY DATE: 2001-12-06
cgtacgaatgttttggatttccccagatatttgtgagtttagccataatttattcaaattcggcaaaaatgggttaaattttcaaaaagttcgttggacatatcttaaatgtcggtgcctttcgaaagtgcaaaccctgatttggtgtgttatttttctcttctgaagcttgatgtaatatgctcgacgatcggtgcagaagcatgggtgaagaagctcaaatgggatgggctgaagaacttcctgagcctaccaaggcagcctttgaagtgtggctcttccaagggcaccaaggcgttcgtcagatcatacaagaacctgcatttctactggatacttggggctggacactttgtacctgctgatcagccctgcattgcactgagcatgatcagtagcataacccagtctccagccagttagatatctcccatcagtaacagatatactcaagaaaagatagaaaacagaaggcaaacagatatacctcactctcaattagcagagtgacattgtaccgtttcttc

SEQ ID NO: 696 - DNA, 901 bp, Oryza sativa
  ref <308>: DATABASE ACCESSION NUMBER: AK058802
  ref <309>: DATABASE ENTRY DATE: 2001-12-06
ttcctcctcatctcatcaacctctccaaatctctcgatctcccattcgagcgagatgaagctctccatccagtcattcgcccgcaagctctccctcccgtcgccgaagcggacgtggagcagcggcggcggaagcagtaagagggatggtggcatgtccaagaacgggagcggcgtgaagcggaccatctcccgcagcgaggcgtcgtcgttcgcgtcggcgtcgtcggagtcggagtcgtcctcggacgacgcgctgatggcgaggtcgacaccgaggtcggtgctccccgcggagatctcgcggcgggagctggaggccgtgctccggcggctcgggcacggggagcccgacgacgaggagctggacgccgtcgcggccatcgccgccgaggccgaggcgggcggcggggaggacgagctgatggaggcgttcaaggtgttcgacgccgacggcgacggccgcatcaccgccgaggagctccgcggcgtcatggtcgccatcctcggcggcgacggcgacggctgcagcctcgacgactgccgccgcatgatcggcggcgtcgacgccgacggcgacggcttcgtcgggttccaggacttcgcccgcatgatgatggccgccaccgccaccgccacggcgacggcggacggcccgagatcgtggtgatccattcctccgttcccgccaaaaagatcggacggccgtgatgcgctctgatgtggtgtgcttcaactttttttggcgcgcactagacgatggaaaaaaagccagcactactagatgcgctgctaattaagtactctactaatccaagatgaagagggaatattattattagcctaaacccaacctgtaaaatccattaagagagagtaatcccaaggcgaatgcttcgttc

SEQ ID NO: 697 - DNA, 599 bp, Oryza sativa
  ref <308>: DATABASE ACCESSION NUMBER: AK058803
  ref <309>: DATABASE ENTRY DATE: 2001-12-06
agcatggaggagttctgggggttctacctgacccagcactccaagcccggcacccggcggtggcacttcctcggcacgctcgccgcgctcgcctgcgcgctcctcgcggccgtctccggccgcgccgcgccactcctcgccgcgcccgtcctgggttacggtatggcgtggtacagccacttcttcgtggagggcaaccggccagccacgttcggccaccccgtctggtctttcctctgcgacctccgcatgttcgccctcatcctcaccggccgcatcgacgccgagctcgctcgcctccgcctccagccgcctcacgacgccgcggctgcctctgcacaccgggactgatccgccgaagtgctcgcgatagcaacatctggaagtgttgatgtgtactccaccctgtaatttgctaatccaatttggtactttttttttgttgcttttatcattttcctcgccgatctgttttggttgcggggaaagggtttggataagcagtgtatccaaaattagtgtggctaggcagtggctgcttaacaaaataatgaccagctactagaccataacataataatgctgtttttatttcctgt

SEQ ID NO: 698 - DNA, 1284 bp, Oryza sativa
  ref <308>: DATABASE ACCESSION NUMBER: AK058804
  ref <309>: DATABASE ENTRY DATE: 2001-12-06
aatatacaatgagcaagttcgcgatcttctgtcaaatgacattgcacaaaaaagacttggaatttggagtacttctcagcctaatggccttgtagttcctgatgcaagtttacaccctgtcaaatcaacatcagacgtactagacttgatggaaattggacagtcaaatagagcagttggatcaacagctctaaatgaaaggagcagtcgctcccacagcattctaactgtgcatgttagaggactggacgtgaagaatggttctacttctcgaggatgtctacatctgattgatctcgctggaagtgagagagttgaacgatctgaagcaacaggagacagattaaaagaggcacagcatattaacaaatctctctctgctcttggagatgtcattttttctttggcccagaagaatgcccatgtgccatatagaaacagcaagctaactcaagttcttcagagttctttaggtggacaagcaaagacactaatgtttgttcaaataaaccctgatattgaatcatattcagaaaccataagtactttaaaatttgctgaaagggtttctggagttgagttaggtgctgcgagagtaacagagaggggaaagacataaaagagctgctggaacaggttgcatctttgaaagatacaatagcacgaaaagatatggaaatcgaacagcttcagctccttaaatccaaatctcccaattcaatgacagacagaaatggcagtaacttgctgagacaatctacttcctctactggtttgtcatcacttcccgtggcaagccaacagaaccaacagctatcaggatccgttgaagctgaagctgaagataatgcatctgacgatggttgctcagtgggggaaactgagtattctcctgctggtgcttcagaaacatcagcagaacgagcgcataaagcgccatcaagaataaccagattctttctcacgaagaacgggcagccatcaacttctagaccaaaaccaagggaggttgttccgaaaactcaaggtggcatgagacctggaactgcgcaggcgacaggaggatccttagccaagccttccaaaagacggtagaaatagaatctgacgaagcatccatgcaagtttggcaactgtgatgtaactcaacttttgcgctgaaacacacggggggtagtttaggaggtgctactggtgttttctgtgtatctgtataagtttcgctggtcgactcaacaacgtatcttggttaaagattcatgatgagcagcgaacatttgtacc

SEQ ID NO: 699 - DNA, 551 bp, Oryza sativa
  ref <308>: DATABASE ACCESSION NUMBER: AK058805
  ref <309>: DATABASE ENTRY DATE: 2001-12-06
atggagagttcgatcctggctcaggatgaacgccggcggcatgcttaacacatgcaagtcgaacgggaagtggtgtttccagtggcgaacgggtgagtaacgcgtaagaacctgcccttgggccctgcctcacctacgcccgcggcggcgtgaggagcctcaaggccgcagccagcagcaccgctgacaggcgcaccgcgtgcaactgcctcaagaacgcggcccgcggcatcaaggggctcaacgccggcaacgccgccagcatcccctctaagtgcggcgtcagcgtcccctacaccatcagcgcttccatcgactgctccagggtgagctgagctatcgatcggatggatcatttatatgcatacagaagcgcgacggtgggtcgatgtgtggagccgatcgaattctgtatccaatattagtagtatctgtacgtattctggaataaaaagatgagctagctaaggtcgatcaatcaccatgcatgcatgtgtgtgcatccatggttgatcggcccgaccggtcaggctagctagctttcttcttct

SEQ ID NO: 700 - DNA, 1409 bp, Oryza sativa
  ref <308>: DATABASE ACCESSION NUMBER: AK104008
  ref <309>: DATABASE ENTRY DATE: 2002-08-28
catggaacaccaagaccaccatttgatgatcttatcaacaggcttgtttcactgagtgctattgataattctgctaaaagaccagcaattgtttctgttgatatcccttcggggtggcacgttgaagagggagatatcaatggaggagggtttaaacctgatatgctggtatcattgactgcaccaaagctctgtgcaaaaaaatttaccggtccacaccattttcttgggggtagatttgttcccccacctattgtgagcaaatataagcttcatcttcctccatatcccggtacctcaatgtgtgtgagaattggaaaagctccatctgttgacatttcatctctaagagaaaattacatctcccctgaacttctcgagaatcaggtgatgcctgatccatttgatcagttcgttagatggtttgatgaagctgttactgctggtctacgtgaaccaaatgctatggctttaacaactgccgataaggagggaaaaccttcgtcaagaatggttcttttaaagggtgttgataagcagggatttgtttggtatacaaattatggtagccagaaggcacatgatttatctgagaatccaaatgccgctctgcttttctactggaatgagatgaaccggcaggtaagagtagaaggttctgttcagaaggttccagaagaagaatctgagaagtatttccacagccgcccacgagggagtcaacttggtgcaatagtcagcaagcagagcactatcattcctggaagggaagttcttcagcaggcgtacaaggaattggaacaaaagtattctgatggcagcgtgatcccaaaacctgattactggggtgggtacagattaacaccaaaaccttttgagttctggcaaggccaacagtctcgactgcatgaccggcttcagtattcactgcgagaagtagataggagcacagtatggcacatcgagaggttgtccccttgactagtaaccccatcccagctctttggtaataaaaaggatctcatcttattatcaagaatcaaatcttatcccagctgcaaggagtcccaattgctcgatgatgttagtgccatgattaggtcgcgtgtttgagactgtgagtgcctgaagctctgctttttgacatgcccttcacacatctgatgttctctgaagcacagagtggatgaatccatgaaggcccttctcttggtcataagatttttctgtaaatgccattaaattttaaccgtcctgtagaaagaattatgatgagaatctcattatctcagcctggagaagactgttggacataggtcgacatcgtagtatatcgaagaaataatgttctgggaggaaataagtatttatcagcatcaagcatataagtcaataaagttgtgtgctgc

SEQ ID NO: 701 - DNA, 537 bp, Oryza sativa
  ref <308>: DATABASE ACCESSION NUMBER: AK058806
  ref <309>: DATABASE ENTRY DATE: 2001-12-06
tcttaaacctgctaagagaaaaggcaaatttatggcatcaaacaaaatgtgaaatggtgaagcccatttcgctcatagcgactctgaggctgtcctgtggatgcatctagacatcaacgtgcaggcgttaggcttgaagcaacattgggctaattctaccggagaagccaaataatatcatatctaacagttggtctggaaggttactcttcatggcaagtgccaattttttttccattttctgttatgatgcgtgaaactatcttgtagatgtagatatattgattatggaaggatgaagttgccaattgacctgaggcggtttccttctgcagccaggaaaaatctgaatatggagtttctgtttggtagtttcactatttaaaagcacatgtatcacttgtatggaggtaacaactttacttatgcaagcccgtgttttctgttgcttgtaagcaaaattggatgagtttttatcttgttttctatagcgtgctaatattgccaatggcaacaatttgcgaactgcaattctag

SEQ ID NO: 702 - DNA, 790 bp, Oryza sativa
  ref <308>: DATABASE ACCESSION NUMBER: AK058807
  ref <309>: DATABASE ENTRY DATE: 2001-12-06
gtgctatccatcgagtttgataattacttcttattgtttcattagcaattaagctatactagcttcagtgcagtttaatcgatcatggcggctaattcctccaacgacaccgtcaacgtggcctccgaggtgagcagcatcctctccaagctcaacgatcacctcgccggcgccgacgaggccaaggagccggcggggacaagcatcatcacgctggccggggagaacaacggcgccaccatggaggtggccggcgacgtggaggacctcgtcgtggtggaggccggcggcgacgaggacgacgacgaggaggaggagagcgtggtgagtgcctacaccaacagcaactaccaggctctgaacaactcggtgctcgtcgccggcagctgcgccgtcaaggaccccggcgtccacgtcgtcatcgtcgagcacgtcgacgagatccgcgactacgacgacgacgtccgggacgaataagcctgcaactcatctatcatctcatccatctgcaggtcatcaacaccatctatacatatgtatatctatcgatatatggattaaagtgatgatcaggtgatcgatcatgatcacctgcatcatcaatctacatcagaaattaatcgatatatacatcccatcgcatgatcaacagctcgatatatatgtatgttgtgcacgtggcttcggcttcctttgttaagtttcttaattaatttacaagatttggtagtcatatatatttgttctggttgttgtagttgtgatctatatttatacatgttgcttctat

SEQ ID NO: 703 - DNA, 251 bp, Oryza sativa
  ref <308>: DATABASE ACCESSION NUMBER: AK058808
  ref <309>: DATABASE ENTRY DATE: 2001-12-06
gtgatgctcaagaagaaggaaggtgtgccggagggtctttacatgtgatgtgctcactggtcgccagtgacggggtgggtaaccttgtaggacgaatatatatttgatttatcacataggctatgctgccttggtttgtaaaatacttgtgaaatttgttttgttacttcttgggatggagttggatagaacaaattgcgtttctcatgatttgccttctcaagtactgcactgaataatgaactgtggct

SEQ ID NO: 704 - DNA, 1343 bp, Oryza sativa
  ref <308>: DATABASE ACCESSION NUMBER: AK058809
  ref <309>: DATABASE ENTRY DATE: 2001-12-06
atctccattggccacccaccaccattgtcttctcctcccatattcttcacctcgctcgtcgtcgtcttcctcccccgccgccggccggtgcgggctggtgttcgttcacacttaccggccagccaccgcacgccattgctggcattggaaggtgatggcgctggaggcggtggtttactcccacggcggccatttcggcgggtacggcggcgggctgatgggcggcgccccggcggcgccgtgggatgtcttcgcagccgccggtggcggcgggagctgggacgatcccggcctgttcgcggcagaggcgtctcttgatgtgatccagggcgtggatgagtgggaggtggatcaggatcagcatgcttcttcttcttctaaggtggcggcgcggccgcctgtgaaggcggcggcggcggcggggaagagaaagaggcggcgggcgaaggcggcgaagaaccgggaggagatcgagagccagcggatgacccacattgccgtcgagcgaaaccgccgccgccagatgaacgagtacctcgccgtgctccgctccctcatgccaccttcctacgcccaaaggggtgaccaagcatccatagttgggggagcaatcaactacgtgagggaactagagcagctgctccaaacactggaggcgagaaggaccatcaaggaccacatcgacggcggcgccggcgagtctccctcccccttcgccggcttcttcgccttcccacagtactccaccgccacctccggccatggcggcggcggcgatgcacacagcaggatcgtcgtcaagcctgcagagacgacgactacggccgccggtggcggcgccggcgcggcgatcgccgacatcgaggcgagcatggtggagagccacgccagcgtcaaggtgcaggcgcggcggcggccgaggcagctgctcaagctcgtcgccgggctccaccagctagggctcaccaccttgcatctcaacgtcaccaccgtcgccgccatggccatgtactccttcagcctcaaggtggaggatggatgtaagcttgggtctgtggaggagattgcaactgcagtgcatgagattctggagaggatgcaggaggagcaggcttttgctgatgccaaaactagcttgtgaattgtactgcctgcagctgcctactttcccagatgtgctccagctggggattctcttgtatgtaatggcacttggcagtgcaggcatcaaatgtttattgcgaactagtattagctagctagaaaatataatatttgagatatggtggttttggcatatattaagaagcagggagaggtttaattaactatatgtttggatc

SEQ ID NO: 705 - DNA, 657 bp, Oryza sativa
  ref <308>: DATABASE ACCESSION NUMBER: AK058810
  ref <309>: DATABASE ENTRY DATE: 2001-12-06
agaccaaatcctcgagcgttctcagcaactccttcccaatcctcctcctcatcttcctcgcggcggcagcatccgttccccagatcgccatgtcggccgagcagccggagcaggcggcccccgcggcgcaggaggcgaccgtgcagatcgtctacctggaccgccccgcggacgccgaccccgaggagttccacatccgcaccctcgcccccgtcctcggcagcgaggagaaggcaaaggaggcggtgctctaccactacaagcacgccgcaagcggtttctctgcaaaacttactccccagcaggtcgaggagctcaagaagcaaccaggtgttcttcaggttgtaccaagccagacataccagctccatggacccggggctggcactggcacaatgaacacctttagtcttgtgtagtgtaccggcctagctgataaggtagtgtaatgcaagtgtttctggtgtgtgcatctcatggcatggttgtaatactatatggtagtaacaataagagatgcaacacctgtacatccccagtggatacaatgatcttttagcttgtatcctaagtttgtaatgagtattaaaaaaaaggctgtaatgcactaatgtataacaagatcatttgatactatatataactatgtgttgatct

SEQ ID NO: 706 - DNA, 236 bp, Oryza sativa
  ref <308>: DATABASE ACCESSION NUMBER: AK058811
  ref <309>: DATABASE ENTRY DATE: 2001-12-06
tatttattttgagcaagagagaaagaaaagcctcttcgttatagtggagaagaggttttgggctatgctgaggctgctaattagcacccgcttagacgttttccttctctggacttcgtccaataatgactggaccggtccaccatcatcaagtgtagtggtagtagtaaaggggagtactaagcttagtactacttgaagaaaaaatcaataataattgtattgattaaatttct

SEQ ID NO: 707 - DNA, 825 bp, Oryza sativa
  ref <308>: DATABASE ACCESSION NUMBER: AK058812
  ref <309>: DATABASE ENTRY DATE: 2001-12-06
acaaacacacaagctaagcaatctgaattagcaaagcatccagttctgacactaattttcaagaagcttcttgtggttgcaaaggttcagaaatggcggcagcaggagtgagcgggttggcggtggggtgcctcgtggccgccacggcggcgctgctcgtcgccggcgcgtccgcgcagacggggtgcacggcggcgctgatcaacctgtacccgtgcctcaactacatcagcggcaacgagacgtcgccgacgaggacctgctgctcgcagctcgccaccgtggtgcagtcccagccgcagtgcctgtgcgcggcgatcagcggcgactcgtcgtcgtcgatcggcggcgtcaccatcgacaagacccgcgccctcgagctccccaaggcctgcaacgtggtcaccccgccggcgagccggtgcaactctgccggcggaaacactccgggcgctgccacgacgacctcgccggcaacgcagacgccgggcgccaccggtgcaggaaccggcgttggatcgaagacgacgccgacggcgccgtacctgatcaacggcggcgcgtcgctccgcggcgccacgggcttggtgctcgcgctcgcggctgtcgcggtgtacgccgtgtgatgtgagcgtctgtctgctactctgaacttctgaagcgctggcgatgcagaacgtgcttgatgtgtattaatcacactgtttactactactcacattggtttagcatcattgagcattggcaagagagatttgagttttgtcattcacatttgtactattgattgctttgttgcagtcacaataaataacattactatcc

SEQ ID NO: 708 - DNA, 416 bp, Oryza sativa
  ref <308>: DATABASE ACCESSION NUMBER: AK058813
  ref <309>: DATABASE ENTRY DATE: 2001-12-06
agcagattccagctgggattcagggcagccggagcaataacaactaccatagagctgatggccagaacactggaaactttcttacggatcgcccttcgaccaaggtccatgctgcccctggtggtggatcttccctgggctacctctttggtggaaactgaaggagtgatcctggtgcactgtagcaccggatgaagaaggaagtctaccgctatccttgtttatcagaactgggaacccccattgttttatcattctctatgcatgtcccgtacctatgactccgtggcaaacaccctgcctgggatcatgatcctgtcgcttaaatttcgaggcaaatcgtatgcctgaatcttccaaaattatcgtgtgcctgtgccttggtttcagtcacgttcatgtctatgtttttgctc

SEQ ID NO: 709 - DNA, 261 bp, Oryza sativa
  ref <308>: DATABASE ACCESSION NUMBER: AK058814
  ref <309>: DATABASE ENTRY DATE: 2001-12-06
gtaaatcatgcattataattgtgtacaaatccctgtatactgtatagtaaaatccgctttcatgcgcattgaaataaggcaaaataaaatgccattccaaggcttatttcgcaagtataatttcgccctgatgtgtataacaaagttatgtttaccagtgttttagtggcgaataaactgtttaagttgttactgtagctaaaatacattgatagactattgttctgagtccacaatccgtcaatgtatattttttctctt

SEQ ID NO: 710 - DNA, 693 bp, Oryza sativa
  ref <308>: DATABASE ACCESSION NUMBER: AK058815
  ref <309>: DATABASE ENTRY DATE: 2001-12-06
accgcagaaaccctagagctcaccctagcgcgccgccgccgcagccatctccgccgccgctcgtcgggctctctccatctcccatccaggatgaagttcatttctgcctatctgatggcctatctggctggcaactccagccccactgcggaggatttgacaacgattctggagtcagttggttgtgaaatcgacaatgcaaagatggaactcctgttgtctcaagtgagtggcaaggacatcactgagctcatcgcttgtggcagggagaagtttgcttcagttccatctggtggtggtggtgtagctgttgctgctgctgctcctgctgccggtggtgctggtggtgctcctgcagctgaggcgaagaaagaagataaggtcgaagagaaggaagaaagtgatgatgacatgggcttcagtttgtttgactgagtgatgcggtcacctcttctatcatcaataccagactttgcgcaggaaactagagtgatgatgtttgggattttagcttttcttctttagttaagttgaaaacacttgaggaaagactatgcttcctactatgttttgatatgtagtaacgcagccataggttgctggttacttcactggtgaaccatgcttttgctatcaaaattcaatgcttaatggaggatgaattgtgctcggcagtagtttttagctgtgttc

SEQ ID NO: 711 - DNA, 398 bp, Oryza sativa
  ref <308>: DATABASE ACCESSION NUMBER: AK058816
  ref <309>: DATABASE ENTRY DATE: 2001-12-06
cagatgtgaaaaagaagggaattaaagttccatcctggatggattggtgatgttgtcgactcggtgaactatcattaaccttggcggagtatagtgcaccccttgatattgtaagttgcaacactacttatttagcagctgatcatgcattatctatgtttttttgtgatatagatatatgtcacaataggttcttggcgtaagttcatcatgtagttatcagttatgtggtctgctctgaatgcgactgtttgatgtcactacgccgccatggtactgtacatatgtcgccattcggtaacacgtgacctcaaagacttgagtgcttgtaaataagtttgtgttaatcttgttttgaagagttcaaggataatgatcgctcataactttaagtgtgg

SEQ ID NO: 712 - DNA, 1146 bp, Oryza sativa
  ref <308>: DATABASE ACCESSION NUMBER: AK058817
  ref <309>: DATABASE ENTRY DATE: 2001-12-06
tagcaaaatcaatccagaacacattgagatgtatgctgagagaactgcaaaaggtaatgtcctcgaaccagaaggattggttgagatcaaattcaggccaaaggaactggaagaatgcatgctaaggcttgacccggagttgatcaagctgagtacaaggctgagagaaatgaagaaggaaaatgctggcctctcggaaatggacaccactaggaggagtattattgctcggatgaagcaactgatgcctatatatacccaggttgctacacggtttgctgaattgcatgacacctctgctagaatggctgccaaaggtgtgatcggaaaggttgtcgattgggaagaatctcggtcctttttctataggaggttgcgaaggagagttactgaagatgcacttgccaaggaaatcagagaagctgctggcgagcagctgtcccagaaatctgcattggactatatcaagaaatggtacctttcttccaatggatctgatggaaacagtgaaaagtggaataacgatgaagctttctttgcttggaaagatgatccaacaaactatgagaatcaactcgaggagttgaaggctgaaagagtatccaagtggctctcgcgtctcgctgaaagccctgatgtgaaagctttgccaaatggtctttcaattgttcttaacaagatgaatccttcaaagagggagcaggttattgatggtctcaggcagcttctgggttgaccaatgtgaattttgatatccagcatgaaccaaacagaatcatactcaaacgctaacactgaagtttaattgggctatcattgatgcaatggaagaggttttttgcacataaaatgggaggttttgagatggcatctcaagaaccatatacatacaaggatatgattgggcctctgccctactggatgtttggtgtgagttcttgcaaagagcagaataaagagcaatgcaaagattagtcaggcacggaatgttgttccatttgtagtgatgtatttagatgttttttactagcattttttttcttggcctgcctcatgccaatgtcatatagatacgatggaattcttgatcaagtaattgtttatttattttccaatccaaataatacatagcaatcctcatcttct

SEQ ID NO: 713 - DNA, 1097 bp, Oryza sativa
  ref <308>: DATABASE ACCESSION NUMBER: AK104009
  ref <309>: DATABASE ENTRY DATE: 2002-08-28
gtacctgcttaattccttcgtcttcctctcctcttccttcttcttccaccatggctgcaaccgcttcgtcctcctccaccgccaccgcctcgccgctcctcctcccctcggcccgccgcccgctcccttcctccaaaccgtggcttcccgacggcagggcgttcaggggcagcagggcgctgagttcagcggcgcggcgatgcttctgctgctgctgcaggtgcgaggccgccggtgaggcgggaacggcgccgccgccgcagcagcgcggagtggatgacggcggcgtggtctgtaccagcgccacccggtcccggaggaggagcgttcttggagtcgccgtgggggtatcgtcggcgctggcgctcggcctggccgcgttcgatgatgccctcgccgccgggctgcctcccgaggagaagcccaagctctgcgacgccgcctgcgagaaggacctcgaaaatgtgcccatggtgactacagagtctggtcttcagtacagggatatcaaagtaggtgaaggcccaagtccacccattggcttccaggttgctgcaaattatgttgccatggtaccgaatggacagatatttgacagttctctggaaaaggggcagccctacatattccgtgttggttcaggacaggtgataaagggacttgatgaagggatattgtcaatgaaggttggaggactacggcgattatacatacctggcccgctagcatttccgaagggccttacttcagctcctggaaggccaagagtggctccaagcagcccagttatgttcgacgtcaacttattgtacataccaggtcttgatgatgagtgaaagcatgcataggaatatatatatatatacatcctcttctggttttccacatcttttacaagaaggatgatgaagcaaatgatttaccatacagtatatcgatctagagggaccattaattcttttcggctgtagattgtgggcaagtatgttatgtgttgagtacaaaattttattattagactgctttaagtagcatgtaaagacttttgtagctctcatttttcttaatgaaattgggggagctctgcttcctagttt

SEQ ID NO: 714 - DNA, 306 bp, Oryza sativa
  ref <308>: DATABASE ACCESSION NUMBER: AK058818
  ref <309>: DATABASE ENTRY DATE: 2001-12-06
acaggctgcttgaacctttctgttccatagcttttagagtgctagatgatgcgtggtttttagtgtgatcaaataagaacatggaaaaagatcttgtaatttaatctttgatctgaagaaattgagcttcgtttgccgatgcgcattactgttgcttgtcaaattatcttgtgttgttcatttggcctgatggttttgtttttcttcagggtatatgcaattatgcatctaatgtcatttcataggtactataattgtattggttgaaatggatacaacaccgacaattgcatcattattcatgag

SEQ ID NO: 715 - DNA, 1283 bp, Oryza sativa
  ref <308>: DATABASE ACCESSION NUMBER: AK058819
  ref <309>: DATABASE ENTRY DATE: 2001-12-06
ttgaaaggcgggctcatggatcagatcaaacgtgagatttctgtgatgaagttggtgaggcatccaaacattgtgcagttatatgaggtcatggctaccaagactaagatatattttgtgctggagcacgtcaaaggtggagagttgttcaacaaagttcagagaggaagactaaaggaagatgcagcaaggaagtacttccaacaactgatttgcgctgttgacttttgccacagcaggggtgtttatcaccgtgatttgaagccagaaaatcttcttcttgatgagaacagcaatctgaaggtttcagattttggcctaagtgctcttgctgattgcaaaagacaggatgggctgctccacacaacctgtggcacacctgcttatgttgctccagaagtgatcaacagaagaggctatgacggtgctaaggctgacatatggtcttgtggagtgatactctttgtgctattggccggctatctacctttccatgataagaacttgatggatatgtataagaagattgggaaagcagaattcaaatgtccaagttggtttaataccgatgttcgaaggctcttgctcaggatacttgatcctaacccaagtacaaggatctcaatggacaaaatcatggaaaatccttggtttaggaagggtctcgatgcaaagctgctcagatataatctacaaccaaaggatgcaattcctgttgatatgagcacagattttgactccttcaatagcgctccaacattggagaagaagccgtccaacttgaatgcttttgatataatttctttgtcaactggacttgacctctctggtatgtttgaggagtctgataagaaagagtccaaattcacatccaccagtacagcttcaacaatcatatctaagattgaggatattgccaagggcttgcggttgaagctcacaaagaaagatggtggactgttgaagatggaaggctccaagcctggaaggaaaggtgttatgggcattgatgcagagatattcgaggttaccccaaactttcatcttgtggagctaaagaaacacttgaataccgtaaggtcttgaaccaagagatgagaccagctttgaaggacatagtctgggcttggcagggtgagcaaccgaagcagcagcagcagccaacgtgctaaaaaactttgacaagggcaagttttttgcaatttgagtcgacttccaatcgtttatgtatttctgcagcttttgttcctcttgttattcattttcattcctcatgtattgtt

SEQ ID NO: 716 - DNA, 1174 bp, Oryza sativa
  ref <308>: DATABASE ACCESSION NUMBER: AK058820
  ref <309>: DATABASE ENTRY DATE: 2001-12-06
ttttggctgtaggtagttctttgtgtattcatatgatgccaattatatgggacactactataaatcaggcaccagattttctctcaaaaatcgggctgtcaaatgtttcagttgaccaccggtgaaacgctaagttgtacatagtgaaacaaaaaaaatgtctctgtaacatttacaaattttgtgaaacacctgtcgaaacatttaaccatcacgtatgaaacattgaatttcaacaattgaacataagtttttctttcatcagaatataatcatgtgatatctccttgtaaaggtttaattaccacgaatacaacggtatatgggttgtagattggagaaataatttaggtgagaaatcgttttaagctagctaaaaagtttgcatgcttgcatgcaagaaatatggagaagagagtaaactgcttgcatgtaggagaggagacaggctagtgcatgcacatgcagtggctggacagtttggacatgcagcagccgggcaacagcatgcccaatctttgtggctttgatcgggcgcctgagcagaagcattgttgaactatatgttagacttttatagctatgataatattttttgctgattaattatcttatccctcttagagcatatgaaacacactgatattttagtttgctttgaattttatgtggtattcagaattcagtagatattggctctgaaggtgcacttgatccctatatcatggaaaagctgagtgaagaaaacatcggtctgttcacaaggcgtgaagaacttcgacaacgagatacacagttgaggcaaacggttggggagctagagcaacaactagcggagacaaaaaagaagtgtgctcagcttgctgatgacctgcgtataaggaagagccagcagcagcagcagcccccttacatataaaggttaatttatcggtggaccacagaggtgctaacaaacgaccaaaggtgtgatgtgctgatcttgctagcaattttgccagtagaaaagtaggttagctcatagttaatccagcagtacagtcacgtcaaagaactgtagaagtaagttaaaatcgagtccaccaatgctacggtatctgatgtatagatgaagtgacttctgtgactcgtgctgatgtgcttcaactgtaattatcagactcaaatcccatgc

SEQ ID NO: 717 - DNA, 485 bp, Oryza sativa
  ref <308>: DATABASE ACCESSION NUMBER: AK058821
  ref <309>: DATABASE ENTRY DATE: 2001-12-06
aagcaaagcacatcgactcctatcggcggtcgcgcgagctccagcgccaaggggatccgttgcgtccggcgggggttaatttcttgcggttgtaggatccccgatggcggatacggcgaaggccgatgcggcggcggaggcggccaagatggacctgctcgaggacgacgacgagttcgaggagtttgagatcgaccaagaatgggatgacaaggaagaaggcaacgaggcagttcagcaatgggaggatgactgggatgacgatgatgtcaatgacgacttctctctgcagctcaggaaagagctggagagcatcccatcgaagaactagaacttgtggtcttgtattcagtactttcagataggaagtggtatctgctggatttggcatgtttactgttatatttaccaactcgagcattttgcttgttctgtggtatgcctttccgttatacattttattaccaaatacggttcataaaact

SEQ ID NO: 718 - DNA, 663 bp, Oryza sativa
  ref <308>: DATABASE ACCESSION NUMBER: AK058822
  ref <309>: DATABASE ENTRY DATE: 2001-12-06
atcctaccgccgctcgcgcccctctcgccctcgcgcgccgccgccgccgcccgccgtcgccggagctaaacccctcgacgccgccatggggcgcatgcacagccgcgggaagggtatctcgtcgtcggcgctgccgtacaagaggactcccccgagctggctcaagaccgccgcctccgatgtggaggagatgatcatgaaggccgcgaagaagggtcagatgccgtcgcagatcggcgtggtactccgtgaccagcacggaatccccctcgtcaagagcgtcaccggcagcaagatcctccgcatcctcaaggcccacgggcttgccccggagatcccggaggacctctacttcttgatcaagaaggctgttgctattaggaagcacttggagaggaacaggaaggacaaggactccaagttcaggcttattcttgttgagagcaggatccaccgcctcgcccgctactataagcgcacaaagaagctcccacccacctggaagtatgagtcaaccacggccagcactctggtggcctaagagaacactggcgtgctcttagatgcttcgatatggacctggttctagaaatcaatttatgtactgctttgagtttggagcgagttagacgtggacaagaaactgcaagtttttctatgttt

SEQ ID NO: 719 - DNA, 636 bp, Oryza sativa
  ref <308>: DATABASE ACCESSION NUMBER: AK058823
  ref <309>: DATABASE ENTRY DATE: 2001-12-06
attcgagacatatagtgatcaatcatgcatcttctggttgttggaagctagcaaaactgaaggttcttgttgctgttgctgttcatcattatcatagccaataagaaagcaagaatccaagaggagacaggatcggaggaggaggaagaaagcgagaaaccaatcgatcgatcgatcatgctgatcttggaggtgggcatctggttgctgccgttcacgctgctggtggcgccggtgaggaggatggtgaggctggtgcaggagctgcagcggatcatgctcgtcgtcgcctgcgaccggagccgccgcggcggccggccgccgacgttcggcgaggtcttgagccgcctcgaccgcctcgactccgccaccgtcatcgtctgaacgatgatcgattgatcagcatcctgtaagctgtaattaagttgcttcaattcctctgccatcttcttcttcagttcttcttgatgtaaatttctgaatccgaattaagtgcgttttagttcttcaagaaaggatgctctcttctgaatcttttgctctgtgatcttcagtttttggtacatgcaagcacttgcatgtatctgtaattatgtatgtacggtttttgtatatatggggctgaaattaagtttt

SEQ ID NO: 720 - DNA, 309 bp, Oryza sativa
  ref <308>: DATABASE ACCESSION NUMBER: AK058824
  ref <309>: DATABASE ENTRY DATE: 2001-12-06
atgcgtcgccagattgcttggtgacatagtgggtttcaccgatcacgatgatagaagtttgagcttatgtaccatagcaaaagtgtgatctgaacgtgcataagttgtggcagagctggtgtttcaaaactgcccgtgtagccgatagtttattgcgatttgtttgttttccaaatcaattttctctgtctagttgtgcttatgtaactcgtatcatccttatatatttgtgtaatgaaacaatcgctgtcatcttgttgagcttgtattcatcatattatgatggaataagaaaatggattctgaaat

SEQ ID NO: 721 - DNA, 263 bp, Oryza sativa
  ref <308>: DATABASE ACCESSION NUMBER: AK058825
  ref <309>: DATABASE ENTRY DATE: 2001-12-06
aaagagagtgaatgccacgaggcgctacaaaagctgtctgaagactgatttccctaagaacaatgaacattcattttgatgcatatttaggtcaagtactgttttgagtctcattttcttaatatgccagcttggtattagtgattgcttctatttaatttgtaatgtgctcatattcttgtactatttactggatcattattatttagttacaagaactttggctctgtgcatgctagatgcagaggccggggatgtaattc

SEQ ID NO: 722 - DNA, 896 bp, Oryza sativa
  ref <308>: DATABASE ACCESSION NUMBER: AK058826
  ref <309>: DATABASE ENTRY DATE: 2001-12-06
attacaaatgggccttggatgagctattcatcaaacacaactttgcgcgagtaataattctggaagatgatatggagatcgcccctgatttttttgactacttcgaggctgcagctaaattacttgataacgataagacaatcatggccgtttcttcctggaatgacaatggacaaaagcaatttgtttacgacccaaaagctctttaccggtcggatttctttcctggacttggatggatgttaacaaagcctacatggattgagctgtcacctaagtggcccaaagcttattgggatgactgggtgaggctaaaagaggtacacagagaccggcaatttattcgcccggaagtctgcagaacatacaattttggcgaacatgggtcaagcatggggcaattcttcagacagtacttggaaccaatcaagctaaatgatgcccatatcaagtggaattctgaggacctgagctacctcaaggaggacaagttcctgatccaatttgggaaagacgtcgctagtgccacccctctccatggatctgatgccgcgttgaaagcccacaatatggatgcggatgtaaggatccagtataacgatcaggaagactttgagcggatagctcgtcaatttggaatatttgaagaatggaaggatggcattccaagaacagcttataaaggagtagtagtcttccggtacaagagtagtcgaagacgaatatacctcgttggtccggattccctcagtcagcttagggtatagtgttgttgaggtgtggagatagtttctcattgtttcagatacaagcggcagcacctcacctgaccactgagcagagctgacctgcctgacattttgctgtatgtgtgattcatcacgtgagattcatac

SEQ ID NO: 723 - DNA, 1346 bp, Oryza sativa
  ref <308>: DATABASE ACCESSION NUMBER: AK058827
  ref <309>: DATABASE ENTRY DATE: 2001-12-06
aagatttggctcggttgaaacagcatttgctagataaggaccttgaggatcaagaaaagatggatgaagatagcaaactcattgaagaactgcgggcaatctgtgaccagcaaagggctcatatagtgcagttagaaagggctttgaagtttgagatggcgaagcaggaggagagcaagaaaatcattagtgaagaacaccagaggtcaaatgaacaaataacagatttgaaatacaagcttgcaaactgtatgaatgcccttgaatcaaaaaacctggaattgctaaatctgcagactgcccttggacagtactatgctgagagtgaagccaaggaacggcttggaggtgatttagctatggccagggaagaattggctaaattgtcagagtcattgaaggtggcaaatcaagcaattgaaatttcaagaagagaaaaggaagaggtagctgccaggctttcacaagtggaggggatgttggcagatgggaagcgctccatgcagaagcttgaaaatgacaattccagattacgacgagcgctggaacaaagcatgacaacgctcaataggatgtcactcgattcagataattctgttgacaggcgcattgtgattaaactactggtcacttacttccagcggaatcacagcaaggaggttttggatcttatggttcgcatgcttggtttctctgaggaagacaagcaaaggattggttttgcacaaagtaatgctggcaagggtgttgtccggggtgttttgggtcttccaggacgcttagttggaggcattgttggcggaaattcagcaggcaaacctactcaagcatctcaggacaaccagtcatttgcggatctatgggtggacttcctgctcaaagagacggaagaaagggaaaaacgagaagcatccgaaactgcaaggctgtcgcaggaagagaaccagactgccagcaccagcaacgcatcaagcgcgcaaccatcagggcatatctccaaccaagcacctggcccttccacaagccatcacatgttcggtcgtcaagacaccgaatttgcaacggttccactcacatcctcaacatatacctccacacagactccattctcaagaccaccccaaagatgattgtgatcaactgtacagtatcagatgcctttttcttcaaagcgtgcatcatgatgtaagctattcgtttcatttgttgacaatgttatgatatagccaaattcaaagttaccccctcattttttgttccccttcatcttcccgggatgtaaagatgtcatatgtaaatggactcctatcgttctacagaaaatggagataacatattgccagagc

SEQ ID NO: 724 - DNA, 1534 bp, Oryza sativa
  ref <308>: DATABASE ACCESSION NUMBER: AK058828
  ref <309>: DATABASE ENTRY DATE: 2001-12-06
cgaactgtgaaactgcgaatggctcattaaatcagttatagtttgtttgatggtacgtgctactcggataaccgtagtaattctagagctaatacgtgcaacaaaccccgacttccgggaggggcgcatttattagataaaaggctgacgcgggctccgcccactgatccgatgattcatgataactcgacggatcgcacggccctcgtgccggcgacgcatcattcaaatttctgccctatcaactttcgatggtaggataggggcctaccatggtggtgacgggtgacggagaattagggttcgattccggagagggagcctgagaaacggctaccacatccaaggaaggcagcaggcgcgcaaattacccaatcctgacacggggaggtagtgacaataaataacaataccgggcgctttagtgtctggtaattggaatgagtacaatctaaatcccttaacgaggatccattccatgtcgtcgtcgtcgtcgcgcggtcccggccagctgtccaccgcgccgtcacagatccagccatccctcataccggactcccccatcccgacggccccatcccagcggcgaggaggcgccgtcgcgcgggagatgactggtggggagagtgaagagggagaggcggatggcaaccatccctctgtcacgctcgctctccaatcccccttcacagtcgagccctgcgtcgtcgccttcccccgccgatgccaccacatcaaggcacctcacgcatggagctctttccccgaagccggatgcaatggccggtccctcgctaaggcgcccagcagatccggccagttgcctcagcaacagagagtccacggacctctccgctgctctgtaagaggatctggactcttctgccaacgaggccactgtctgatccaccatcgtaggggattctttccgttccctaaatgcaccacatatcttcccctccggaaattatctttttcaaatgaaattgatagaataccaatggctgttgtaacaagacgtgaggactgacaagccatctcttgatatgtttcttgctgagatgaggaggttcgaggtattgccatcagttaaaaattgctggaatgtgacttcgctcctcctcgctcctgtgtactgccgccacgccgccgcatcctcgccggagccactttcttctccatccaccgccggagccgaggaacgaaatgatggccgactaccttcttgatcactgcgatgtgccccttcgcttcaaggatatgcataaatccaaggttgacattgtggccaactggagattttggtaaaatcctatcatgtttcaccatggcatttcactgtttggcgcacggtatttaggagctatttgtatagtaaatgctggagtattgaagtaaattatatgttcagcttattaactgcattgcgataagctttgatctagatccggtttcaattttcatttgtgtggtcgcatcctttaatttatatagcttcataagagtatactccgaagtacatgccgttttatgt

SEQ ID NO: 725 - DNA, 747 bp, Oryza sativa
  ref <308>: DATABASE ACCESSION NUMBER: AK058829
  ref <309>: DATABASE ENTRY DATE: 2001-12-06
ctcctctattgcagccgccgccgctcccagctcgcgctcccctcgccgccgcagccgccgccgcctcgcctcctcggagatcttcgctgcccttccgtcaacatggggaagacacgtggtatgggagctgggcgcaagctcaagacccaccgcaggaaccagagatgggcagacaaggcctacaagaggagccacttgggtaatgagtggaagaaaccctttgctgggtcatctcatgccaagggcatcgttctggagaagattggtattgaggccaagcagcccaactctgccatccgtaagtgtgctcgtgtgcagcttgtgaagaatgggaagaagattgctgcctttgtgcccaatgacggttgcctgaacttcattgaggaaaatgacgaggtgttgattgctggatttggtcgtaagggccatgctgtgggagatattcctggtgtccggttcaaggtcgtcaaggtctctggtgtgtctctgcttgctctcttcaaggagaagaaggagaagccgaggtcttagattactggtacatcttggttggcaagcatggaatagacagaatgaaaggctttagatgctcaagaatgaaggctttagatgctcaagaagatggttccttgctatgtttaaagtgcgctctttatattgttaacttaagattgtgttggtaaaaaccatgccttgtcagatttttgcttctgttaaggggaaagtactgtgctgagctattttctc

SEQ ID NO: 726 - DNA, 355 bp, Oryza sativa
  ref <308>: DATABASE ACCESSION NUMBER: AK058830
  ref <309>: DATABASE ENTRY DATE: 2001-12-06
gtgctgaagctgcaatgccaaagctgcaagcattactcccagcaccccatcaagaggtgcaagcatttcgagattggtggagacaagaagggcaagggaacatctcttttctaaactacctactggatactgaagttgtgggtctattgtgcttcatacttcaatgttattaggaacttaatttaagcagaccatatcatgtattcaagtatcatcgtctgacatttactctagcaaggattggctttctgctgaatcaagttttcttgcttaatgctcgtcgaatccaatgtgatgcatgtctttagatggcactgcaattgtgacttttgtcttatggcagttttatctccct

SEQ ID NO: 727 - DNA, 1151 bp, Oryza sativa
  ref <308>: DATABASE ACCESSION NUMBER: AK058831
  ref <309>: DATABASE ENTRY DATE: 2001-12-06
gattgctaaacctgatcagttgggtatacgcatccctgaaagaccaatggtgcggccatatcatgtacatagcaaggatccatgctctttcgatgctggttccattgttgatgcatggtggaatagtgggtggtgggaggggattgtattgcagcagggaaatgacagacgccttcaagtttattttcctggagaaaagcagattgctgatttttgtgaagatgatttgaggcattcacgtgagtgggctggtggcaaatggaattccttgggggaaagaaaagatatcacacacctgttgccccccacttcagttcatgaagagggaggtttgcttagcaaacctgtttcacaagaaggcaatccctcttcaaaattagaatctgacaagaggtgtgatgacaaatcattgggcaccaagatttcacatgatcagaagcatcagaagcgtgttctggctgatctcacaaatgctctgaaattcgataacctgaaatggaggccaagaaagcggagcagaagatctggttccaaaaggcagtcagacactagcagtggcagtggcagcagcagccagggcgacatggaggagtccagcccctgtggaagttttgcagtgcttaattcagcgcccgatgaagaagtatgcaagagcagtggagaacctcttttcatgagggtttccaacctggtgatgtccagatgaagtcactccacgactgacatgttttagccttttctttccggatttcaacagccttggcgagatgtgagtttgatgcatccccaggttatttagtcacaactcacaactggtatcctgatcatcttgagagctctgaatgcttattcgctcggatgtccaggatgcaagcatggaggagcacactgttgtatttatgactgatctagatgagttttaccattttgtctcactttagggtcttgtagggtgttttaaccgtcttgttgtttagttggtgttacaaagatagctggctcattccacctcggcagtttccagagtcccttttttgtctttgtttcagcagtccaatatccaatttaatttgttcatcagctgttatagatgttcttatagtatactctctgaaatgataatatttacatcgtcatacgagttttttgtt

SEQ ID NO: 728 - DNA, 467 bp, Oryza sativa
  ref <308>: DATABASE ACCESSION NUMBER: AK058832
  ref <309>: DATABASE ENTRY DATE: 2001-12-06
atcaacaacttcccatggcgagcggctaggtgctcggtcgttgttgtcgatgaaggtgaaggccgtgctggtgggacgaggaccacgccggagggagagggaggagaggggctgcgtacgccgccgtcgggagggaggccgccgcgcgccagatcccgcgcgagggagggtggtcggccgccggatcggtgtgggggttggccgtcgcctgctggatcccgcgtctcgaccgccggagggggccgccgtgcgcgggggagcaaggaggaggccaccgcgcgccgtcgcccacacctgccggtgccctctcctgccgtcgccgtcgcatatgcccgccactgctagtatggccggaatagaagaataaagaggtggattttgttggggatttttagtgatgttgaatcatatttgtatttttttattgcattttattgtattaaggtgttatattttcattttgactc

SEQ ID NO: 729 - DNA, 522 bp, Oryza sativa
  ref <308>: DATABASE ACCESSION NUMBER: AK058833
  ref <309>: DATABASE ENTRY DATE: 2001-12-06
gtccattgatcttcctcccccctccaactccaagaaatcgactgacgccaacgagaacgagacgccatcgctgccatgggtttgcaggaggagtttgaggagttcgccgagaaggccaagaccttgcctgacacaatttccaacgaggacaagctgcttctctatggcctctacaagcaggcaaccgttggcccggttaccactgggcgcccaggtattttcaacctgaaagacagatacaaatgggatgcttggaaggccgttgaagggaaatccaaggaggaagctatggccgattacatcaccaaggtgaagcagctgctggaggaggcttctgcatccacttcttaggctattatgaacaacaccatcaatagtgctgcatatatgtaccaataaacataaatactataccatcatcaggcgctttgtgatcatcccttctctgtacttgtaatagtttcaagcagactcggtcctgttaattgatcatgactgttattaagtttgtccgtcttttct

SEQ ID NO: 730 - DNA, 434 bp, Oryza sativa
  ref <308>: DATABASE ACCESSION NUMBER: AK058834
  ref <309>: DATABASE ENTRY DATE: 2001-12-06
aatgatagaggcaaccttaggcaaagtcagcccaccaccaaatcgacacgcagatcccggatcctcgccggccaccgtccccctcactccttcaccgccgccgtccgccgccgacgccgaccaccgtgcgccgcgatcttcaccgccgcccgccgccggcttccccccaccgccttccttcctgctacttcatccccatcgcccggcgccacctccactcccgccgcatgcttcaccgccgctcgtctccccgccagcccttcacctccgccgacaccgatatgcgcttgtgtgttgatgtcgggcgccagattctgggcgttaccactgactgcggttaattttgttggctacattggtaatctattcatgacacggggaattttgttattactggatttggggctttgtggatgtggatgaacagttcaggg

SEQ ID NO: 731 - DNA, 813 bp, Oryza sativa
  ref <308>: DATABASE ACCESSION NUMBER: AK058835
  ref <309>: DATABASE ENTRY DATE: 2001-12-06
atgcaacgcattcagcgggatgcacctcaaaggagatgcatatcttgatcctactgagtccatgacttgtccggggaatagattgatcattgctaggaggaggagaacaccggaagaggaggaatatttgagaggttttaacccaagggctccaaattttcttcctcttgaactggacccagaatcagaaaaggtggacctcaagcatcagatgatggatgagcgcaagaatgctgaagaatggatgattgactatgcacttcggcgagctgtgaataatttaggccctgctcgaaagaagaaggtggagcttcttgtccaggcttttgagaccgtcctaccgcacgacgaggaagagaagaaaggcatcacaccaacaaggcctgtccaagcttgcaattgataattgtagagttagtggtcgaactaatcaagatcttgactcgcgagctactaactcagtggtcgctgcagtattatcgccggagacctgcttgaagttgaatgagagaactacttactagtttactggaaatctctagtttgggttgtttttactgaggatctctagttgagtttcttaggagctcaaaactgctccacagggaaagataaccactcactgaatcaaacagattcttatctagttgctgagctgcaaggtaacagctcaccagctaagtactgtaacgtgtgtataaatgtctcttgtgctagtgtctgatatttactgatgagtgatgactgagactagcaaaatgtttagggtggttgatgccttagacagagatgaatagaattcttctggagtgc

SEQ ID NO: 732 - DNA, 957 bp, Oryza sativa
  ref <308>: DATABASE ACCESSION NUMBER: AK104010
  ref <309>: DATABASE ENTRY DATE: 2002-08-28
attccatttcccttctcccccagccagaggcagaggctcccgcgacctcgtcggcgacggcgaccgcgaccgcgcgacgacgaggaagcgaaggacgaggaagcgagcgcgccaccatcttcatagctcgctctcctcctcacctcaggtggtgaaccgaggagacctgcgtggggtgggggatggaggaggaggaggcgggtgtgagggagcgccgcggcgtgctcaaggtggtggtggccagcgggaccaacctcgccgtccgggacttcacctccagcgacccctacgtcgtcgtccgcctcgccgccatgaataagaagacaaaagtcatcaacagctgcctaaacccagtttggaacgaagagatgtccttctccatcgaagaaccagcaggggtcatcaaattcgaggtgttcgactgggaccggttcaagtacgacgataaaatggggcacgcgtttcttgagctgcagccggtggccgcggcggcgaagctgcggcgtgcgctgcggctgacgacgggggagaccaagctccggaaggttgccgccagcgtcgacaactgcctcatgtgcgacagcttcgtgacgtacgccgacggtgagatcgtgctcgacgccaggctgcggctgcgcgacgtcgagtccggcgagctgttcgtcactgtcaagtggatcgatgcgaacgccaagtgagaaaatgggactccgtgtgaatgctgtctgatctaaatctgaaatttccagacagttctaacaggcatagtattagcgtgtgcgtgcatgttcagaatgtttttgtgcttttcttttttaatgaacgatcgggaaagtaggaaactctaattattgtttggaaataggaacgcaatgtgttctccccactctttttagcccattctagagataagtaccctttttctccaattcatatgtgtacaagtattacattgtt

SEQ ID NO: 733 - DNA, 1102 bp, Oryza sativa
  ref <308>: DATABASE ACCESSION NUMBER: AK058836
  ref <309>: DATABASE ENTRY DATE: 2001-12-06
agctctcagatcgccgcctccaccaccgttcgtccgattcctcgccaccacacccacccacccaccaatggcgtcctcccgcctcctcctcctcgccacgctgctcgccacggcggcggtgctggcggcgtcgcagaagccgaaggccgccacgccgacgaaggccacgccggcgtcgcccggccccgcggcggcggcggccgacggccccgcgccgacgaacgtgacggcagtgctggagaagtccggcaagtacaccaccttcctccggctcctccacgagagccgggtggacacccagatcaacagccagctgatggacagctacaacgggctgaccatgttcgcgcccacggacgccgcgttcgcggcgctcaagccgggcacgctcaactcgctgtcgtcgcaggaccagatccagctgatgctctactgcgtgctcccgcggttctacagcctcgccatgctcaccaccctcggcggccccgtgaacacgcaggcgtccggcgccgacggcccgtacaagtacaagatcaagccgtcgaacagcaacgtcaacatctccaccggcgtcaactgggcgctgctctccaccgtcgtcagcaaggacttccccctcgccgtctactccgtcgacaaggtgccgctcccctacgagctgttcggccccaagccgcccacgcccgcgccggcgccggcgcccgcgccgtccaagtccaagaccaagaagcacaagaagtccgccgggatcgccgagccgcccgtcgccgacgacgcctccgccgacgacaccaccaagaaggccgccgcgcccgccaccgccgtctccaggtgggtcgtcgccgccgccggtgtcttggccggcgccattctcgccgccctctaagctaaggagacgacgacgacgacgaacaaatgcgtcgcccatgcatgccgtatgcacgatgactgaactggagtggtgaaccgaatccgaatccgaattgatcgagatcgattgaaccgtgtaccgatattgttgtgctgctctgtatgtccgtcggctttattctttctcttattttttttggggttataaaatttcttgttgatttgtatttgt

SEQ ID NO: 734 - DNA, 726 bp, Oryza sativa
  ref <308>: DATABASE ACCESSION NUMBER: AK058837
  ref <309>: DATABASE ENTRY DATE: 2001-12-06
agaccctctcctgctgcgtgcgtccccaaatcaggagtcctcccaaccctcgccaccggcgccgtccgccccatctccgacgccgcctccccccgaagcgaagcagagatggatacatcaggacctgcagcattcgtcaatggagagattctgaagatgttcgtcggccgaagagtgcgcacggtggtccaagcccagcgcgaggaaggcgggttgcttatcgggcagtccaccgatggtcatcagctaaccatcaaaggggcctccggtgcccctatgtcgcactatgtggagattattgggatcgctgaacccaatcaggccatccgggctgaagtttgcacagattttggtgaaaacttcgatcctgcaccattcaatggactgtgcaagcttgcgaatggccagatgaaggatttgttcctgtagaggtcggcatcacatacaagacattctgccaacaaagcatgtctcatgttcatgatttctctagctttaagatccgtccaactgtttttgtcagtcatctcagtataatcaagctacttagggtcagtattggtgcttattaagacatattaaccttaagctatgtgaggacaagcgtgtgcttttgttgctgaagagcttgtggtgtttgctccttctaagcaaagcaaaccaaagcgttgtgctgcattgttactgtcgcttgcatttggatccttgaaagctgtgtttcttgtt

SEQ ID NO: 735 - DNA, 290 bp, Oryza sativa
  ref <308>: DATABASE ACCESSION NUMBER: AK058838
  ref <309>: DATABASE ENTRY DATE: 2001-12-06
cagtgtaaagcgaattggggcgtgtgatgaacaggttggcagattttgttggcaaccacaggagtcagaaatttttttgttgtttcatacggaagaagggaaaaaaaaaggaagatcgcaagatctagagcaatgtggctaacatataggtgcttgagatggtgatctcaaatttttgtcttttgagcttttggttaggagggtttagagagagatagagctagtcttgagaggagttgtatatactatctgctcattataataattaatcaaaggctgcagctccttgt

SEQ ID NO: 736 - DNA, 603 bp, Oryza sativa
  ref <308>: DATABASE ACCESSION NUMBER: AK058839
  ref <309>: DATABASE ENTRY DATE: 2001-12-06
atcgaacgtatcagatcgagagcacgctacgcctacgcgggagggttcctcctcctccgccccccatccatccaaatccaatcgccgtcgtcgatcccctcagccctgctgccgccgccccctttcagcgcaaatcgtcgatttcccccgcctccatctcccgccgctcgccgccgggaccccgcaccgcaaatcgtcgtcctgcctgcatcttcgattccctccgccgcccgtggttccgctccttagctgcccatcttcacatctccctcaagctacaaaaaaatactcaggtttcagatcatttttcgaggttggaattgctgcaggatcaggcgaagcctcgtcaggccatgccctcgtctcattcctcagcttgcagagtccagttccaagcagttgaatactaccgtgcatttggtggaagaacataatcctacctcttggtgtctgcctcctaataaaggactccagtatcagttggggcttgtgaattatgatactttatgaaccatattgtgaaacaggaggaggctgtcaatatattggtagctctaatagtggcgtactttgagtagaattgagggagacaagagagaacat

SEQ ID NO: 737 - DNA, 652 bp, Oryza sativa
  ref <308>: DATABASE ACCESSION NUMBER: AK058840
  ref <309>: DATABASE ENTRY DATE: 2001-12-06
attgctgcaaagcttggtgccgagtgagagagcagcaaagcgagagtgtgcgtgcgtgggcgtgtcgcgccatgatgaagaggctggtggtcctgaggaggcgggagccggcggtgaggttcagctgctgcggcgtcaggtacggcgagtgccgccgcaaccacgcggccagcaccggcggccacgccgtcgacggctgccgcgagttcatcgccgccgaggacggcggcggcggcaacagcacaagcgccgtgggcgtcgccgcggcggcgctcaagtgcgccgcctgcggctgccaccgcagcttccaccgcagggtgcaggtgtacgaggtggcctgggacgacgactgcgcctccggcgacacctcctcctcctcgccgtcgtcgtcgtcctcgttgagcagcgagtagaccagctgcggcaatggcggcggcgcgccgccgccgcagctgccgtctccggccggtgcatcgtcatgctgcatgcctaggatatgatcagacctcgcgattgttaattaattaattaattaattaattattagcttgtgtaatctgtatacccatggattgattgaccctattccccccaagtgattatttgctctcatctctaattaatcaattaattaatgccttattttaacttt

SEQ ID NO: 738 - DNA, 417 bp, Oryza sativa
  ref <308>: DATABASE ACCESSION NUMBER: AK058841
  ref <309>: DATABASE ENTRY DATE: 2001-12-06
actgcaggaagccaggaaccaaccagaagaaatggcttcatcatcatttggagtaggaggtggcctgaaactgatgagagctcgtggtttgctcgtgttttcagagatgatggcgctgctgctgatctgcctggtgatgatgagcagctccgttaacacctgccaaggccgatctttgcttgcggtgtccgttggtgagaagaaggtgccgcattttgagcaacctgtcggctgcttcgagcctccatgccgctagcttataagctatggctgcctgcttcagacaggcttaattacctggctgcaagtattaatatgtatagtcatgaataagcatatgacttgttcggtgtatatgctagttgcttgctgtactgatattgtctcaaaataaatttaattaaggacttgggcact

SEQ ID NO: 739 - DNA, 851 bp, Oryza sativa
  ref <308>: DATABASE ACCESSION NUMBER: AK058842
  ref <309>: DATABASE ENTRY DATE: 2001-12-06
agccacagaaaatcccattgccagtagccacggcaagcacactgcagcagtgcagccgccatggctcgcccgtcgcagctctacctcctctcctacaactccgtccaggccctcggatggttcgtcgccttgctccgcctgctgccctgcctcgcccctccctcctccgtccactcgtcatacgccgtcgccggcgacctcgtatgcttgctgcagacgtgggcgattcttgaaacgatccatgccgccatcggattggtgcacacgtcgccgcttcttgccttcttgcagtggggagggaggactcacttcgttctcgctgtggttcggcaaatccccgaggttcagagtagcccttccgtgttcataacgttcatggcttggagcatatctgaggtcatcagatactcacattatgctctgacaaccttaaaagtttgtccaccatggctaacatatctcaggtacactgcctttataccgctgtatccaattggagtaggcccaggagaaatgtggactatgtaccaagctctcccatttgtgaaggagaggaaactctactctggcttctttgggaagttctccatgagctaccattccttcctagtggctgtgctggcagtctacccgtttctgtggatgaagctgtacctgcatgtgttcaagcagcgcaggtcgaagctggggaaatcgggaggcgccacgaaacgagcctgaagaaaccagctccgtctcgatgctcatacatagtagtacatgatccctttttgaaatttctctttgtttatttatttacgagaaagcatgtactcatgattctgattataatggctaaaacattaagcgcg

SEQ ID NO: 740 - DNA, 329 bp, Oryza sativa
  ref <308>: DATABASE ACCESSION NUMBER: AK058843
  ref <309>: DATABASE ENTRY DATE: 2001-12-06
attgaatcaattaataataaattaagaataaacttgggagcatgtgtagattggctctcaaagaataataataatatgtgatctgattgatgattgctcgagagaggagcatgattaagctccgtgtgatcgagcatgaagttgtgtgtgtagcattgcaatttgtaactgtgtccagttgttttggacaccgttcaattggatattaattgtggccaccttgtaaattagtagtagttgaaaacattgtattagagctgtaagtttcgttgtaccatgtttgtacatggggtttgtaatgttagctattcaaaaatccatgtttatgt

SEQ ID NO: 741 - DNA, 1005 bp, Oryza sativa
  ref <308>: DATABASE ACCESSION NUMBER: AK058844
  ref <309>: DATABASE ENTRY DATE: 2001-12-06
agttcgggaatgtacccgcagcttctagaaccctccattctccccacgtataaggccgcgccccgcgatccaagcagcagcagccatagcccccgccagctcgccgccgccgccatgttcggcgtcgtcttcccggaccacagcttcccgctcgacgtcaccgccttcgcgcaggtggcgcccaactcctgggcgctcgacctctccacgctctccctcgccgccgccccgcgctccgccgtcgtcttcctgctcccggccgccgccgccgcgctcccgccggggaaggccgtcgccgtctacttccagcccgccgccaaccgccccttcgcgtccctcggcgcgctcggcccgggccgcccctccgcgagcctcccgctcccggaggccggcgacgaaccggagccccccctcggccccgccaagctcggcgtcgccgtggaggacgcggcggcgctccctccgccccccgacgggcagcgcgccgagcgtgtcgcgccccgcgtcggcgagaacctgttcaacttcatgcagtcgttctgcggcgccgacggcggcaagctggtggtgcccacggacatcctcgaccggtggttccacaagttccaggagcgggccaagaaggatccctcgtatctcaagacattcgacttttgagagcgaaggttattttgcagttcattgcaaactgcatgtcggcagaaagggttggttagtagagttttgtatttgtagaccatctatcagttctgtatttctagacagaaattaacttgtcattcagggactggattcaatcatggttgccagttttttttttctttttttttctgtacttctagtactcctagagaagtggtaccaaaagccagaaccacaagaaggtacttgcgtcaaaagatgaaatcgtgttgccaaactgtacagtaatacaattgaactttgctactgcgtgtcaactttatcttggagttgccgtttcatgctaagaaaggggtaattctc

SEQ ID NO: 742 - DNA, 1056 bp, Oryza sativa
  ref <308>: DATABASE ACCESSION NUMBER: AK058845
  ref <309>: DATABASE ENTRY DATE: 2001-12-06
tatatctaaatcagcacttcaattaatgaaacttgttcatggagccctgaagtgcaggatgcttgtttgtcatccgcaagagttgcaaaggagttatgctatgctgctagggacgccttactcttgtacaaggctattgtgccagttcagctagagaagcaactcgatagtatcaatcaagtagctgccattattcacaacgacttctaccatttgtcccaagaaattcttggtcttgcatttgagtaccgtgcagattttcctggtgacctacagaaactagttgtttttgtggatttagccccaaccttctctcagatggcagatggtgtacttacaaggcaaatccagcttgttactgcaaacttaatagaggctatagatggcgctgatggttttcagaatacacaccaacctcagcattatgaatcagcaaaattcagtattgagcaggttgtgttcattttagaaaaaatacacattatgtgggaatcgatactgccaagatcaatttacaagagaagtatgtgttacatccctggatctgtcttttctagaattacaaaagatatgctcctaatagatgacatggcagcagaggagacattacagctgcaaggtcttatccatttggctcttgaaaacctctcatcactatttctgtccctggttgagaatgagttcttggaccatcaaacttggatcgagttggatgagattatacgacctttgaagaagttccggaagctagcggagctgcttgatatgtcgttgaaatccatcacggccgcttgggaaagtggggagttaactaattgtggtttcacatcgtctgaggtacaaaattttgtcaaagcaatatttgcggattctcctcttaggaaggagtgcctattatggatttctaggacaccatcttaggatgcagaaatcaaactatttgttcttcactgattcattaggcatcttgtcattgcccttcgtttgtacagatctggttatgttgtgctttgcacttactttcatggatagtatggactatgggggtttcactcg

SEQ ID NO: 743 - DNA, 799 bp, Oryza sativa
  ref <308>: DATABASE ACCESSION NUMBER: AK058846
  ref <309>: DATABASE ENTRY DATE: 2001-12-06
agcatcaaggtgtattccactggagaaatgaacatagaaaataataatgttagacagctgagtaagccgcaagtggatgctgaacttgataagatgaaaagcatgagtaaggaagaggcagcatcatttgctgctagggcagttgccgaggcagaagcagccattgctgaagctgaagaagcagcaagggctgcagaggccgcagaagccgaggctgacgctgcaaaggcttttcttgatgctgttgtgaccacgatgcaaaacagaaatcatgcttctgcgatgcttcgagcttgctgatcttctctacggattcagattgggtttcagccagtgaaacttgtcaagacaacgctggtgttctgctacaaagcttttgttgatagatgagattcttgtatagccttatagatcaagatgctttagtgaggggggttttcaacattttgctctgatcctgaaccctaactactcatatttgagttgatgtcatccagtggtatccaattagatacatatatcacgtgactggtgtttgtgctatgttaagacaatcaacaactccaataacaagggcgaatgagaatttagtctgaatttccccccgttttgtattgcttttgtaattagccttttccctttggtcaagcgaagtcatgaaatagtagaattgtagttggaaagacatgtcgtatgagctgtgctaatttatggacatggctttaatatgacaagttggtggtggtgttttagcattacattacaactaattagcacatgctgcagtcattgtactctc

SEQ ID NO: 744 - DNA, 695 bp, Oryza sativa
  ref <308>: DATABASE ACCESSION NUMBER: AK058847
  ref <309>: DATABASE ENTRY DATE: 2001-12-06
cgagagatgtgacatcgcaagattggcctttgccatgttgggtgcgctcgcatggcaggccaccgtaataaagatgatctttttgtgtcctggggggagttcgcacgggggttattttgtttagccccgggttctccccccaatcttgtgtcccgttgtcccctggttgtcctcagatcccactgcgactacatcgttcaacgatcgcgcgtgaatctaaacgtggagctacagcgcaacaaccaaggtacaaaagataatctacatgtgcaatattagtcgtaatcaaatttccatatcattcagcgtttcataattatcactgccttaaaatatccctagtcacataatattcctggatttactttaaattgcttgaattacttaattattattatcattgccaattaatatccctgataaacagcagtattatcatccctagaagtgcatctcacatattgactcaagttgattaaagttacgcttggtaattggtttaagagcagctggaatactacgcaattgttctaacgaatatctagtacttgctttgtatacttaaatatatccataagtcggtgtagtggtaatatttgcttccgagattatgtgctcagctatactccgaactgtcaactatcagtttggaagtatgttatgttggtcaaatactattatgatgtttccagcat

SEQ ID NO: 745 - DNA, 645 bp, Oryza sativa
  ref <308>: DATABASE ACCESSION NUMBER: AK058848
  ref <309>: DATABASE ENTRY DATE: 2001-12-06
aaccacggagacaacacacgcagctcgccgaccagagacagagagagaccatctgctagcttagctgccatggccgcctccaccgtctccggcctcgccggcgccaccctcgcccgccggccggccttctccaccggcttcacgacgggcgcccgggtgtcggcgaggaacccgctgctgacgaggaacctggagaggaacggcaggatcacctgcatgacgtttccgcaggactggcttaggagggacctgaacgtgatcgggttcgggctgatcgggtggatcgcgccgtcgagcgtcccggcgatcaacggcaacagcctcacggggctcttcttctccagcatcggccaggagctctcccacttcccctcgccgccggcgctcgactcgccgttctggctgtggttggtgacgtggcaccttgggctgttcctggcgctcaccttcggccagatcgggttcaagggcaggaccgagggctacttcgacaagtgaatgaatccacagtggcttttggttagcttgactgtacggacggatgtgtgcgctgcatatccttccttttgtatagggctctgatttgatcctcttgcggatgtacgctgttgtaattctcctcaactccttaaaactttaaaggac

SEQ ID NO: 746 - DNA, 656 bp, Oryza sativa
  ref <308>: DATABASE ACCESSION NUMBER: AK058849
  ref <309>: DATABASE ENTRY DATE: 2001-12-06
gtcattcgatggcccatttcatggacttaagggctttcatcctgcgtgcacgtgttttaaagctttataggcaggccttgcgcatgactcgccgagctcctgtgcatgcacgcgatgagttgaggcaaactgtaagagctgagattgaaaaaaatcgccgttgtgacgataaacagaagattaagttcttgatcagtgaaggtctgcaacgattaaaaggtcttgatgagatgcttgacatgacaggaaatagttaacttgagtttcatgtgggaatctactgttgtattcaattctctcatggatccatgtagttatataacacactttaccctttacaaagggcaagacatttgttgttctctagtttcatctgcggaacctgtacaatatttggggctggattggggttaggttggctcagaactacagatcatggaccttttctagaagtcagctggtttccacaccaagatattttggttaattgttttctgtaactttcttatcaagggatgtaaagtcgaggatagttctgtattttttttctcacacttaacatagaacaggactgaaggtttttccagttttgagctaattggttttcaattgtactatcctttcatgtgaaattacgaacagaattgatgccattg

SEQ ID NO: 747 - DNA, 571 bp, Oryza sativa
  ref <308>: DATABASE ACCESSION NUMBER: AK058850
  ref <309>: DATABASE ENTRY DATE: 2001-12-06
cacctcccgccgcgcatccagaagcgccggttctcggcgatgatgtcgccgatcgaggcccagggctgacatcaacaacgtcacctcaccggacctcgccacgcctcgccggcgtcgtcgtggtcaccattaggccgcattttcttcttctttgaggcaaacaaaaaaaaagaaaaggaaaaaaaaagtcgaaaacgcgcgggaagttcagtcttaatcggtgtgtcctccctgtgaattttgtcgtcgaagtggtgactggttgtttttgtttggtctgcctgtaatttagcccgggtgtgagtagcagagatggaagcggtagaatatatgggtaggcatagttgagctcaggatcaatcaggaacagtgttttctttttccctttttggttgcgagaaagaactactggatggatgttcatgtcctgctgagtttgcggtaagctctaaatagtagaggtagatgatgcgtctggtgttgctcactttgtttggtttgtaccagcagatgtacctagttatgcttatgcatcgattttaattgtttgtatataggatttgccagcacc

SEQ ID NO: 748 - DNA, 1100 bp, Oryza sativa
  ref <308>: DATABASE ACCESSION NUMBER: AK058851
  ref <309>: DATABASE ENTRY DATE: 2001-12-06
atgccatgaatcgcagctcactcctctgcttccttcctcgctgtttgcttctggtttgattgatcgacgatggagcacaaggacaggcagcggcatgcagcggcggcggtggctaagccgcggcagcggtcggcgtcgttccacgggcgcggcgaggcggagcagcgacactcgctgctgaagcagcggccgcggacgcagcccgacctgcttgccggcctcagggggcagagcttccggcgaggcggcggcgaggggcgggcgccggcggggccgagcagggtgctgctgaccgtggcggtgcggcagagcatgtggccgctgcacgtgatggcgcgcgcggagtggagcgtggccgacctggtcgccgccgccgtggagctctacatccgggaggggcgccggccgctgctgccgtccgccgaccccgccgccttcggactccacttctcccagttcagcttgcagagtttgaacccggaggagaagctcatggagctcggcagcaggagcttcttcctctgccccaaggccgccgccgccgccgtggctgccgtctcgtcgggcgaagacaccggcggcttgtccggggaagacgaggccaactctgccaagaagcccagcgtgttggctccatggctagggttccttcacttctggccgctgctgtaggttatagtactagttaatactgccatttgtgtaggtcacagtaagctgcatgtatcacctgttttttttggataatggtatgcagcatctgtgaactatggtaatcttagtttcttttttctactaaatgtatatatacattagtgtttactaagtgaaattatactgttacagttttggagatccgatttgttgtggctcataattggcatacaaagtcgaattgttcatttggatgtagctgcaaattgtacaatgcgaacttagattctgtatgagattgaacatatactgcccgcatgcaaaagtcagacgcttcaatctccttctctggggaatccaattctatttttctacaaaactgtcaattctcagaagagtacttttattggtccagaatagttattggtcctaataaatatctgatt

SEQ ID NO: 749 - DNA, 1179 bp, Oryza sativa
  ref <308>: DATABASE ACCESSION NUMBER: AK058852
  ref <309>: DATABASE ENTRY DATE: 2001-12-06
tggctagttgattctacattctgtttttctgtaaatgctttgctggtccacttcatgtcataatctgaaccttatccatatccatatccatatccatatgctcaaaatctgaggttattcaagttaccttatttatacaagcagttagatggccggccgatgagtggcgacataggccgaggtgcaacgagggaaacagtatcctttgctgttcatttgtcttcaatgtcaaataggcctcctggcttctatcagttggctggtggcaccaactcatacaccatagaatccctaaagaaagctggtcttttccaatctacaacttttcctggtattttgtttacttttttttaacatgtcaccggattttgtttactttgttccttttcttgttcaacttatgaggtcaaagaatactttaggcaaaatcacattttaagcccttgaactattaaactgtgtgcaattaaacctatgccttttgaaactgagcaatcaaactaatgttttatattctggtaatatgtttatttaatccatgaactatccaactttatttatcttactgaaacttaggggcagcaacctctggagtgactgattgtcagcaagcctttattggagggatagcttatggcggctatgctcgcaagattgttggaagagttctacgcaaaataccggcacaatttggccatgcacgcattgaggaccacccagattatctcctggaagcattacaagaagctctatcactagtcgggcctgtgaaaggttacccaaccttgccaagtctctgaaactagtaaatggcatctccaagttctcatccagatataggataactttgatccagttagttagtatggaagttgcattgtgaaggtaagccaaggtgagaaggtattctgccaactgattgcccaatgaacagtttgggagttgggaccaaccatttctggctaagtggcaaaaatcagtaatccaacagtcagcagatcaatcactaacttactcttaagcttggtaagtaggagatattccatctgagattggatgtcacaacatgctttccataaagtccatgtaaaactccataagaaaggtgtaaaaatccatttgttgtttgcatgtacaccttgaatattctatatagtccagtggacaacgaaggttttg

SEQ ID NO: 750 - DNA, 762 bp, Oryza sativa
  ref <308>: DATABASE ACCESSION NUMBER: AK058853
  ref <309>: DATABASE ENTRY DATE: 2001-12-06
aaaactgacacaaccctccttaactcattcctcctactcctaactgcaagctactgctcaccctctcccggtctccctcctctcctcctcgacctcgcgcgcgagctcatggcctcgagctcaaacccggacaccatggacacggaccctcccggcggcggcggcaccctctccatcgccgtggagcgcaacccgccggagtcgcgcctgctccagctaggcgtcaagtcctggcccaagtggggttgcccgacggggaagttcccggtgaagttcgacgcgcgggagacgtgctacctggtgaaggggaaggtgagggcgcacatcaagggctcgtcggagtgcgtggagttcggcgccggcgacctcgtcgtcttccccaaggggctaagctgcacctgggacgtcctcgccgccgtcgacaagtactacaagttcgattcatcttgacgtctgtctcgtcgtcgatcgatctctctccctcgccgaattcggtgactaattcgcttcctgattagttcggtgactgcgcttagcctcattctgtagctaatttgttgctagataattaagcccgtgcctaatgtgataatgtctcttcttctctgcgtgtaaaaaaaaatggtgtgcgagggggcaggggcatctagcccctgagaggctagtggttattcaggagccccaaaaaccggtcaatgcaggggctgttcaaagtattcttgtttattcctccgagtgcaatccactttgaatgctctcttt

SEQ ID NO: 751 - DNA, 1007 bp, Oryza sativa
  ref <308>: DATABASE ACCESSION NUMBER: AK058854
  ref <309>: DATABASE ENTRY DATE: 2001-12-06
gatatgtttggattctctgtccaaaacattgtggtgaagcttatttaccatataaactaaggtcttgtgtttcattcatctgcctgagacaagtctttatctatgcaattgcaaatgctaaccatgcttttgttttgctgatcaaccacccaaacttttgtagattaaagatgccaagcacttagagggattctcgattcagctagttgttcttgcaacctggaagcaagcaatttacatctgcacttcttatgcatcttctgccacaagagagaatccttcccatgatgtcaccgcgaagggttttggctcaaatgctccccatttgcttgcaaactctcaactgttatatgatacatgcatggagatagagagtcagtttttggttcaaatggaatatgctgaagaacttgccaacactataggacagacagttgatgctacagaaatgccagatgcgatagaaatcatatttcagaccgcgcttaacctgggaagacatggtggtgttgatgagatgatggggaaatcagcatctgccatggtgctgtactcgaaggcagtatccatgctgcgctttctcctgactgaggcaccgtcactcgccctgaaccccgctctgtccctaacaagagatgatcgacgccgcctgcgcacatacattgaagccgttaacgctaggctcgtcccgttgcaataccagcggcactgaccgctcacctgtacaatattctttcatcctgtacatatattcgttggcccaaacgagggcgtgtaagatatgtcatgtctgagaacgtgctccgattagggagaagtagcgaaaaatccagtgtaacttgcccaaactgcctactgtaacgtgagctcggtgtgcttgcatggtacgcctgattatcaggcagctcaggttggcagctgaaggcccgaccatggtcgtttgtggacatgtaaagcagactgctacctcgatggtttgttcattaaaatttgggcttttacactgc

SEQ ID NO: 752 - DNA, 582 bp, Oryza sativa
  ref <308>: DATABASE ACCESSION NUMBER: AK058855
  ref <309>: DATABASE ENTRY DATE: 2001-12-06
atataaagcgcgggtgcacgatgcgccgccgcgtcgtcccggcggcggcggccgtttccgcccagctggcagccgccctcctcctcctcctcctcctccacgccgtcaccgtcgtcgtcgtcgccggcggcggcggcagcgaagtggccgtcgacaggtacgcggctgcaggcgcgatgctgctgcttccgcggcggcggcggcagcagctggaggacgaggtggtgttcccggcggcgatggcggtcgtcggagctgagcagctgcagcagggcgggtccttcagcgggctcacggcgaacaagcaagcctgcctgcagggtcactcgtgcgccgcgttcgccatgccctacaccggccatggctgcatctacagaaataattgcaagcagtaagctagcttgctatagagctatcgatcttatcatgtagtatactataatattgtttatatagttgtttaattactcattataattgattgttgtaattgaatctcaatgtaccatggactgtactagtactactacttgtcatatcacgctcgtaccatggagcatctttaaggtaccgctaggtacc

SEQ ID NO: 753 - DNA, 689 bp, Oryza sativa
  ref <308>: DATABASE ACCESSION NUMBER: AK058856
  ref <309>: DATABASE ENTRY DATE: 2001-12-06
ttgtgctcggtgcagtctcaaatacagcctcttaccttcgtctttgggctcttagtcttgcacactcggagctgtccactgtcttctacgagaaagttcttgttctatcatgggggtacaataacattttcatcctgatcattggagcagtgatctttctctttgccactattggtgtcttacttgtgatggagaccctaagtgcattcttgcatgctctgaggctccactgggtggagttccagaacaagttttacgagggtgatggatacaagtttgtaccctttgctttcgcatcaatcatcgaggaggaagattgaatctgaattgttgtatgtaatctagaatgtaaaatcgtaagagtccttcccttgaataatcattgtttatcaccattggtgaagattcagaaaaccccagttcgttgtgtctgagcaggggatgccaaatcattcttttttgcctacacgattagccatgctaggttattctgtatattatgatctgttattactttgagcggtgacaggagcggctgggacgaagttgcaaataagtctagtgcatagcataactgcctttttacatggtgctatgttaataaaagttctgtactcatggctgtgacacgagtgatgtgtcttttgaattacacttgtggaaataaataagttccattctttgtgatt

SEQ ID NO: 754 - DNA, 614 bp, Oryza sativa
  ref <308>: DATABASE ACCESSION NUMBER: AK058857
  ref <309>: DATABASE ENTRY DATE: 2001-12-06
tcaggaagcagccatcgtgtcaggacgcctgcgaaaccgcgtttgagaggtgtaggaatcccctaacatctcacatcggcagggagcagctcgccgatgtcctgcggtcaagcatgcttgagctgatgaccgataatgggatgatgaagctgttcaagacgttggacgtcgacgatgacgacggaatcagcaaggatgacctgatggcatcccttaggaagctccccttcatgatcgcgctcttcgcaggccggatcaacggggaagtctacatcgagatagtttgatcgactggattgatcgcaggggagagcaaaaatggtggatgggagtttgtaacgcggtgggagacgacagacctccgtctgtttttagagggatggtttccaaccgcttcaccgtccatgtagctttctcaggcgtgttggactaaagtggctaaccggtatagtgcgcaattttgtttcatatcgtaaaaatatatatttatatccatagaaaagctgtcgcgtgatggcacgctggattgtgcaatgtggatatgatactgtacaacattggtccaactgggcgtgcacatagaaactctttttttggtttggtttggtttggct

SEQ ID NO: 755 - DNA, 583 bp, Oryza sativa
  ref <308>: DATABASE ACCESSION NUMBER: AK058858
  ref <309>: DATABASE ENTRY DATE: 2001-12-06
aatgccggccacactcctcttcctcctccatcgccaagaaccaccacgagcaatggcgtcgctgtccatggccacaacgctgccgtcgctggccggcgccgcaccggcggcgaggaagaggagcggcgtgacgtacgtggaggggatgaacgcgtgcagcgggctcaaggcgctcaacaaggtgaccctgctcggcgtgcgcaagaccgccgactactcgttcgccaaggtggtggccaagctgagccccgccggcgggaagagccgcggcggcgcgttcggggcgcagtgcaacgccgccggtgagatattcaggatcgccgtcatcatgaacgggctcgtgctcgtcggcgtcgccgtcggcttcgtgctgctccgggtggaggcggccgtcgaggagtcggagtagtggaccccgatcgagccatagcaggcagggcccagccagccatggctggttggccccgataagccgtgatatataactgtgatgtatgtttcgattaaaatttgctttcgttttgtacccatgacgattggtgaatacccttggaacgaaacacgttttggaggcagaacctgc

SEQ ID NO: 756 - DNA, 660 bp, Oryza sativa
  ref <308>: DATABASE ACCESSION NUMBER: AK058859
  ref <309>: DATABASE ENTRY DATE: 2001-12-06
atcatggccaagcgtctgctggcgcatcccaaggtgacggtgcacttcaacaccgtgcccaccgaggccaagggtgacggcgagctgctcaaggcggtgcgcgtcaaggacaccaagacgagcgaggaacgcgacatggacgccaacggcctcttctacgccatcggccacctccccgccacctcgctcgtcaagggccaggtcgacctcgacagcgacggctacatcatcaccaccccaggcaccgcacagacctcggtcaagggtgtctttgccgccggagacgttgcggacaagaagtaccgccaggccatcaccagtgccggcaccggctgcattgctgcgctcgaggcggagcgcctgctcgcagaggaggaggtgctcgaccccgtcgacgccgcacaggccaaccactacactggcacggacaaggagtaggcgtgccacatgcacgtttccgcctctcccagtacgatatagaacagacgcagtgcgcacggtcgccagaccacctcgtcgactcacgcaacggcgtgcagtcttcttgcgacaccgcttcatcacatcctcacgaaacggcgctctggcgtcgctttggctcggttttcgtcccgttggcatccattgaccacagtaatcatagcaactcaaaatggcttc

SEQ ID NO: 757 - DNA, 573 bp, Oryza sativa
  ref <308>: DATABASE ACCESSION NUMBER: AK058860
  ref <309>: DATABASE ENTRY DATE: 2001-12-06
ttatctgcacttctctcccagacaaaacagcaagaacgaaaggatgctgagattttagcagaagcaaaacgcattatggaaactcgtgctgctagcaaacatactgaggaagcgggagcactggcacactttgataatgttgatggtgtatctcccttgagcaacacacacccattgtcaactgctacacttccagctgcagcagtgaataactccatacctgcttcactgcgaatgcttcgagtgtatttgagaacccaagcgcttgatcaaatggtccaagcagcaagtgcctcggcgggccttagagttatcaaaagggttgaccagactttacaagacctcggggtgaatttgaagcccaaggtcccgacgaaagcagtttgcgtcgagcatcttgaactacggaatgagatacttacactgcttaacttacagaagcagctgcaaaataaagaagctgaagtttcagctaacagagaaaattcctttacagaggcaccaagcacacctaagcgtgctaatagagatgttgatagaccctttgttcctgatactgttgggtttgcaggt

SEQ ID NO: 758 - DNA, 425 bp, Oryza sativa
  ref <308>: DATABASE ACCESSION NUMBER: AK058861
  ref <309>: DATABASE ENTRY DATE: 2001-12-06
tgcgaaaaaaaagaggttatggaagtcaatattctcgcatttattgctactgcattgttcattctagttcctactgcctttttacttattatttatgtaaaaacagtcagccaaaatgattaattggaagttcaattaatcattgaagaaacgaaaaagggattaaataaaataaaaatccaagtcttaaatgaaaggatccggttggaatcataaagtgtggtagaaaaaactacatatagttttttctaccacactttagagtctttctattatattatcttgaatctacatagaatagattactagattgaaatagtagtctaattcaatttcttttttcactgcatccacttaatttcaatcaagtcaaaatgaaaaaatccatggagggagagaaaaataatatgagaatagactatagt

SEQ ID NO: 759 - DNA, 983 bp, Oryza sativa
  ref <308>: DATABASE ACCESSION NUMBER: AK058862
  ref <309>: DATABASE ENTRY DATE: 2001-12-06
aatgaaactgttatggctcatgatgtgcagactgctgctgtctcttcctttgatctgaaaggcattgagaaacatgttgaatctctgcatgatgctatggaactagatggtacaaagtcaagtaaaatgaacctcattgcagattttaccgctcccttatcttctgatgatagcttggtgtgttatgctattccatgtagtatggaactttctgacacgagtgtcgtgaataagtgccctcaccagtctactggcttcccagattatgctaaagcttgtacagaatgtgactctgggttgacctcctgtgagagggttgataggatatcacaggatcatgacattctttctggttccagtatttactctaagaataaggacctctactcttacagtgacatctcagttttttctgagactcacaaagattttgcagaaccgctagagttgcctccatgtgggaaagatgatgaggcgccaccagatcttgcagctcaattgcactgtaattcatgcaaggatgttatgatgccaccgcaagttataagcgatgaagtagagccagttgacagaggagcaactattttagtggaacatactccctgtggtccagagactgccttgactgcttttctttatgataaaggatccattgatacaaccagtaaaactgatgagttggcaaagcaaaactcaaactctctggagggagatgttgctaaaatacatgaacaactactaaactattcttatgctagtggtgaggtggagatatccctaactagatcagaaaagcgaaccaaaaaattaaggtcgcaacatccgatttatgttcctttcttgggcttcctcaagtctgtgtcctttaagaagaaagcatccaaggtatggttttttgaggataccgctaaacacgaattccttgtctgttatcagtgtgatatgaataatgaaaaacaagagttggtacttgacttcttttt

SEQ ID NO: 760 - DNA, 1275 bp, Oryza sativa
  ref <308>: DATABASE ACCESSION NUMBER: AK058863
  ref <309>: DATABASE ENTRY DATE: 2001-12-06
ataaggaagggcctgacaccaaattttgaagacaataattatcgaaggatccgccttttctgggatgactttgtggcctacagagcatcagaagaggcaaaggagattagtgaaaggaaccaagccaattcggccaaaaatctgtaccctcaccgtctcggccctagcggatatgctaagaatgtagacaaatggcgagagagggaagatgagctgctggaaaagggaatcgagatcgagacgaaggattggagccaacgggccaaggattaccaatacgctcgaggggcaacactttcggatataggtgagttggtacacaagggtccacgagagcaagaagtgacacagaggctccacgatgcccatcaaaagtcctcagagggttcttttgttccgaacagggagaaagatgagctcacacttgcattgcagaatgatgagcatccgggacgcacaagaggagtaggcctagttccatggagggaaggttttactgaagacggacataggtaccggtctcggagatataagaattccggagaccaatcagaagagataaggcaactgaaggatcaaatggcactgataatggcgaggctcgatagtcaggatagaggcgatgctggccgtgtaatcagcccaggtgggaggaaaagcagttgtgcgtcaactaaggttcctcaagaaccggacatggctcgttaccctgtggatgacatcactgtacgtactgcatgcaggctgcatgtgccacttcaaaacatcactcaagaggtggcacgcggtatggcacatcccgtaatggaggggggaaagatacacagtaatctgataccaagtggctactcaagggtcgaagtgggggacgtgccgagcagatacagggcagtccagcttgattttgctccagagaagggaataaacactcttggagaagccgtccacaacataatcctgtggcgcaagcgtttcattgtcttcccttcaggagatagtgatgatgagccaagcgatgatgggtctagctctgaagggctttctgtctcccctcgaaggatgccaactccaccaccatcgccacgtaagagccagtctcctccaccggcacaacgtaagagcccatctcctccaccagcagaacaccataggctagcttcttcagacccaccgaaaaaaagggggcgcctatgtaaaacatcccagatgttcgaacccccatctctgaagaagaccaagaaggcgccattgcctaacatgtctgagccaactttg

SEQ ID NO: 761 - DNA, 350 bp, Oryza sativa
  ref <308>: DATABASE ACCESSION NUMBER: AK058864
  ref <309>: DATABASE ENTRY DATE: 2001-12-06
ctattacagtttcttctactatgaataaagatgaaaagatgatgaaataaggccttcatgttcttcctacttttatgtattcagtgtattcagtgttgatggcaacattgtaatcttgtgtgcatttttgtttttaagattgttttagttgcatcctgcatttctgttcctgcgtgtgttaattcggcatgccgagctgatcactccaaacgtggtgggatggcacgagtttggtgaatcttgtgtttaattcggcatgctttgtatgtaaaatctccagctttggagaatagtaaaaaaaagagaaaaaaaacagaaaatgctgcagcttcacgcagcacaaaaacttc

SEQ ID NO: 762 - DNA, 790 bp, Oryza sativa
  ref <308>: DATABASE ACCESSION NUMBER: AK058865
  ref <309>: DATABASE ENTRY DATE: 2001-12-06
atgtcgtgtggccggtgactgggaacggcggcgccgctcctgttgtggtttgctagcgatggctggaggcggcactcgctcggtgccggtggctgccacatgtgctccgggccgccgcaccccttctcacttgtgtctccttctgcgtctcatctatcagctagggttccgcggtgtggtcatccgggtggctgaggagaacggcggcgcagcttgcgcgtggccgtcttccgcaggctggctccgcacttcctctcgctgtgctagcagcagatgggcccatctgccgattcagagggcggtgtactgttggcctgcgccctgcacgtctcaggagggccacgggttcgccaccatgaattcgtcggttcagattagcatttcaggaccaaggcgaaagtttttcatgaattggtgtttatctatttagtagattctggatatcagttccattactcaggggcaaatctgaggattttcatagcaccggataaaattatcgcaccattggataagcttccaagcaaagaatttgactaagagcaaataacctttatcggaactgtaacccacaatccagccacaccacctacctgcaagcaatttccgtcgttactgcatccaaatcgtcaaccgtttatgtttctgtccaagggaaatcagccgccgacgacctacccaatttcaagtcaactcaaactcacactattttctacatgaataaaatccctcacatagatgtcttcttcatagaacaagacttcaaaaataatgagatttagtattcctg

SEQ ID NO: 763 - DNA, 357 bp, Oryza sativa
  ref <308>: DATABASE ACCESSION NUMBER: AK058866
  ref <309>: DATABASE ENTRY DATE: 2001-12-06
aaggtaaatctgcagacaacagcttgcagagctcagtaatcccaagcagaatggcgttagccacatgagttacacatgcttttcctttcttgagagcggaaaaagggagagaatacagaatgctttgcctgcattttttcccaagaggtcaagactgccggtaaaaaaagagtacaaattgtatatgtagtggacgagtactaggactggaggtcatctactaggtgttgtgactacatggtgctagtataagttctgtatccttggatgtctaggatgaccagcaatttgccacgtttgatgttctgacatttgcttgtgccttggacgaatactgattagtactctctccgtttc

SEQ ID NO: 764 - DNA, 1017 bp, Oryza sativa
  ref <308>: DATABASE ACCESSION NUMBER: AK058867
  ref <309>: DATABASE ENTRY DATE: 2001-12-06
tcccctcctcctcctagggtttcctgctcctccgcccgcctcgccttgctgctgccgttgttggttggtgcgatggctctcacttcggctcaacggattgctctcactgtctctttctttggccttctctccttcttacttggtgtcatcgcagaaaacaagaagcctccttatggaactcctatcaaaggaaaggatgttgtcatctgcaagttcccaagtgacccaactattgcaatgggaagcctctccgtggtgtcacttgtgttaaccaccatcgtagggcatgccgctatcttctatccatacaagagcaagtctgttcctcgcggagcattatttcgaagcgccagcttatctgcgttcttcgttattgctgagcttgtctcagctctggcgtttgcaatgttgctctgggcaacggtcaccgagggtcttcaccgaagcaacaacatccaccatgacctggatacccagtgccctactgcgaagactggcctctttggaggagccgctttcctggcccttgatgctgctctcttctggcttgtttgccagatgctagctctcaatgcaaggtctgactatctggatgaggatgacaagggcgattatggccaggtttttgcttctgatgttgatggcacaaaggtctgaggctttgactgggcagggtttcatatttagtgtcacttagctatattatcttatcggcaaagctggttcgattagctctctaaaatctgtagatatgtgctatgccagttgcaaagtcgtatatataagggtatttgctcattgcacgtttaagcttacgttgtgaaacaataacagtattctcagtatggtccgtctgttagtaatctccgtggagctaagtgtcctactattaatttttctggtgttactctgtgtttttctgtgacgctgattcttgaagtataaatctaacattgtgggaggtatagatatatagataggtaaagataaatgaagtacttttttttccggttgctt

SEQ ID NO: 765 - DNA, 499 bp, Oryza sativa
  ref <308>: DATABASE ACCESSION NUMBER: AK058868
  ref <309>: DATABASE ENTRY DATE: 2001-12-06
agccgcgccgccgccgccgacgaccaggtaaggaaggagatccgccgccggcgccgccatgaagcgcaacccacgcgtgacgagctcccggaggaagtgccgcaaggcgcacttcacggcgccgtcgtccgtccgccgcgtgctcatgtcggcggcgctgtcgtcggagctccgccacaagtacaacgtgcggtccatcccgatccgcaaggacgacgaggtgcaggtggtgagggggagctacaagggggtgccgccgccaccggcgcctcgctccaggagatcgattaggctcgtgggtcggatctgctggtgctcctactgttccccccctccttatctagcttttgtttcgctatcaactgcttctgctaggagttcatgctacctgaacactgcttgctgctttatcgttgaaaatgtctccatgagagttttggatccttgatgttgatctatatctacgatgtggctctgtctgggattttgagttatgaag

SEQ ID NO: 766 - DNA, 642 bp, Oryza sativa
  ref <308>: DATABASE ACCESSION NUMBER: AK058869
  ref <309>: DATABASE ENTRY DATE: 2001-12-06
accagcacagggtcgtcgtcgtctccttcctctcgccagtgccaccacagctcaagcgtgatccagcgtcgggccgcgcgtgcgagcgagcgagcgtgcgagatgtcggccgccggggaggaggacaagaagccggcggggggagagggcggcggcgcccacatcaacctcaaggtcaagggacaggatgggaacgaggtattcttccgcatcaagagatctacgcagctgaagaagctgatgaacgcctattgtgaccgtcagtctgtggatatgaatgctattgcattcctatttgatggtcgtaggctccgtggcgagcagacccctgacgagctcgagatggaagacggggacgagatcgacgccatgctccaccagactggaggctgcctgcctgcctagaagcttaggagttcttgcagcctcgtaaaattgtgcctttagtaggctcaatatctagaagtacatgaaaaaaaagaagcctaaaagaacttgtgaggctttggtcctgtgccatagctgaaggacattagaagagctttgtttggcaaaaatattttggtacttcggctgttatgactcgtttatccataccctaatatgtccatcgttgctggtgcttggcatgttttcttttgc

SEQ ID NO: 767 - DNA, 715 bp, Oryza sativa
  ref <308>: DATABASE ACCESSION NUMBER: AK058870
  ref <309>: DATABASE ENTRY DATE: 2001-12-06
aaaaaaaaaaaaaaaaaaaaaaaaaaaaaaatcttctctcaacccctcgccgcctcccgacctcgacgacgacgacgaccgacgacgaggtgcggctgaatttgctggaggattgattgattggccatgtcgacggcggtgaaggcgttcctgaacagccccgtcggccccaagaccacccatttctgggggcccgttgctaactggggcttcgtcctcgcgggtttggttgacatgaacaaacctcctgaaatgatatctggcaatatgacagcagccatgtgcgtgtattcaggactctttatgagatttgcctggatggtacaaccacggaactatttacttttagcatgccatgcttccaatgaatcggttcagctctatcagatgtctcggtgggctagggcacaggggtatttggagaaaaaggagccagaggctcagcagtaaaaagaagacgcaaagcgcagcatttagcttctcaacaagaaaacttgtctcatgtccatcaatgctgagtctgtaacacaatataatctcagatcatatcttccttgtgtgccataagtgcttgcccctaatgttatttgatgtcaaacctgttccagaaaaatcagaatcgcacataatttctggttgtttttctgaaaacctttatgatttcctgtttgtaaaaactcatcacattgtgttgaaaatgattggttccaaatgt

SEQ ID NO: 768 - DNA, 1353 bp, Oryza sativa
  ref <308>: DATABASE ACCESSION NUMBER: AK058871
  ref <309>: DATABASE ENTRY DATE: 2001-12-06
aaaaaaaaaagacgcgcgtccgccgccgcaactagcaatgcccaagcggcgtcgcggggttcgcccccctcctcccgatccttccccggccccggcgacaatcgactatagccttacttataaggagatagccgccagtggggctccaggtgctgtggactttgtgaagaatcatggcttgtacttgctgctgcttgagacaccctctggcttctcaattttctctctttgtggggtctacatccacttaccagatgcgatacaaaatatttgggcgatgttcggtacttacaggtcttcacatgacgttatctggctgaaggaatttcagaaatttgatgacaagtctagcgccattaatgttgatactggtgttaacaaacagcttactgagatgatcatgaagtggcgtcgccctaggcagaaattggttgttggaaagccggagtataaatcaatcattgaaaataccttaggaataccctgcctgtgtgatgaagttgtgatggacgtaatgtgggccatgaagcgtctcattcgctattttgtgcccactgaaacacccgagctggctgaagaggacagcctcactatgagtcaaggactacggatgtttttaagtcgttatggctttgaaatcaaaccagagatggtctacaacgatattgttcgtgctgcatccatcgtgtttaggtgtgatgctgttgaggacctttacgagcacttgcaacatcttggtcgccacctcaagaatgtgtctggcattgactatgagaattggggcactgtgaaactcgcgacagcttttaagatcatatgcagccgcaaaattgataaatctgatgagatgttttcagacgacgtgcgatcgaagttgctggatgatgcagataaatacaaagatcttgttttttcgacaggttgcattgcaaactataaaaaaattttaggtctcaatgtactcaggaatgataaaatggatcaattggctgagttggttaaggtagctaggattaaagctgaacacgtgagggtgcctgagaatgtgcctgagaactaagatcactacaagcttgctcaatatctcgctgaacctcttgcaggctaaataatttggtttgccagttaggaagcgtttggtatgcatgtggcttaatccagattcttctgagtgtcgaggttgtgatctcggttggcttaaacattattgtgcatcttttgtaaatctagtctggtatttgagaagctaaggtccgtgctatccaaaactttgcatcgtttagctgtcaaacaaatgaccgtgctcagtggtgattaacgtgctctgtgatgaatgacgatcttgatttgatt

SEQ ID NO: 769 - DNA, 743 bp, Oryza sativa
  ref <308>: DATABASE ACCESSION NUMBER: AK058872
  ref <309>: DATABASE ENTRY DATE: 2001-12-06
agcggctgcttcttcttcctcattccaatctccccccaatttcggttggattcgtggaggcggattggggatttggatttggattggagagaggggggagatggaccaggtgctgaacaaggtggggagctactggttcagcaagagggcgagcaaggagatcgactccatcggcgacgacatcagctcaatctctacaagcattggaacaggagctaaatggatggtgaacaagatcaaagggaagatgcagaaagcattgccagaccttctcaaggaatatgacatgccggcgggcctcttcccaagggatgctactaactatgagttcaatgaggagacaaagaagttaaccgtgtacattccttcagcttgtgatgtcgggtacaaggattcgtctgttctgcgattctttacctgtgtgactggctacctggagaagggaaagctctctgatatcgaaggcttgaagacgaaagtgcttgtttggaccaaggtgactgccatcaagactgagggatcgaaggttcatttcactgctggtgtgaagaagacccgcagccgtgacgcatatgaggtagtcagagatggtatccccatagacaagttctgagcttgtacctgccatgaaaatgtgatgtaattaattagttgacgccttctacaacaaatatcaattgtcatatctcgtgttatgacctatttaactgaactgtattgccataatattgattgtccggccc

SEQ ID NO: 770 - DNA, 1371 bp, Oryza sativa
  ref <308>: DATABASE ACCESSION NUMBER: AK058873
  ref <309>: DATABASE ENTRY DATE: 2001-12-06
ttgcggtttggctttgtggcagccagcatgttctttcgcagaaaacaccacttgaaccaaaagataaattccttctatctgatccgccaattggtctctttgatccaatagagatttcaccatctgttcttccacacaatgctaacccagttgagccactgtcaccgatgtatccaaactacacatcatatgatccggtcttgactggaaaatgccatgtaaatttctcagcgctttcttatatgatggataaaacagcatctgattgttccattcctttagcaccactagttgctgatgtgatatgctgcccccaagttaatagcttgatgaatattttccaagctacatatggtgctggaaacaatacactagttctgaaccaggcttcggcaaatgcttgtttctctgatgttatgagcattctggcaagcaaaggagcaaacactaacatccctgagttatgtactctaaggccatcaaatcttacggatgcttcttgccctgtgaaggatattagcacatttgagaaaatagttaatgtaagcaagcttctagacgcatgcagcgatgttgacccactgaaagagtgttgtagacctgtttgccagcctgcaatagtggaagcagcagttcacatatcctctggaggagcaaacatgtttggaagttctagcatatctggaagtgatgctgggatcaacgtcgttagtgactgcaaaggggtagttcactcctggttatctatgaagctttcatcagaagaatcaaacactgcttttagagtattatctggctgcaaggtgaacaaagtttgtccgttggagtttgatgatccttcttccgttgttaaggcatgtggcaaggcatcttcttcaacgccctcatgctgtggggcattgcactcttacattgcaactcgccagaagcaaatatttgtaacaaatttgcaagcaattaactgtgcaaccatgttcggatcaatgctacagaaagctggtgtatcaaatgatatttatgagctttgtgatattgatttaaaagatttcagcctgcaagcatttggtcagcaaggctgtctacttcgcagcttacctacagacattgtatttgacaatgctacgggcattagttttacatgtgatttgagtgacaacattgcagcgccatggccatcatcatcatctgttcaatccttgtcactttgtgctccagaaatgtcattgcctgcattgcctgtcgcgccaacatctggatagcattgctgttatgtgttagagaggactgttgtaccatcagatatctgaacaatggaggtaaatttctagatgttgctgggcaacaaaggctatggacttggaatgcaactct

SEQ ID NO: 771 - DNA, 659 bp, Oryza sativa
  ref <308>: DATABASE ACCESSION NUMBER: AK058874
  ref <309>: DATABASE ENTRY DATE: 2001-12-06
atgtgccgcaggcccactttcgaaaacccccaacccatatcgcgcagttcccacttccatctcgccacgagcggatctgcgcctgcgctctccccccctcgccggcggcaagcctatggcggctcccggctccggctccggcggcatccccatcaaggctgatcaggactcggatggctcggcgcagagcactgctgatatgaccgctttcgtgcaaaatcttctgatgcagatgcaaaccaggttccaatctatgtcagagaacatcatttcaaagatagatgaaatgggcgcaagaattgatgagttggagcagagcatcaatgacctcaaggttgagatgggcactgaaggtattaccccaactaagccaaaggacgaagaatcgaagcctgcgggtagctctgccgaatgaaagaaacagaagcagttgaaatggtagcatgccattccagatttgatttccgtatcgacatctccagccattcatcactgacaaattacatgctgtaagatcttagcagggcacttttatgcatctgagatttgtggtagcagttgagaatctctcttatagatgttgttgcatgttttactgtgaacttctctgtggatattgtactgtactgcgcagagcaatgatcataataggtttgttt

SEQ ID NO: 772 - DNA, 418 bp, Oryza sativa
  ref <308>: DATABASE ACCESSION NUMBER: AK058875
  ref <309>: DATABASE ENTRY DATE: 2001-12-06
acgtcaggcaggtgcagttgattagcttcatcgcctacaagcccccaggttgcgaggagtctggtggcaactaagctaagatcaagcatcgcgctggtggattgctgcctataataatagtatgcagctttgttttgggctatgttgatgatatatcaatatataatatgctatatatttttattttacagtttggttatgtaccatctcaatggcctctgctcttaacacatatgtaataatctcttccctccctctccggccggttttattgtaagagtactacaattatcgttgggtgaggatatgtgaaaacaaagctccggctatatacacacaagatatgtatctagagcatatctgataaattcgtcgacaataaaaaaaatggatggtatcacgtaattatgtttgtttt

SEQ ID NO: 773 - DNA, 304 bp, Oryza sativa
  ref <308>: DATABASE ACCESSION NUMBER: AK058876
  ref <309>: DATABASE ENTRY DATE: 2001-12-06
gagatactagacaaggtccagaagagttacttcttggttagtcttgtggacaacgactacatcaacggtgatctcttcgcggcgttcaaggagatttgatgacatcttatagtctgcaacctctcgtgtctgaattcctatctttatcaagtgttattgcttccacgactataggacagctttcgtcgaaagcttttgctcatgtgatctcgaaggattcatctagtctgatttttcgtgacttgtatcggttttattggattcatccaacatatatcaataaaaaatgagttgtgtttccttt

SEQ ID NO: 774 - DNA, 1110 bp, Oryza sativa
  ref <308>: DATABASE ACCESSION NUMBER: AK058877
  ref <309>: DATABASE ENTRY DATE: 2001-12-06
cttccccgcgctctccattattttcggatctagccctcgcgtacaccgtagttagccaagccgctccgcctcgtttccatcgccgccaccaccgcctccccgtccgcctgccgccgccgccgtgtgggaggggatgccagacttgggaggtgacggcgacgaagtagagaaggcgcccaccctctcccctgcggctgtggcttgtgctcggggatggatgcggcgacgggcgacggcgacggactgcggcaatggcgagcgacgggctcggcagggctgtcccccgctcgaatccggtgacgacggtcgtcctccgcccggatccagtggtggcgggcgtccctcgcctgacctcggacggatccaccggcggcggtgggaggaaagcagcgtgcggcaggccaccttgcagtcctctcctcctcttcctcctcccgcttcttcctgcccgctgccgtcatcatggttgtcctccaccagctctccgcgtggccgccgccgtccgccgatggacgtcgactctgacctggccgacaagggcaagcccacccagatggacctcgaggaccagactacaggaatgctctgaatttgtggagttttctgcacctcagctgacgatcatgggggaggctgcaaccccagcgaggcaggaggatgttttccaggtggcgggtcacgcctcgtcgatagcatagatcacacatgggcagaggaagctgtggatagcatgatgggtctgctagctgcaagttcattgggtggagctttctcttggggggtgcttttgcctgccatggtaaggccagcaagatgggatgaggcttcagctggctagtggggatggagatgaaatcagaaatcaggatttactgtcttttgtagttaataatcagcgtcgtcggccctgatctacatttgctatattagtgctggcatcgatcggtatcggcatatgtattagcgggtggtgttgatttgattttgtttattagttttgtgtttttctgccgatgtatcattgcgtgcattatcagattgttgatgtaacaccgacactggatcaaacaattcatgtttgtaaagaaattattaaattgtggttaggtt

SEQ ID NO: 775 - DNA, 1193 bp, Oryza sativa
  ref <308>: DATABASE ACCESSION NUMBER: AK058878
  ref <309>: DATABASE ENTRY DATE: 2001-12-06
agaagcaagaattcgatcgagaatcaccatgatgacaagtagaatgttttcggcaatgcagatgctgatcatggtggtggtggcattggccgggctagctgccggagcgcgcgccggcgacatcgcgatctactggggccagaacggcaacgagggcacgctggcgcagacgtgcgcgaccggtaattacaggttcgtcatcgtggccttcctgcctgtgttcggcaagggccagacgccggtgctgaacctggccggccactgcgacccggcgtcgaacggctgcaccggcgtgggcgccgacatcaagtcgtgccagagcctcggcatcaaggtcatgttctcgatcggcggcggcgtcggcaactacggcctgtcctcccgcgacgacgccaagcaggtcgcggcgtacctgtggaacaactacctcggcggcacgtcgccgtcaaggccgctcggcgacgccgtcatggacggcatcgacttcgacatcgagagcggcgggggcatgtactgggacgacttggccaggtacctcaaggcgtactcgcggcaggggagcagcaagaagccggtgtacctgacggcggcgccacagtgccccttcccggacgcgtcgctcggcgtcgcgctcagcaccggcctgttcgactacgtgtgggtgcagttctacaacaacccgccgtgccagtacagctcgtccaacggcgtgggcaacctggcgagcgcgtggaagcagtggacgtcgatcccggcgggacgggtgttcctcggcctgccggcggcggcggaggccgccggcagcgggttcgtggagacgagcgacctggtgtcgaaggtgctccccgtggtgaagaagtctcccaagtacggagggatcatgctgtggtcgcggtactatgacgggctcacggggtacagcgacaaggtgaagtccagcgtttgagctagccagggtaagctcgtgtcaggtcggcgttcgcgtagaatcacacgtgccgcgcgttccctgcaagatggagtagtttctacacatttcagaacaaagcaaacatgtacaataagatggccggcttgtatactcatttagaagcagaaaaaattgtgagaaatttacgtgtttggtgtgttctacagttcgagatgtgtcgattctattttcgcatgtggcatttgtggctgcttgctagacg

SEQ ID NO: 776 - DNA, 1183 bp, Oryza sativa
  ref <308>: DATABASE ACCESSION NUMBER: AK058879
  ref <309>: DATABASE ENTRY DATE: 2001-12-06
tataaaaggttctttcggcggactgctcttgagacatcggattttcttaaagacgattgcttaaagataaattgtactgtgggtgttgtggtatctactatggattactcaaagccacattcgatacatgttccagaatctgacataggctaccattttgggacactgttggacaatcaggagggtgtggatgttatatgtaatgtggcaggagaaaagtttcatgcccatcagttggtcttggctgcccgatcttcctttttcagatctgaactttttgagcatgaatcagatgaagagaagaatgaagttgatactagcaatgaaatcaaagagattgtcattgatgacatggagccaaaagtgttcaaggctgtgcttcattttatgtacagggacaatcttgttggtgatgatgagttgtctgcatcaagctcggactgctctatctttgatactttagctgggaaattattggctgctgctgacagatatgagttgccaagactacggttattgtgtgaatcttacttgtgcaagcatatttctgtaaactctgtggcaactaccctagcattggctgaccgacatcatgctatggagcttaaatctgtttgcctaaaatttgctgctgaaaatctttcagctgtaatccggaccgacgggtttgattacctcaaagacaactgccccgcgctgcaatcggagatactgaggacggtcgccgggtgtgaggaggaatgcagcagcggagggaagagccagagcgtgtgggggcagctctcggatggcggcgataccagcgggcgcagggtgaggccaagggtctgaacacccagccactgctatgccaaaagcggcttgttttaaagtgtaactgtgtaagcgaattgctgctgtacaaatgggacggctaattggtttgtggcgacatttaaaataatagcatcagtctgttatactacccctacattcgttcaaatttcaatagctggtttgggcagtagctccgcagatggaagggattatgtttagtgatctgagacagtgatgtgtagtcagtagtcagctattctagtttcgatttgcaatttataaacttcagtttttagcctgctgatctgactgaatagcgtgcatcgtatgctagctttcgtcacagatccaaagatcgaattgttgc

SEQ ID NO: 777 - DNA, 1363 bp, Oryza sativa
  ref <308>: DATABASE ACCESSION NUMBER: AK058880
  ref <309>: DATABASE ENTRY DATE: 2001-12-06
attctcccacgcccagatccaccgccccccgccttgcctcctccgcgtcgccgcgccagtgcgccccgcctcgccgccgccctcctcctcctcgtcgtcaggtgttatgtttttcatcactataaagtccaataaagtgaagagtgactctgcatagccagatggctgtggacagagatatctttggtatctcaggtccgacatatctgaatcctgttaattggaactgtgagcataatcggagatctgtggctgcatgcttagttcaggctgtatatgttttggagagggaccggcaactaggtcgtcaatctgttgaagccttgggacctccttggtgggaattcttccattttgagttgatccgcaagcttgtcgatgatgctgacttgtctattttcggtgcaatatttgaattcaatcctccttcaagtaaagaatcttctgctgataatgcaccgagatttgttattgccttcagaggcactataactgagaaggaaaccatctcaagggatatcgcccttgacctccaccttgtccaaaatggtctccatcggacctcaagatttacaattgcaatgcaagctgtccaaaacgtcgcctcggttttccctggctcaaacatctggctagctgggcactcactgggcgcaggtatggccatccttactggaagaaacatggttaaaaagggtgtgcttttggaaagctatctcttcaacccaccttttgttgccgccccaatcgagaggataagtgatgagagagtgaagcatggtttccgcattgcaagaagtgtaattactgctggattagccattgcaatgaaaggaaaaggcgaggggagcagccagaggtctgttgcagaagattctttccacattttgtcatcatggacgccatatctgtttgtcaatccaggagaccatatctgttcagagtacatcggctacttccagcatcggaagaacatggaggatctcggtgctggatttatcgagaagctcgcaacccaaaattccataggagatctgttttacaaggcattaggatgggaatcggaaccactgcaccttcttccatctgcagacttaattgtcaacgtaagcccttcaccggacttcaaatatgctcatggcatcagccagtggtggcagcctgagctgaacttgcagtgcagtaaatatcggtactctgtaggtgcatgacattggaaaaaatgtcttaggagacccttcttacactttcgtttattcattgtggttcgttccactctattgtagctgtcaatatgctgtaatagatgtttcttgaacctctgattctgttgacatgaaaaaaacttgtaatttcgtggagc

SEQ ID NO: 778 - DNA, 1013 bp, Oryza sativa
  ref <308>: DATABASE ACCESSION NUMBER: AK058881
  ref <309>: DATABASE ENTRY DATE: 2001-12-06
ctccgaagccctagctcctcccgccgccgccgccgccgccgccgccgcctctccactcgagagacccagccgccgccgccgccgccgccgccatgtcgctgatcgccggggaggacttccagcacatcctgcgtctgctgaacaccaacgtcgatgggaagcagaagatcatgttcgcgctcacctccatcaagggtgtcggccgcaggttctccaacatcgcctgcaagaaggccgacatcgacatgaacaagagggccggtgagcttacgccggaggagctggagcggctgatgaccgtggtggcgaacccgcggcagttcaaggtgcccgactggttcctcaacaggaagaaggactacaaggacgggaggttctcccaggttgtctccaacgcgctcgacatgaagctcagggatgatcttgagaggctcaagaagatcaggaaccaccgtggtctgaggcactactggggcctccgtgtgcgtgggcagcacaccaagacaaccggaaggaggggtaagactgtcggtgtgtccaagaagcgataagcctaagaaccacccgagacttgatgaagcgtttcgttgggtgatgttttgccctaggataatattttgcagctatggaaccttgtcgtaatgtatcttgaagagtgtctttgggaactaagagtaatttacttttcttgaaactattgcagtattgactccttgtttattgcttttctccactttcttctacccacttaaaactattgcagtatcgactccttgtttattgctattctccactggcttctgccttaattttggatgttgcatgcgctgtgtatctggttcatgtgatgtaccatggcagcttgatgcattgggattactttgtgctgctattctcattagagaacgcattagtctgatatggtagtttgatctgatgtagtggttaatgataaacttagggttaatgttatggatggtaataactggtaaataaattgtgagattttcttc

SEQ ID NO: 779 - DNA, 1039 bp, Oryza sativa
  ref <308>: DATABASE ACCESSION NUMBER: AK104011
  ref <309>: DATABASE ENTRY DATE: 2002-08-28
gtgcgcctctcgtttttcctcttctcccacctccgtcttcctcctcctcaatccccaaatcgaagcactcctctcctctcctctcctcagatcggatcgcgagagccccaatcccaccaccgatcgatccattcctgctgctcgcggccaccggagaaggagagagagagagagctcgacctcgtcggcgggtgaaggatcgcagcagcagcagcggcggtagagcaggaggagaggcgaagatgtcgtcggtgttcagcggcgatgagaccgcccccttcttcggcttcctcggcgccgcctccgccctcgtcttctcatgcatgggggcggcgtacgggacggcgaagagcggcgtcggggtggcgtcgatgggggtgatgcgcccggagctcgtgatgaagtccatcgtgcccgtggtcatggctggtgtgctgggtatctacggcctcatcatcgcagtcatcatcagcacggggatcaaccccaaggccaagccctactacctcttcgacggctacgcgcacctctcatctggcctcgcctgtggtctcgccggtctcgctgccggaatggccattggcatcgttggtgacgccggagtcagggcgaacgcccagcaaccaaagctgttcgtgggtatgatcctcatcctcatttttgccgaagcgcttgctctctatgggctcatcgtcggcatcatcctgtcatcccgcgctggccaatctcgtgcggattaggcatgtttcaacacgcaaacccttagtgggttcttgtttcatattcctgaaactacaagctgagctctaggggtttattctgtcttagtttctgttcttctgttgggtcatgaacaaaaaaacatctgtatccaagggatgtttgcccttgtggtgccattctttttcgctatggtggtgctggcggcggtctgaatcttatttatgcacagtttttttgggtctggctagacagtgatgtaatctggtgaataagcaaataattcgtaatgcaatgggagcatgagactcttttgttc

SEQ ID NO: 780 - DNA, 1019 bp, Oryza sativa
  ref <308>: DATABASE ACCESSION NUMBER: AK058882
  ref <309>: DATABASE ENTRY DATE: 2001-12-06
atgcaaatcacatacacataacgtgtgcgttgctgcaacatgaagatgaaggctctcctccccgtagccgccatgctgctcctcgtctccggccagctcgccgccccggtcaccgccgacggctacgtcggccagctcgccgtgttctggggccgccacaaggaggagggctcgttgcgcgaggcctgcgacaccggccgttacaacatcgtcgtcatcaccttctacaacgtcttcggctaccagcgcggcaggtacggcctcgacttctccggccacccggtcgccgccgtcggcgccgacatcaagcactgccagtccaagggcgtccaggtcctcctctccatcggcggccagggcggcgagtactcgctcccgtcctcccagtcggcctccgacgtcgccgataacctctggaacgcctacctcggcggccgccgcgccggcgtgccccgccccttcggcgacgccgtcgtggacggcatcgacttcttcatcgaccagggcggcgccgaccactacgagcagcttgcccggcagctgcacggccgcggcgtgctgctgacggcgacggtgaggtgcgcgtacccggacagccggatggaggcggcgctggcgacgggggtgttcgcgcgcatccatgtccggatcttcggcgacgaccagtgcaccatgttccccaaggacgcgtgggagaagtgggcggcggcgtacccgcggtgcacggtgttcctgacggtggtggcgtcgccggagcaggacgaggggtacatgttccagaaggatctctactacggcgtgcagcagttcatcgacaaggagcccaactacggagggatcgccatctgggacaggtactacgacaagaaagccaactacagtggtgagggctaatgcatcatgatcaatctctacctgctatatatctctctcaatatatgtaatgtaatgtaatgtaataatattcgaataaaatgaggtcacaaattatattataaatatggatcagacctcagatg

SEQ ID NO: 781 - DNA, 1144 bp, Oryza sativa
  ref <308>: DATABASE ACCESSION NUMBER: AK058883
  ref <309>: DATABASE ENTRY DATE: 2001-12-06
ctgcagggctgcgacgcctcagttttgatcaacgggagcaccaccgagagaagcgccggccccaacgcgagcctccggggcttcgaggtgatcgacgccgccaaggccgccgtcgaggccgcgtgcccgagcaccgtctcctgtgccgacatcctcgccttcgccgcccgcgacggcatcaagctcaccggcaatgtcgactaccaggtccccgccggccgccgcgatggcaacgtctccatcgcccaggacgccctcgacaacctgcccccacccaccgccacggcgaaggagctcaccgacaagttcgccaacaagtccctcaccctcgaggacatggtcgtcctctccggcgcccacaccgtcggccgctccttctgctcctccttcctcgaccgcatctggaacaacaccaccgccatcgtggacacggggctgagcccggggtacgcggcgcttctgagggcgctgtgcccgtcgaacgcgaacgcgtcgacgccgatcacgacggcgatcgacgtgagcacgccggcgacgctggacaacaactactacaagctgctgccgctcgacctggggctcttcttctccgacaaccagctgcgggtgaacgcgacgatgaacgcgctggtgacacggttcgcggcgaacgaaacggagtggaagcagcgtttcgccgacgccatggtgaagatgggcaacatagaggtgctgactgggggagccggccagatcaggctcaactgcaacgtcgtcaacccttcgtcgtcgtcctcgtcgccggtggtccagctggccggcgaggaggaggccgccgccgccggcgccgtcgcggcgagctagatgaccatatacacgtgttagccgttggatgcgaatgctcaattcgatcgcgtcattttgatcgatttcctttcctttttgacgtgcacgaacatctaaagttgcgtggactagtagtgtatatggtcgtgtcgatcttttcgtatacgtaacgtacagtagtgcaactgtacacgtactgtactgtacatacattttgcatattgtgcgtgtaatcttcgaatgttttagtcggttttccagtgatggataataatataggaaataataagtacgtacacgtatacgtaccatttgtgtt

SEQ ID NO: 782 - DNA, 1104 bp, Oryza sativa
  ref <308>: DATABASE ACCESSION NUMBER: AK058884
  ref <309>: DATABASE ENTRY DATE: 2001-12-06
atcgtgctcggcgtggtgaaggacaagatgcaggccaccatccgcaccatcggctccaccgtccgcctcttcttccacgactgcttcgtcgatgggtgtgacggctcggtgctgatcacgtcgacggcgggcaacacggcggagagggacgcgcccgacaacctctcgctggcgttcgagggattcgagacggtgaggagcgccaaggccgccgtcgaggccgcgtgccccgaccaggtctcctgcaccgacgtgctcgccatcgccacgcgcgacgccatcgccctgagcggtgggccattcttcccggtggagctgggcaggctggacggcatgaggtccagcgccagcaacgtcgccggcaagctgccgcagccgaacaacaccctcagcgagctcgtcgccatcttcaaatccaacggcctcaacatgtctgacatggtcgcgctctcagcggcgcacagcgtcgggctggcgcactgcagcaagttctcggaccggctgtaccgctacaacccgccgtcgcagccgacggacccgacgctgaacgagaagtacgcggcgttcctcaagggcaagtgccccgacggcgggccggacatgatggtgctcatggaccaggccacgccggcgctcttcgacaaccagtactaccggaacctgcaggacggcggcggcttgctcgcctccgacgagctgctctacaccgacaaccgcacgcggccgacggtggactcgctggcggccagcacgccggacttctacaaggccttcgccgacgccatcgtcaagctcggccgcgtcggggtcaagtccggcggcaagggcaacatccggaagcagtgtgacgtcttcaactgagaaaaatggcactacgacggcgacgactacggaccatttgtagattgtgtatacacgatcgattgaaaatgtgtgtgttgacacgtatataaattgcaaaggagtgattcgttgggtttgccagttttctgtttgtacatcgatcgatcggtcttgttcaattcgttgtgttaaaatatgtgtgtttctgcacataatttggattcaatgaagtaataagtgaataaatactacactatcaac

SEQ ID NO: 783 - DNA, 1040 bp, Oryza sativa
  ref <308>: DATABASE ACCESSION NUMBER: AK058885
  ref <309>: DATABASE ENTRY DATE: 2001-12-06
acgcctcacgcggcggagagagagagagagggtgaatttgctagcgagatgccggaagccgaggccgcggcggtggtcaccggaggcggcagccgcgccgccggccccgccgactacgagcgcttcatcaccctcttctccccggagggccgcctctgccaactcgactacgcgttcaacgccgtgaagctggccgggatcacctccgtcggcgtgcgcggcgacgactccgtctacgtcctcacccatcggaaggaggacaagttgcacgacccgacgaccatcacgaacctgttcgcgatcaccgaccggattgggctgctcgccaccgggatgccaggtgatggaagggcaatagctcaggaggcaaggaacgcagctgccgagtttcgcttcaagtggggatataaaatgtctccttgtatgttagctcaatggattgcagacagagcacagatccgcacccagcatgctcagataagaccttatggagttgtttctatgatctttggaattgatgaagagaaaggaacccccgagctcttcacatgtgatccagctggacaattctttgcacacaaggccacaagtgctggtccgaaagagaaggaagttatgaactttcttgaggaaagaatgaagagcaaaccttctctatcatctggcacaacaaaagggttggcaaaatctgcgttgaaacatgtcctggagggggatttctatgcccgagaatttgagcttggatttatcaagaaaggggatccaactgtaactctgcacccagtgaaattcaagcgcacgcggaggtgaaggacgagagcagaacaaagtgctcgatataggacgatcaccagtctttcaaatcttttacagcatggaagttatgcaaaaccattaccgctaactgattactgtacgctatagctatatgtatgactgcgctcaagctgtgtcaagtgtcaattatgagttgcccccggatttacgataccaactgatgatcacacatcaacacttcaaactgtaactgtctacgaagg

SEQ ID NO: 784 - DNA, 1316 bp, Oryza sativa
  ref <308>: DATABASE ACCESSION NUMBER: AK058886
  ref <309>: DATABASE ENTRY DATE: 2001-12-06
ctcgctcccgcgtcccaccaccaccctcaaagcagaccacacactgtgtcgctgtcacacacacaccgggccgagctgagcctgagcttgttcggcgatggccagggcggcgcacggcggcggcggcatggggcttctcgtggcattcgtggcgcttgtgggcgtcggcggcggcgcgagggcccagctgcggcagaactactacggcagcacgtgccccaacgcggagtccaccgtccggtccgtcatctcgcagcacctccagcagagcttcgccgtcggccccggcaccctccgcctcttcttccacgactgcttcgtcagggggtgtgacgcgtcggtgatgctgatggcgccgaacggcgacgacgagagccacagcggcgcggacgccacgctgtcgccggacgcggtggaggcgatcaacaaggccaaggcggcggtcgaggcgctccccggctgcgccggcaaggtctcctgcgcggacatcctcgccatggccgcccgcgacgtcgtctccctgaccggcgggccgagctactccgtggagctcggacggctggacggcaagacgttcaacagagccattgtcaagcacgtcctgcccggccctggcttcaatctggatcagctcaactccttgttcgccagcaatggcctaacgcagaccgacatgattgcgctttccggggcgcacacgatcggggtgacgcactgcgacaagttcgtgcggcggatctacacgttcaagcagcggctggggtacaacccgccgatgaacctggacttcctgcggtcgatgcggcgggtgtgcccgatcaactacagcccgacggcgttcgcgatgctggacgtgtcgacgccgcgggcgttcgacaacgcctacttcaacaacctccgctacaacaagggcctcctcgcctccgaccagatcctcttcaccgaccgccgctcccgccccaccgtcaacctcttcgccgccaactccaccgccttcttcgacgccttcgtcgccgccatggccaagctcggcaggatcggcgtcaagaccggctccgacggcgagatccgccgcgtctgcaccgccgtcaactagcttgtttacgtagtacttgcatatcatcttctgctacttaaaaagtggagtacttagctgggtaggatggtgaaagaaaaacacgtagtagtagtactacgattaattaatttcggccgcagatgcagggtgtttttttttcttttctttttatttttggtttctttttgttgtttatatgttttgtggtgggattttgtagccgattctttgagctgag

SEQ ID NO: 785 - DNA, 1011 bp, Oryza sativa
  ref <308>: DATABASE ACCESSION NUMBER: AK058887
  ref <309>: DATABASE ENTRY DATE: 2001-12-06
atccattcagagttagcaagctcttctaattcatatatagaactcagaatggcaggtgctcctcgaggactagttctcctcggcgtttgcgccgtcctgatggtgctcgccgtcagtggcgaagcggcgtcggtcgtcatcggcacggccaagtgcgccgactgcacccggaagaacatgaaagccgaggatgctttcaagaatctccaggtggcgatcaagtgcaagaacggcaatggcgagtacgagagcaaggccgctggaaagcttgacggctccggcgctttcagcgtccctctcgacaccgaccttcacagctctgactgcattgcccagctccacagcgcaaccaacgagccatgccccgggcaagagccatccaagatcgtgccattgtcggagggcacctttgtcaccgtcgctggcaagaccagctatccgtcggctttgtgtgcgtcggcgaccatctgcggccccatcaagaagaagatcatcgaccacttccataagaagccggtgccaccgaagccggatcccaagccagagccgcccaagccgaagccagagccagagcaccccatcctcgaccacttccacaagaaggagaaggacttctttgaccacttccacaagaagcccgtaccacccaagcctgagccaaagtcggaacccaagccacagcccaagccacagccagcgcctgagtaccacaaccctagcccaccagcgaagcactaaacattatctacgtttggtcttgtatgatttcgtgccatatcagtgtgtccgcagaataacgctttctacccccgtgtgagattatacattgaaatataatgtacttgctagctttcatccgcaggagttttttttttaaagtgtgaccgggttcatttattggatatcgcatgcatattagcagggcacgatgtgtactgtaatatctgcctgttgtttttatttctctacctaaatgaagttaaccacaaaggacaaacataaattcacatg

SEQ ID NO: 786 - DNA, 1405 bp, Oryza sativa
  ref <308>: DATABASE ACCESSION NUMBER: AK058888
  ref <309>: DATABASE ENTRY DATE: 2001-12-06
gattcccccatctctccgacagcgagcttcgtcgtcggctgtgcgcggccgcggcggcggcgctggtcgtgtgcttcccaaattctctcattccccagcgagcgatcaccatggggctccacaaggaggcgagctcgtcgtcgtcgcggctcgacgcggcgccgctgctgccgcaccacggccacggcggcggcggcgcggggcaccacctgtcgtcgcagcccaagacgttcgccaacgtgttcatcgcggtggtcgggtcgggcgtgctggggctcccctacaccttctcccgcaccggctgggtggccgggtcggtcctcctcctcgccgtggccgcgctcaccttccactgcatgatgctgctcgtcgcctgccgccgccgcctcgcctacgaccaccccaagatcgcctccttcggggatctgggcgccgccgtgtgcggccccgcggggcggcacgtcgttgacgccatgctcgtgctcagccaggccagcttctgcgtcggctacctcatcttcatctccaacaccatggcgcacctttacccggttggggattcgtcgccctcgtcgccgctcctcaccgccaaggcgatcttcatctgggtcatgctgccgttccagctggggcttaactccatcaagacgctgacgctcctcgcgccgctcagcatcttcgccggacccacggagatcctctacggcctcggcgtcgccgtctatgccttcgagggcatcggcatggtcctcccgctggaggccgaggccgccgacaagcgcaagttcggcggcacgctcgcgctgtccatggcgttcatcgccgtcatgtacgggctgttcggcgccatgggttacctcgcgttcggcgcggccacgcgggacatcatcaccaccaacctcggcaccgggtggctgtccgtcaccgtgcagctgggtctctgcatcaacctcttcttcaccatgccggtgatgatgaacccggtctacgaggtcgccgagcggctgctctgccgcaagcgctacgcctggtggctgcgctggctcctcgtcatggtcgtcgggctcatggccatgctcgtgcccaacttcgccgacttcctctccctcgtcgggagcagcgtctgcgtcctgctcgggttcgtgctgccggcggcgttccacctcaaggtgttcggcgctgaggtcgggtggcccgggctcgccggcgacgtcgccgtcatcgtcgtcgggaccgcgcttgcggtgtccgggacatggacatcgctcgcacaaatcttcagttcttccgatgtgtaagcggttgacagtaatgcagacaatgcgcaggcaacgcagctagtagctcatgtgtatacattgaatttagcagaaaagaacattcagctggcatgctgattttgggc

SEQ ID NO: 787 - DNA, 1116 bp, Oryza sativa
  ref <308>: DATABASE ACCESSION NUMBER: AK058889
  ref <309>: DATABASE ENTRY DATE: 2001-12-06
accgccccgaatccgcccccaaatctcctcgcgacctcgaaaccctagcctcctccggccaccgtcgccggccacggtgagcggccccacccccccgcagccatggcctccccggagggctccacgtgggtcttcgactgccctctgatggacgacctcgccgccgccgccggcttcgacgccgcccccgccggaggcttctactggacgacgcccgctcctccgcaggcggcgctacagccgccgccgccgcagcagcagcccgtcgcccctgccaccgcggctccgaacgcctgtgctgaaatcaatggctctgtggactgtgaacatggcaaagaacagccaacaaataaacgtccgagatcagaaagtggcactcgaccaagctccaaagcatgcagggaaaaagtaagaagggacaagttgaacgagaggttcttggaactgggtgctgtcctggaaccagggaagacacccaaaatggacaaatcgtctatattgaacgatgctattcgtgtaatggctgagctgcgtagtgaggcacagaagttgaaggaatcaaatgagagtctccaagagaaaatcaaagagttgaaggctgagaaaaacgagctgcgtgatgagaagcaaaagctgaaggcagagaaagagagcctggagcagcagataaagttcctgaatgctcgaccaagcttcgtaccacaccctccggttatcccagccagtgcattcactgctcctcaagggcaagctgccgggcagaagctgatgatgcctgtgattggctacccaggatttccgatgtggcagttcatgccgccttctgatgttgataccacagatgacaccaagtcatgccctcctgttgcataagtcaaagcaaagatcaatttgcctcgccttgtaggaaagaggtgaaactgccttccattcaagcccagtttggtcgtcagtgtttaaactacctagctaatcccaggattaaaccgaagcttcgctgtatcgaagtatcaaccggtgacatgtgaactgacgaaagatgacaccgttgtatattacatattagtaaataaattccatctgtccaattaaatgagaattagatgccatataatt

SEQ ID NO: 788 - DNA, 1009 bp, Oryza sativa
  ref <308>: DATABASE ACCESSION NUMBER: AK104012
  ref <309>: DATABASE ENTRY DATE: 2002-08-28
gtcaagcttcttctcttcctctccaaatttccaacctctccatccatccatcccgcatccgattcttccaaccaatctcatcttcttcctcctcctcggcggctcgccgattccccgacggcgatgaagatcacggcgctgctggtgctcaaatcccccggcgacggcgactcgtcgtcgggtggcggtggcggcgagcaggagcaggagcagcaggcggcggtggtggtggcgaacgcgaccgacgtgagccacttcggctacttccagcgcaaccccgcccgcgagttcatcctcttcgtcgcccgcaccgtcgccgcccgcacccccgccggccgccgccagtctgtccagcacgaagagtacaaggtgcattgctacaaccagaatggcctctgcgccatcgccttcaccgacgaccactaccccgtcaggagcgccttctccctcctcaacacggtgctggaagagtaccacaagacttttggggagagatggaggacagcaaaaactgataacacccagccttggcaatacctggatgatgccttgacaaaataccaggatcctgcagaggctgacaagttgctgaaaattcagagggatttggatgaaactaagattattcttcacaagaccatcgatagtgtactttctagaggtgaaagattggatagcctagtggagaagagttcagatctaagtgctgcttcacagatgttctacaagcaggccaagaaaaccaactcttgttgtacaatcctgtaatagaaactctggtatagagttctgcagtagcacactatgttggcattttctttgctgcaagtctgcgattaatgtcatagcatcctggtgtccgaggtgttaaacaaagttagcggttaacatatgccacagggctaccctacgtaattttttgtaagtaacacaagtgtggttgccattgagatgatctgtgcctggtactgtgtcaaagctataattagtgatgaaattgtgtactgtc

SEQ ID NO: 789 - DNA, 985 bp, Oryza sativa
  ref <308>: DATABASE ACCESSION NUMBER: AK058890
  ref <309>: DATABASE ENTRY DATE: 2001-12-06
tgtcagcaacccgggcgccgtggactacggcctccgccggttcgaccacgtcgtcggcaacgtgccggagctcgctccggtagccgcgtacatctccgggttcaccgggttccacgagttcgccgagttcaccgccgaggacgtgggcaccgccgagagcggcctcaactcggtggtgctcgccaacaacgcggagaccgtgctgctgccgctcaacgagccggtgcacggcaccaagcggcggagccagatacagacgtacctggaccaccacggcggcccgggggtgcagcacatcgcgctggccagcgacgacgtgctcgggacgctgagggagatgcgggcgcgctccgccatgggcggcttcgagttcttggcgccgccgccgcccaactactacgacggcgtgcggcggcgcgccggggacgtgctctcggaggagcagatcaacgagtgccaggagctcggggtgctcgtggacagggatgaccagggggtgttgctccagatcttcaccaagccagtaggagacaggccaacctttttcttggagatgatacaaaggattgggtgcatggagaaggatgagagtgggcaggagtaccagaagggcggctgcggcgggtttgggaagggcaacttctcggagctgttcaagtccattgaggagtatgagaaatcccttgaagccaagcaagcccctacagttcaaggatcctaggtaggaactggaggcctggagcaacagatgtaaccagtgtatttgtattatggagcagaagaaaaaagatgtgctttcactgctttgtgatatgtgtcatgcaagttgatgttgtaatttgtggaagctgaagacaaatgatggtacaatcactgtaatagataatagacatggatcacatacaagaatgtaacctagtgttggcattgctgctgtacaatcttgcttggaaataaaataataatcaacctggagaaagaatgt

SEQ ID NO: 790 - DNA, 1060 bp, Oryza sativa
  ref <308>: DATABASE ACCESSION NUMBER: AK058891
  ref <309>: DATABASE ENTRY DATE: 2001-12-06
aagtccaacggcatcggcgccatgcgcatctactccgccgaccgcgaggccctcgacgccctgcgcggctcgggcatcgacctcgccctcgacgtcggcgaacggaacgacgtcggccagctcgcggccaacgcggactcctgggtccaggacaacgtgaaggcttactacccggacgtcaagatcaagtacatcgtcgtcggcaacgagctcaccggcaccggcgacgcggcgagcatcctcccggccatgcagaacgtccaggccgccctcgcgtccgcaggcctcgcggacagcatcaaggtgaccaccgccatcaagatggacacgctcgccgcctcatcgccgccgtccgccggcgtgttcaccaacccatccgtcatggagcccatcgtgaggttcctcaccggcaacggcgcgccgctcctggccaacgtgtacccctacttcgcgtacagggacagccaggacatcgacctcagctacgcgctcttccagccgagctcgaccacggtgagcgaccccaacggcggcgggctgagctacacgaacctcttcgacgccatggtcgacgccgtccgcgccgcggtggagaaggtgagcggcggcggaagcagcgtcgtcgacgtcgtggtgtcggagagcgggtggccgtcggacggcgggaagggggccaccgtggagaacgcgcgggcgtacaaccagaatctgatcgaccacgtcgcccaaggcacgccgaagaagcccgggcagatggaggtgtacgtgttcgccttgttcaacgagaaccggaaggaaggcgacgccacggagaagaagtttgggctgttcaatccaagacaagacaccggtttacccaatcactttctgaaaaattactccaatacggaatatgtactacgtcgtacagtatatatcatgtgcttaatctggtgcttacgaatcaaaatctgttagaatttgtatgtgccagatgttgaacatgaacagtcgttgaacactcacccaccacatgtgcacatatgtacttttaaacaagctcatgtttcaattgtaacat

SEQ ID NO: 791 - DNA, 992 bp, Oryza sativa
  ref <308>: DATABASE ACCESSION NUMBER: AK104013
  ref <309>: DATABASE ENTRY DATE: 2002-08-28
atcgtcaggtcaggcacttcaccaaccctctgcctcccttccgccgccctccgccgccgcatgcaagccatcctcgccgctgccatggccgcccagaccctcttgttctccgccaccgcccctcccgcctcccttttccagtccccttcctctgcccgccctttccactcgctccgcctcgccgccggccccgcgggcgccgccgctgccagggcgctcgtcgtcgccgacgccaccaagaaggccgtcgccgtgctcaagggcacctcccaggttgagggagtcgtcaccctcacccaggatgaccaaggtcctacaacagtgaatgtccgtgtgacgggacttactcctggacttcacggcttccacctccacgagtttggcgatactacgaatgggtgcatatcaacaggaccacattttaacccaaacaatttgacgcacggtgcaccagaagatgaagtccgtcatgcgggtgacctgggaaacattgttgccaatgctgaaggtgtagctgaggcaaccattgttgataagcagattcctctgagtggcccaaattctgttgttgggagagcattcgttgttcatgagcttgaagatgatttggggaagggtggccatgagcttagtctcagtactggaaatgctggtgggcgacttgcatgcggtgttgttgggctgaccccgttgtaggtcgctgcaagttgcagctgaagtgtcagtatcgcatccatgtcaccctttttgtcatcttcgagcctgaggcagtcgttcttgtatcacatggatttcgcaacatggatgcttaatagtatctgttgatcgttcgtctcacagtaataaaatttagttgagcaaataagtgtcgtcacatcccctgttctccaccctgtcaaactataaattgtgaaacatgagctgttctgggtatacaacgcataaaaaaaaccatgtgttatacataacagccttgttgctggctgtacttt

SEQ ID NO: 792 - DNA, 1098 bp, Oryza sativa
  ref <308>: DATABASE ACCESSION NUMBER: AK058892
  ref <309>: DATABASE ENTRY DATE: 2001-12-06
aacgaataccctcacccctctctctctcgccccacccggatgcctcgcgctgccggaggctgacctcgccgccggcgactccgctcggccgccggagcagccagcgcgcgcggattttcgaatgtatcaggtcgactgagctgcggtttccttctgatccctgggacaaggtttccgattcagcgaaggagctaataaccgagatgctgcggcgcgatcctcgacagaggctcacagccaagcaggtcctagagcattcctggatacaagatcatgccgaccaatcccaagattcttgtggacattgccatgagatcaatctcagaggagaggacgccggctcatgttcgttctcgacgccgctggcgtcatgcagccgcgatgtgagcttcaacaccggtggcccggtcgcctgccaaagcatgtctgaagaagcgtgctcccccacattcgcctgcagatcatcgttctctgcatttgtcgctgagaatgctccgtcgtgcgcgctctcggggttctccttcggtggcgtctgcgaaccctgcaacgccgtgttcccgtccccggtcgcttccatgccgagcttctccttcttctgcggccaagaacccggcgagcctgagtcgtcgcctgatggtgacgccttgggcgagaaagctcactgcgacgcgacggtggtggccctcgtctcgtcctcggctccgaggacagcggaggtcctgagggccgccgtaagggcgaacccgtcgcgcgccatcggcatgaacagcaggaggaaccacaccatcggcgccggcgagcgcgagcacctggatgtggcggtcgccgagtcggtgatacggtgggcgtcctgcaccaacctgtcgacgacgcactcgctccgggcttcgctggtgtgctagcattttgtttatctgtgcaattcaccatgtgtcctgtggctgtgagagtgcttcgctagtctcttgccttcctccttgcacctgcgatgcaagctgaaagataagagtgagatgagtgatgagatgagatgagagtgtgagtggtagaatgtaacgtggacctgatgatatataatgctatagtagattaccgagt

SEQ ID NO: 793 - DNA, 1007 bp, Oryza sativa
  ref <308>: DATABASE ACCESSION NUMBER: AK058893
  ref <309>: DATABASE ENTRY DATE: 2001-12-06
aagcaaaaaaattattcaagaaacatcatagagccagagctagagcatcacagagaaagaagaacttgctcccaataaactatccatgcttcttgcagagatgatgaacagctcagtgctgttcttgccaagctcatccctgttcctcacaaagcagctggtacctgcaaccaagggcagagcatcagcagcagctgctgttaggtgcagcagtgggcccaatctgtcagaagcacatgaggaggaggatggtgtagcctccttgatggggaggaggcatgcaatggcttctgctgctgctgcctgtggagtttcagtgtttggttttgcaggtgagagcatggcagtgaagcagggccttctggctgggcggatccctgggctctctgaccctgatgaaaaagacaggttggagaacatatcgtaggccagacgacaagtccggtggacatggagttggatggagcccaatcattccctacagcttcaaagttcgtgatggctgggaagaggtcccggtgtcgattgctgatcttggtggcaccgagatcgacctgcggtttgcgaattccaagcagggacgtttgttcgtcgttgtagcaccggttcgcaggtttgcagaactcgacgatgcgacaattgaaaagatcggtacaccggagaaggtgatcgacgccttcggaccagaggtgatcggtgaaaatgttgaagggaaggttttgtccatggcaacagcagagtattcaggaagaacttactaccagtttgagctggaaccacctcatatcttcatcactgcaactgccgctggaaacaggctctacctgttcaatgtaactgcaaatgggctacaatggaagaggaattacaatgacctgaagcaaatagctgaatcatttcgtgttgtctagggtttaaataaattgctcacgatgtatctgtttatgtgcataccattagagaaaatgaggtgctattatacagactgcagaggggcaatgagtaag

SEQ ID NO: 794 - DNA, 963 bp, Oryza sativa
  ref <308>: DATABASE ACCESSION NUMBER: AK058894
  ref <309>: DATABASE ENTRY DATE: 2001-12-06
ggcttcctcctccaccatccatccatccgcgcgcggtgcgtagtagcgagaagagaagggggggagggcaaagcgatggctccgatgaagctgtacgggtcgacgctgtcgtggaacgtgacgaggtgcgtggcggtgctggaggaggccggcgccgagtacgagatcgtgccgctcgatttctccaaaggcgagcacaaggcccccgaccacctcgccaggaacccctttggtcaggtgccggctttgcaagatggtgacttgttcctctgggaatcacgtgcaatttgcaagtatgtatgccgcaagaacaaaccagagctgttgaaggatggcgacctcaaggagtcagcaatggtggatgtgtggcttgaagtggagtccaaccagtacactcctgcactgaaccccattctttttcagtgcctaatccgtccgatgatgtttggggcaccccccgacgagaaagttgttgaggagaaccttgagaagctgaagaaggtgttggaggtgtacgaggcgcgcctgacgaagtgcaagtacctggctggagactacatcagtgtcgcggacctaagccatgtggctggcactgtatgcttgggggctactccccacgcatccgtgttggacgcatacccgcatgtgaaggcctggtggactgacctgatggcaaggccgtcttcccagaaggtggcttcactgatgaagcctcctgcttaaggtagttgttctaggcacaggtttgtcgtccatggtccacagaataagctgaggtgtgcccagttggttgctcgtttaaggatttgtgttattatgtgtgtcctggatgttgaatgttcaagcaatcaggattgtgttgttatgctgcatatgatccaacctaagtcttgtactgctatgagcattcttgtgctctggccttcgctcttgagaaccttataataaattctgcttttagtc

SEQ ID NO: 795 - DNA, 1051 bp, Oryza sativa
  ref <308>: DATABASE ACCESSION NUMBER: AK104014
  ref <309>: DATABASE ENTRY DATE: 2002-08-28
atcgctgcaggaggaggaggcggcggaggacggcgagcggtcagtggcggagaggggagtgttcggggacgcggggtttgcgaggtggggggagctcttgcgcctcggatcggctcacttcccgacgcctcagcccccgccgcgccgcggattattgctgttaggttaaagggattgtggtagcgagaagcggtggggttgatggagtgcgtggtgcaggggatcatcgagacccagcatgttgatgctcttgaggttcttctccagggcctctctggtgtcccaaaagaacgtgtcagagtgcatgagctctgtcttaaaagtgggccaaatctaggagttgtcccatcagaggttcgtttattgtgtgacttagctcagtccacgccatcctggaccataagacatgttggaggtgccatgagaggtgctggtgcagagcaaatctcagtccttgtgcggtcaattgtagagagcaaagccagcaacaatgtattgcgttacttctacggtatagggtacaagttagatcatgaagttctgaagggaggatttgcatttcgtttccaccgaggtgcccagataactgtgaccgttacctctgttagcaagatgacaaaactccatgctaccaacgaagctgtgccaatcactcctgcaatacagctagtggaaatcacggcccctgctgctgctgacaattacaacgatgtcgtttcagccgtcacttcgttctgtgaatatctagcaccgcttctgcatctctctaaaccaggcaattcgactggaatcgtcccgactgcaggcgctgctgccgcctcactcatgtcaagtggtggtggtggtggtggtaaaacgttgtgatcggtcatatgtgttggctgcaatgccatgatgatctccattgaccatcccacttaaaacattgttgccatctttagttctgtaacttttagtcagtagcaccatggtttttcttgtaatgacatgctaaatgctgcctaccttgctttggagactggtaaatgaacactgatcattgcttgctttt

SEQ ID NO: 796 - DNA, 969 bp, Oryza sativa
  ref <308>: DATABASE ACCESSION NUMBER: AK104015
  ref <309>: DATABASE ENTRY DATE: 2002-08-28
actgctgagcagtgagcacaaatcacagacacaaatggaagcagcagtggctactccttccttgctcttctctagcccaacccccaggaggccttcctcctgcttgcctcctcctcctccttgcagcagcagcagcagcagctacgcctcccatggtttcaagctgctgcagccgcagttgctgttcatcaatcggctaaccagcagaaacagcaacgggagtagcagaagaagcatttccattttgtcgctgaggtgctcttccagtggcactgacagcgcgtcttcttccgccacttcagaaagatgggttctcgagcctgcaggagacggcgattggcgtcatatcgggtaccgcgtcgcacgacccggcggcttccagatagcatccgaggcggcggtgacggtgggtcgggttcctgaacaggctgacatcgtcctgtctgtcgcaacagtttctgggacgcacgcacggctggagaagaaagaggggagcttgttggtaacagacctggagagcacgaatggcacctacatcaacgagaggcgcctcaccccgggtttccccactcctatcgatcccggcagcctcctcatctttggtgacatccacctggccatgttccgtgtctccaagatgatcgtcgatgtgtccagtgacaccaatgaagctgagcaggaagctgagacggctcaagtatcagcggcaactcaacaaaccaattagcaacctccctcttgccatctactgcttaatgctgaaggcaagcagctcaagaagcaccagctgttacccaatgcctgacatgaagcgcatgttacgaacgacagagtttctttgcaaataagtgcatacagatgttgtgtgataggaatgtcatctcatctgtattatctaaaaataatgaacgtcatctgtagccattaagaaaattcacgaagcaacaactctgcatatcaatagagagc

SEQ ID NO: 797 - DNA, 1026 bp, Oryza sativa
  ref <308>: DATABASE ACCESSION NUMBER: AK058895
  ref <309>: DATABASE ENTRY DATE: 2001-12-06
aaagcagacaaggtagtagtacaggcttttgtacgtacgtagcagagggagttcccaagatggctggggcctctgccaaggtcgtcgcgatgctgctctccgtgctcgccacgtacggcttcgccgccggcgtcgtctacaccaacgactggctcccggccaaggccacctggtacggccagcccaacggcgccggacccgacgacaacggcggtgcgtgcgggttcaagaacaccaaccagtacccgttcatgtccatgacctcctgcggcaacgagcctctgttccaggacggcaagggctgtggcgcctgctaccagatacggtgcaccaacaacccgtcgtgctccgggcagcccaggacggtgatcatcacggacatgaactactaccccgtggccaggtaccacttcgacctgagcggcacggcgttcggcgccatggcgaggccggggctgaacgaccagctccgccacgccggcatcatcgacatccagttcaggcgcgtcccgtgctaccaccgcggcctctacgtgaacttccacgtcgaggccgggtccaacccggtgtacctcgccgtgctggtggagttcgccaacaaggacgacacggtggtgcagctcgacgtcatggagtcgctccccagcggcaagccgacgcgggtctggacgcccatgcgccgctcctggggatccatctggcgcctcgacgccaaccaccgcctccagggccccttctccctccgcatggtcagcgagtccggccagaccgtcatcgcccaccaggtcatcccggccaactggagggccaacaccaactacggctccaaagtccagttccgttgatccatcgatcgatctacctatgtgcatgcaatgccttcgtcgtcttgtgtcgccggtcaagaacgaattttgattctaccgatcggcagttcggcactagtactgtactacgattctgtgtgtgtgtgtgtgtgtgtgtgtgattgcaatgcaaattgcgaacggatcaattaagagcgtt

SEQ ID NO: 798 - DNA, 1062 bp, Oryza sativa
  ref <308>: DATABASE ACCESSION NUMBER: AK104016
  ref <309>: DATABASE ENTRY DATE: 2002-08-28
acacgcgcacacgacacgacgcaccaatggcgctcgtctccgcctcctcctccaccaccgccgtcgcggcgctccccggcgccgccagggcctcctccttcctcggcggcgccggcaggagcggcaggctgctgctgaggcaggccgagtcgtcgtccgcgcgggcgtcgttcgccgtgcgcgccgcggcgcccgacaggccaatctggttccccggcagcaccccgccgccgtggctcgacggcagcctccccggcgacttcggcttcgaccccctgggtctcggatcggacccggagagcttgcggtggaacgtgcaggcggagctggtgcactgccggtgggcgatgctgggcgcggcgggcatcttcatcccggagttcctgaccaagatcggcttcctcaacacgccgtcgtggtacaccgccggcgagcagcaatacttcaccgacaccaccaccctcttcatcatcgagctcatcctcatcggctgggccgagggccgccggtgggctgacatcatcaagcccggctgcgtcaacaccgaccccatcttccccaacaacaagctcaccggcaccgacgtcgggtaccctggtggtctgtggtttgacccgctcggctggggcaccggctcgccggagaagatcaaggagctgcgcaccaaggagatcaagaacgggcggctcgccatgctcgccgtcatgggagcttggttccaggcagagtacaccggcaccggccccatcgacaacctcttcgcccatctcgccgaccccggccacgccaccatcttccaggccttcacccccaaatgaggagttcttcaggtgttggagtgttagcaatggctgccaatggaggaagatgaaaagactgttcgtcgacgcgacttacctctcttttttgggatcggagtaggctgtgaatggtggtggtgtattgggatgtaattgtggatggagcactgcatgccttgttgattgtgtacctgtactatgatgtaaccgatgtaaaaaacaagttgatactcttttagaagtgaagttctcttcatcactg

SEQ ID NO: 799 - DNA, 1104 bp, Oryza sativa
  ref <308>: DATABASE ACCESSION NUMBER: AK104017
  ref <309>: DATABASE ENTRY DATE: 2002-08-28
acagcttccactccacgaaaaccctctgcctccttcgctcgctgcaccctcgtctcggcgatccatccatggctgccaggaagttcttcgtcggcggcaactggaaatgcaatgggacaggggaggacgtgaagaagatcgtcaccgtcctcaacgaggccgaggtgccctccgaggacgtcgtcgaggtggtggtgagcccgccgttcgtgttcctgccgcaggtgaagggtttgctccggccggacttctccgtcgccgcgcagaattgctgggtgcgcaagggcggcgccttcactggcgagatcagtgccgagatgttggtgaacctgcaggtgccttgggtgattctgggacactctgagcggagagcgctgatgggcgaatcaagtgattttgttgctgacaaaattgcgtacgcactttcccaaggtatcaaggtaattgcttgcattggtgagacccttgaacagagagaagcaggaacaacgatggaagttgttgcagcgcaaactaaagctattgcagagaagatatccgattggaccaatgttgttttggcatatgaaccagtttgggccattggaaccggcaaggttgcaacccctgctcaggctcaggaggttcatgatggtctgagaaagtggcttgtgactaatgttagtcctgcagttgctgaatcaaccaggattatttacagaggctccgtaaatggagcaaactgcaaagaacttgctgctaaacctgatgttgatggattccttgttggaggagcttcattgaagcctgaatttgtggacatcatcaagtctgctaccgtcaagtcttctgcttagtgttctgggttgcaaccagatgatcgtaggagttaatgctgccaattttaagttatgacatgtttgaccagcttgctttgttatatctcgaagtcagtgaactccatatcgttccatagagcatgcagccacctgtggttgctttttttctttttgactttttctcccgagaggatcagatgaactgaaagtgccgttaatgtctgtattatcagaagtttgttgatggcttgatgctataatagttgaacctgatacttcctgagtg

SEQ ID NO: 800 - DNA, 840 bp, Oryza sativa
  ref <308>: DATABASE ACCESSION NUMBER: AK058896
  ref <309>: DATABASE ENTRY DATE: 2001-12-06
atcgatcgatctcacctgcagcagcaaacgagcaccacacaccagcagcagcagcaagtcgatcgatcgtcagcacacacgaccaagatcgagatggcccgtgcacagctggtgttggtcgccctcgtggcagcggctctgctcctggcgggcccacacaccaccatggccgccatcagctgcggccaggtcaactccgccgtgtcgccctgcctcagctacgcccgcggcggctccggcccgtcggcggcctgctgcagcggcgtcaggagcctcaactccgccgccagcaccaccgccgaccgccgcaccgcctgcaactgcctcaagaacgtggccggcagcatcagcggcctcaacgccggcaatgccgccagcatcccctccaagtgcggcgtcagcatcccctacaccatcagcccctccatcgactgctccagcgtgaactaatctgatcgatcgatcgctaccggccggagggtgtgacatcgcaggccgtacatgcacctgtcgtcgtctcacgctttgtatcttgtgttatctgtgtttatgctgaataaaatgagagctagctagctaggtcgatcgatcgatcgccatgcatgacgagactagctagcattgctgctagatcgatgcatgcatatggttgatcgcccggtcactacgctatctgtttccttaatttattcgtcgatcgactacgtacgtacctgagagctagagatcagtttttgtaccatgcatatgcatatgaacttctgcatgtacatgcagtactacttgtactacgtgcgtgtacgttgtggattatacattatatagacagcttcttttggt

SEQ ID NO: 801 - DNA, 997 bp, Oryza sativa
  ref <308>: DATABASE ACCESSION NUMBER: AK058897
  ref <309>: DATABASE ENTRY DATE: 2001-12-06
ggagcagagactcactggagaccaaaccctagctgccatggcaatggcgacgtcgatctccgccggcttcggcggcgagcccggcgcggtgctcgccccgtccgcctccgtcctccccgccccgcgccggcgcaaccccgccaccagctccaaggcacagtttagttcatttcctcgtggacgatcttgcaacatcatgcttactcctaagcatctaggcattgagcaccaaagctgttcaaagagctccattcagacttttgctctttcaaggaatgacttctctcctattgctcaagaggtggaaggctttcttcacaacattgttaacatggggtttcttgatcgtctgaaattagcatggaagataatcttcccagcaccaagcattaaggagaactctaatgcaaacatcgcaaagcagaggcttaagatgatactgttctccgacaggtgtgaagtgagtgacgaggcaaagaagaagattgttgagaacatcgttgaggcactctctgaattcgtggagatagaatcacgagacaacgtccaggtggatatctcaactgatgctggccttggcacagtatattctgtgaccgttcctgttcgccgtgtcaagcctgagtaccaggaatctgaagagcagtacagagggaagatcgtaggtgttgacttcaaggacactggagaaacatcaggcagcgtcgacgttacgttcgatttcttcgtgcccaacaagaactactgaccgttgtattccccttttgcttccgagtatcccagaactccttggttagaatgttcaatttgttgaaggctttcttcgcaatcttggttagtctaatgtacatatctaggcttttgtttgtctctgcgtttcatgtaattttattttgaatttttgttctgaaggtggcaaatatcagtaccgtggggttagtccaacttggattttccgaagaaatgtttatttataagaaaataacgttgtgcgctg

SEQ ID NO: 802 - DNA, 927 bp, Oryza sativa
  ref <308>: DATABASE ACCESSION NUMBER: AK058898
  ref <309>: DATABASE ENTRY DATE: 2001-12-06
aaaaagtctcaaaccaagagacaacaagtcacaatttctcatagacaagtagctatctatctctatctagcaagctagctaggttgcttgcattctctcctctctctcttcctgtgtcaccaatggcgccggcggcgtcctccaagtccaacccaagggtgttccttgacatcgccatcggcggcgagtgggttggccgcgtggtgatcgagctgctcgccgacaaggtgcccgacacggcggagaacttccggcggctgtgcaccggcgagcgcgccgggcgctccggcaagagcaggctccactacaaggggtcggcgttccaccgcgtggtgcccgggttcatgtgccagggcggcgacatcacggccgggaacggcaccggcggcgagtcggcgctggacggcgccgcgaggcacttccccgacgaggggttcgcggtgaagcacgacgggcccggggtggtgtccatggcgaacgccgggcccaacaccaacggctcccagttcttcatcaccgtcgacaaggcgccgtggctggacggccgccacgtcgcgttcggccgcgtcgtcgccgggatgggcgccgtccgcgccatcgacaggacgggaacctggagcggcaagacggtgaagcccgtcgtcatcaccgactgcggcgtgctctagaaatacatatacatacgtatatatgccagtgtataccgtatacgtacgtgtaccggtgtacgtacgtatgctgtacggttcggtatacattaaaattgtgtctactctagctactgtgtgatgagcgtatgagagtgttagctgatgtaattttttgaggttgcgacatggtggttacaaactatcgaggacgttagctgcctcactgatggtgacttaatctagctaccagataataaaattgagtgattgagcacat

SEQ ID NO: 803 - DNA, 1221 bp, Oryza sativa
  ref <308>: DATABASE ACCESSION NUMBER: AK104018
  ref <309>: DATABASE ENTRY DATE: 2002-08-28
aacaaaaagacattcgctttcgcctcttctccccctctcctctcctctcctctctgcgtgtgcatctctcgattccgatgccgccgccgctcgaagcgcgagactacatcgggctcgcggcgtccccggcctcgtcctcctcctcctgctgcgcgtcgacccccgtcgccgaggtcgtcggggcgcacctcgcgctccgcctcggcctcccggggtcggagtcgcccgcccgcgctgaggcggaggctgtcgtcgtcgacgccgcgctcacgctcggccctgctcctcctcccaggggcggcgccaagcgcgggttcgtcgactccctcgaccgatccgagggccgtcgtgctgctgccaccgccggtgatgatgagaggggcgtgagggaggaggaggaggaggagaaggggttgggggaagctgctgctggagctccgcgagctgccaaggcacaagttgttggatggccacctgtgcgaagctaccggaagaatacattggccgccagtgccacaaagacaaagggggaagaccaaggcaaaagtgaggtaggatgttgctatgttaaggttagcatggatggagccccataccttaggaaggttgacctcaagacctattcaagctatgaagatctttcacttgctcttgagaagatgttcagctgctttatcactggtaggagcagttcacataaaacatcaaaaagagacaggctgactgatggttctagggctgatgcccttaaggaccaagagtatgttcttacctatgaagacaaggatgctgactggatgcttgttggtgatcttccttgggacttgtttactactagttgtcggaaactgcggatcatgagaggttcagatgctgctggaatggctccgagatcactggaacagacaggtcagaacaaatagttgcccgagctttcatcatctggacagcaaatgtgtggaccaagtttgctgtagcaagtttccgctgaggggtgcagtgttttacctgaagtatctccgctattagtttatttacgtgtgtagtgaaatctgtggcgtattgtaaaacagccattttgcctacgaggttgtcttgtgtcaatctgtagatggtcgattttgtctttgaaagatcaagtcaggctgcttaatgcttcctgtgtgatactttcatcaattctctcatatatatattatctggagttgcacttgatattgt

SEQ ID NO: 804 - DNA, 902 bp, Oryza sativa
  ref <308>: DATABASE ACCESSION NUMBER: AK058899
  ref <309>: DATABASE ENTRY DATE: 2001-12-06
gtagcggcgacgcggcgcggctcaacttccccgacaacgccgcctcccgcggcccgctccacgcctccgtcgacgccaagctccagacgctctgccagaacatcgccgccgccaagaacgccaagaagtcctctgtctccgcctccgccgccgcaacatcctccgcgcccaccagcaactgctcgtcgccgtcctccgacgacgcgtcgtcctgcctggagtccgccgactcgtcgccctccctgtcgccgtcctccgccgccaccacggccgagacgccggcgaccgtgccggagatgcagcagctcgacttcagcgaggcgccgtgggacgaggccgccgccttcgccctcaccaagtacccgtcctacgagatcgactgggactccctcctcgccgccaattaacaccaccaccacttcttggctagtactcacgccgtcgttagcctaatcgtcgccgccgccgccgccgtgcagatgggattttagacattctgcaccgcacggacgggcatggattagcagttttatagtccctaatccttttggtttggttcgtttgtgtacgtagatcgatctctctccggacttgtttcctctgtagatgctagggttggttggtgttcttcctcaaccggagacgccgatgctaccggcagccggcgtttttgtgtccggcgtgcgtctccggtggccggtcactggtcggttactccggccgtggcgtccattgctcttctaaagtctgttattaccttctactgctgatcttacaggttgtaaacagtagtagtagcattattattattattatgtcttgtaatattattagcgtgttataagaacttgtaatgtgaattacctctactactactattattattatttagcgtcgttgtt

SEQ ID NO: 805 - DNA, 972 bp, Oryza sativa
  ref <308>: DATABASE ACCESSION NUMBER: AK058900
  ref <309>: DATABASE ENTRY DATE: 2001-12-06
aaagctaccaccaggcacgtacaacacacaccagctaagctccaattaaagactcctccttgtttgcgcacgctcactcgcgcagccgaccagtggccgtgagctcggatagctgagaagatgacgccggtgaaggtgtttgggccggcgcaatcgacgaacgtggcgagggtgctgttgtgcctggaggaggtcggcgccgagtacgaggtcgtcaacgtcgacttcacggtcatggagcacaagagccccgaacacctcaaacgcaacccgttcgggcaaatcccagctttccaggacggggatctgtacctctttgagtcccgcgctattggaaagtacatcctacgcaagtacaagacgagggaagctgacctactccgggaaggcaacttgagggaggcagccatggtggatgtctggaccgaggtggagacacaccagtacaactcggcgatttcaccgattgtgtacgagtgcatcatcaacccagccatgcgtgggatcccaactaaccaaaaggtcgtggacgagagcgcggagaagctgaagaaggtgctggaggtgtacgaggcacgactgtcacagagcacgtacctcgcaggtgacttcgtcagcttcgccgacctgaaccacttcccctacaccttctacttcatggggacaccgtacgcgtcgctgttcgactcgtaccctcatgtgaaggcatggtgggagaggctcatggcgaggccgtccgtcaagaagctcgccgcggtcatggctcctcagggggcgtaggcgtgaggacgacctgaaatcctgaattcggtggatggccaatcggatagttctcttcttgatgattatcctgaatcttgctgtggctttcttaatgttttcgcgcatgtgcaatttgattaaataagacagcagccgaattgcatgactgtgcaattttcttggcggttcagcatgttcggtttcttgtct

SEQ ID NO: 806 - DNA, 1383 bp, Oryza sativa
  ref <308>: DATABASE ACCESSION NUMBER: AK058901
  ref <309>: DATABASE ENTRY DATE: 2001-12-06
gacgtttccagtttcccttccttccttcctccgcgtcgcttcccttccttcgcgcggcgctgctccggtagggttttagccggcgatctctcccctctcgcgcgctcggcgactgagaatggtcgaggtggaggaagtcagcaacaagatgcaggtgcagatgcgcctccaccccgccgcggcggcggaggaggaggacgccgacctccagctcctccctcgaccaggaagggatccgcaagggggtcgacctgctgcggcggtgcgacgagatggtcagtaaggtcggcctcttctcctccaacgagaccaaggatgacatctccaccgccaacctcaaatacctactcgtaccgtactaccttggggaaatgactgaaagggtagcgcaggaagatcggatcccagtccttaaggcgtcgcaggatcatttgaaggaattcatttctatctgtgaagcactggagcttatatcagaggatgagcttgaaatatctaggcagaagcaacctgataccatggcaaatcgaagagcacagaaggttgcacggttcaagcgccaaaaggctgcagaaacaaagctcctagaaatcaaggagaggaaagaaaggcgtaggcggtcattgagagcagctgctttatcagctcctattgaagctggggaggaagatgcttttgaggatgatggagaggaagaaagagaggcatggttagctactatctcattggctctatgcaaggcttttgaccttcttgacatgttaaagaaggaagaagaaatgcttccggcagtaaaagaaaggaaagcgaaggatggtaatgcatttgctcgtgaaatgcttgatgaacgtacaaaaagggctgaagcatggcaccataatgctgccaaccgtgcaccatactccaaaccagctgatccaatcacttgtgcaacatttgctcaagatgtcattgaaggtagagcaagtgtttcacaagcacatgagcacaaacaccagccgctgatatttggccctgcaagtcttgttggtggaggactaaccagtgaaagagagagaatggcagcacaagtttttcagccaagttataggttgccaacgatgagcatagaagaagctgactggaaggacgataaccctcgtggtgcaggcaacaagaagctcactccctgtggctaaattatatgctatggcaattctattgaacttacatctgaaactgaagctcgtgtaaaaatatgtggtttttactaactttccttactgcggcatttgttgattgctgagtaataatgtgttccatatgtatattataattgtgcatggtttccttctgccaatatatgggcaaccaagtaatgccagaaaagctgatttgagaagc

SEQ ID NO: 807 - DNA, 1013 bp, Oryza sativa
  ref <308>: DATABASE ACCESSION NUMBER: AK058902
  ref <309>: DATABASE ENTRY DATE: 2001-12-06
taggtaggagtagatcgatcgagccagtcgcccagtgctgctcctgcagcgatggcggaggcagccgggacgagggcttcacagcagcaggaggaagcagctgggattgagaacggaggaggcaaggaccagctgccagaagatacaagtaagttaaacataacagtcctctggcttgcaatctactttaggttgatggacggcttcgggaagctggcacttgcctgggccaccgttgtgctgctaggtggattctccaccctgataaagcccaaggacttttggttcgtcaccatcatcgtggtcatgcaaataacaaggtgcgtatcaatacgacatccctatatatataaagtagaagttaactaaactgctaattagtttccgtttccaccatcaattgatacataggaaaagtgctggcttgttcttgggcactcgatcacaagagaaaaattgggcgtcccatggctacaggcagtgcccctctttcactgtgaatagcctgcacacgccagcccctctctctcctatgcatgcatgcatgtgtgtgtatcgctctaacgagtttcaaatattttcccttaaattagttattatctcacatatgatccaattacacccatatttattaaattactagaaaaaatatccatgcgttgcaacgggaaaataccttaaatcacttagatccgtactttcctttctcaaaacttcggcaaactcaatttgaaaatttgaaagcgaattcaactttcccttttgaattactttcttcttttactagtctccccttgtttaaaattcgtttaaattctcgtatatcaaaattcactaaagatacaaaagtccatataatcacacgttgtgaccgatgatggatgaaaaacggaagcccattaagatttttctacaaagtaggtggtgaagatattccaggagaaaaacaagataaaaagaggagaaaagagaggagattgaaaggagagggagataatcaagattatcggcac

SEQ ID NO: 808 - DNA, 414 bp, Oryza sativa
  ref <308>: DATABASE ACCESSION NUMBER: AK058903
  ref <309>: DATABASE ENTRY DATE: 2001-12-06
gtgatattgtaaagaagcagcttgtacttcctgaaggcactgacgttactggtgcctctaagttcaccgatcttggtgctgattccctggatacggttgagattgttatgggtcttgaagaggctttcaagatcagtgtcgatgaatcaagcgcgcagtcaattgcgacagtggaggatgctgctgagctcatcgacaagattgtttctaatgcaaagtaaactcaatttcgttggaataatgtgtcaactgtcaaagagattaaactgctgttgttgttcgatgtccatttttctgtgctagattttactgtggagaggtgccttaatagcacatgattatcattggctgttttgcgatgctatgacattttaagctattgaagttgttgaaaaagaaatttcattgccgagg

SEQ ID NO: 809 - DNA, 379 bp, Oryza sativa
  ref <308>: DATABASE ACCESSION NUMBER: AK104019
  ref <309>: DATABASE ENTRY DATE: 2002-08-28
ggatgcagacagcattaggattcacatactttctgaaaccagtgatattgagtcattagagaagatggtcgatgattctgaactggggcatggcccctcgcctttatcatgaagggcattaatggtaaaacataactgagcaccttggtggatagctggtgctgctctgagttttgagtcatcgaagaagagttccaggatactcagctggaagttttgtaaatcctattaggattataacttgtggcagtatctccaacctttctattattacttgagctggcaaaagtgttgtttaagagcctggtagttatgagttatacaaagcgagaatgctgattgaattaattatacatattttaagtttttgtttcgactt

SEQ ID NO: 810 - DNA, 1136 bp, Oryza sativa
  ref <308>: DATABASE ACCESSION NUMBER: AK104020
  ref <309>: DATABASE ENTRY DATE: 2002-08-28
actgcaactcagcagcaagcaagctaactccattttgctttgcattgccaccatgagagcgctcgccgtggtcgtggtggccacggcctttgcggtggtggccgtgcgcggcgagcagtgcggcagccaggccggcggcgcgctctgccccaactgcctctgctgcagccagtacggctggtgcggatccacctccgcctactgcggctccggctgccagagccagtgctccggcagctgcggcggcggcggcccgaccccgccctccggcggtggcggcagcggcgtcgcctccatcgtgtcgcgctcgctcttcgaccagatgcttctccaccgcaacgacgcggcgtgcccggccaagaacttctacacctacgacgccttcgtcgccgccgccaacgccttcccgagcttcgccacaaccggcgacgccgccacccgcaagcgcgaggtcgccgcgttcctggcgcagacgtcgcacgagaccacgggcgggtgggcgacggcgcccgatggcccctactcgtggggctactgcttcaaggaggagaacaacggcaacgttgggtccgactactgtgtccagagctcgcagtggccgtgcgccgccggcaagaagtactacggccggggacccatccagatctcctacaactacaactacggcccggcggggcaggccatcggctccaacctgctgagcaacccggacctggtggcgtcggacgccaccgtctccttcaagacggcgttctggttctggatgacgccgcagtcgcccaagccgtcgtgccacgcggtgatgacagggcagtggacgcccaacggcaacgaccaggcggcggggcgcgtgccgggctacggcgtggtgaccaacatcatcaacggcggcgtggagtgcggccacggcgcggacagcagagtcgccgaccggattgggttctacaagcgctactgcgacatgttgggcgtcagctacggcgccaacttggactgctacaaccagaggcctttcaactcctaatagctcgttctagcttcaagctttgcactgataaccactgatcggatgctttacatcgatgaataagaattcatccgagcagacaaataatacaatcatcagtaatgcccac

SEQ ID NO: 811 - DNA, 721 bp, Oryza sativa
  ref <308>: DATABASE ACCESSION NUMBER: AK058904
  ref <309>: DATABASE ENTRY DATE: 2001-12-06
ttcgagttcatatatccagcaagctgggttggagatcagacattgctatacagaggagcgaagagagcagaactgcagagatcactagaccctcccccattggcaaatgggaggtccccatcacggcctcggaacatcagtgaacctgtggcagcttttggccccccaggatccagtggggagctcaatgtcagtgtcatcgtttcacctgtcccacaagattctcgatcgaggcttttggtggccctaaagatgttggggaggtggttctcagaaggatcgcaaagacaaagcggggcgcagatataaacgccactcttcttgatgctgccctgagagaagatccagcgaacaatgtgaaatactacaagctagagttccgagttgaaagcccttcctttcgacgacgcaatgtcgcagtgtgctgcgcgaaggatgggaaactatacaccctgaacgctcaggctccggagtcggcgtggaaggcggttcggaaagagttccttgcaatggcagattcattcagcctagtggctgatgtatgatgtatagtagagagaccgtttttgaaccccaccgagaattttcttcagtagtttgtgacttctcaagcaggcagagggatatgtcaatgttagagcatcagaaaagtaacatgttgtactgtacctgtaatgctgtatcataatgctagtgtcacacatgtgcaatttttttctgg

SEQ ID NO: 812 - DNA, 804 bp, Oryza sativa
  ref <308>: DATABASE ACCESSION NUMBER: AK058905
  ref <309>: DATABASE ENTRY DATE: 2001-12-06
aactatccgcaaaatgggccccttccacctgatgctccatcatggtgtcaggctccatttgatcctgaaggcctcctcagctctgttatggcaattgtcacatgcttgattgggctgcagtttggacatataattatacattttgagaaacacaagggaaggataataaattggctaattccttccttcagcatgttagcactggccttctcaatggacttcattgggattcgtatgaacaagccgctgtacacgataagttacgccttggctacctctggtgctgcagggcttctttttgctgggatctacacactggtggacgtgtatggattcaggaaacttaccatccccatggagtggatgggtaagcacgcgctgatgatctacgtgctagtggcatgcaacatcctgcccattttcatccatggtttctattggagggagcccaagaacaaccttttgaagttcatcggagttggggcatgaagcttgttcgtctgcgcaacagtacttaggccatagataatttcctagataattagacatccgtatataagattatttggatggccaggatatagagataaaaaatgttcaggccgtgttattttttctacgtggttagagaacggcaatgttcagcttctgacactactgaacaatggtcgttgccacatgccagagcgtatcctccctgagctcttctgtatatatcaatatatgttgaggaggctcttgtatatgattgacgcgctctgtgattcagatgaatatatatagtacatattctgacggatactc

SEQ ID NO: 813 - DNA, 889 bp, Oryza sativa
  ref <308>: DATABASE ACCESSION NUMBER: AK104021
  ref <309>: DATABASE ENTRY DATE: 2002-08-28
ccccttctctagttttgcccaccagatcaaccatggagccatcgtcgagttgccggggggcggtggatcgggtacttcgccatgtcccccgacgagatgacgcggcggctcgggttttgcgaggtggtcgtcttgttccggggcaccgtcacgccggcgagtagatggctaacctcatgagctcgctgtagtcggcatgcctcaactcgtgcgatctgcaccctaacgttaaggtggattcttggttcctcagcttgtacacctccgccgctagcgcctctcgcgcggatccgctgtcggcggcgacgggaggggtggatccggcgacctcttcccctcctgcatggatcccgtcgtctctccgctcccctcttgtgcggatctgccgtccgcggcgatgggtgggtcgatccggcgacctccgtcgtctctccaccctccgttcgtgctgatccgccgcgggtgatgatgggagggacggaggtggggtggcagactggcagatggggcgacgacctcgacgatggcgacacatgtggtttgggcgccatcgcaatcttttcgcccaggttagataacatgtcagttttgctagctattcggccagccagagaggagggttcaagcttgcggacgaaggtgcaccgaggagagcgcagtcgagtggtggtaccgagcgcccgagcggtggtactgaagatttcaggcggagccggaggcggcaaggtggggctgccggtgttggacggcgcactcgctttcccgcaggccacaacggcgtcccagttcctatctgccggtgattttgttcatttaaatgagccgtaggagggtgatttcatagtgatctactccgatatcaagtccaacaaatatgtaatgttcccac

SEQ ID NO: 814 - DNA, 930 bp, Oryza sativa
  ref <308>: DATABASE ACCESSION NUMBER: AK058906
  ref <309>: DATABASE ENTRY DATE: 2001-12-06
aactccattcgctgctctagggtttttcccttgctcgtctgcgccgccacctcctccaccttctcttcccctcccaaccatgacggcggccgagatcgggaagcaggaggaggagctccgcgcccagatcgaggagcagaagctcaacgagggagatgagccagtcgttgttgaagatgacgatgacgatgaagatgatgacgacgaggatgacaaagatgacgatgatgcggagggaggtgatgcaagtggaagatctaagcagagtcgtagtgagaaaaaaagcaggaaggccatggtgaagcttggcatgaagtctatcactggtgtgagccgtgttactgtcaagaagagcaagaatatcctttttgtcatctccaaaccggatgtcttcaagagccctacatccgacacctatgtcatttttggcgaggccaagatcgaggacctgagctcgcagctgcagacccaggctgcagagcagttcaaggcgccggatctgagcagcatgctctcgaagccggaggcgtcgacagcagcccaggaagatgatgaggccgtcgacgagactggtgtcgagccgaaggacatcgagctggtgatgacccaggccaccgtgtcgaggtccaaggcggtgaaggcactcaaggctgccaatggcgacatcgtcacagccatcatggaactcacaacttagcgagattcgcgttcgatcatttgattccgtttccattctacctcatctagatggggggtttacatgtgttgagatgtttgctttgtcgtttgtgcgcaccattgttattatcatgagcagtcttgggacgatgtaaggataatctattgaatgtcttgagtaagatgggggcttactgccttttcctgcacttggacaatgtcagttggcttgaaatgcttgatagtgaagtg

SEQ ID NO: 815 - DNA, 762 bp, Oryza sativa
  ref <308>: DATABASE ACCESSION NUMBER: AK058907
  ref <309>: DATABASE ENTRY DATE: 2001-12-06
gtgtctccggcggcggcgagctcgtgatctcaacgaccaggaggaaaccggcgctcgcctcgatctccgccgcctcgtcccaccatgtcgaagaggaagaccagggagcccaaggaggagaacgtcactcttggacccactgtccgtgaaggagagtatgtgttcggagttgcccacatcttcgcatccttcaatgacactttcattcatgtcactgacttgtctggaagggaaactcttgttcgcattactggtggcatgaaggtcaaagctgaccgtgatgagtcatcaccatatgcagctatgcttgcttctcaagatgttgcacagcgttgcaaggagcttggtattactgctctgcacatcaagcttcgtgccactggaggcaacaagacaaagacacctggtcctggtgctcaatctgctcttagggctcttgctcgctctggcatgaagattggtcgcattgaggatgtgaccccggttcccacggacagcacccgcagaaagggaggtaggagaggaaggaggctgtagatgtattgtcagccaacttgtcgccatggagcatctcttctttggatagtctcatagctcccaatgttcctgaagagagatttagttttgctcagtgtcctgaattgttgactgtcaagttaattcggctgctatgttttggttcaaggaaatttccagttttcatgcttaacaaacccaatatgtgtaccttcgtggttccttataatatggttggattgtctt

SEQ ID NO: 816 - DNA, 872 bp, Oryza sativa
  ref <308>: DATABASE ACCESSION NUMBER: AK058908
  ref <309>: DATABASE ENTRY DATE: 2001-12-06
gtgctgaatcagctgttgacagagatggatggcatgaatgccaagaagactgttttcattattggggctacaaacaggcctgacatcatagatccggccttgcttaggccagggcgtctcgatcagctgatctacattccactgcctgatgagcaatctaggctccaaattttcaaagcttgcctcaggaagtcccctgtggcgaaggatgtggacttgaacgctcttgccaagtacacccaaggcttcagtggtgcagatattacagaaatctgtcagcgtgcatgcaaatatgcgattagagagaacatcgagaaggacattgagagggagaggcggagtaaggagaaccctgaagcgatggaggaagatgaagtcgacgacattgctgagatcaaggcagcccacttcgaggagtcgatgaagtacgcgcgccgcagtgtcagcgatgccgacatccgcaagtaccaggcgttcgcccagacgttgcagcagtctcgcgggtttggcagtgagttccgtttcgagcggacagaagctggtgctggagctgcggctgatccttttgcgtctgctgccgccgtcgctgatgatgacgatttatatagttaggttgtctgttgtgtccttcgttagctcgccctccgagtttgtgttcaatattggttccatctgccatgcctttgtgttgaaactaatcgtacttgaaacacggcaaagccctctggttatatttattttcagtgcaatagggtgctgcttggctgaggacgatgccctcggtctaagccgttgccctcctgtggctggctactggacgatgacaatttctgaatttcccaacaatatacagctatttttttatacttctc

SEQ ID NO: 817 - DNA, 1039 bp, Oryza sativa
  ref <308>: DATABASE ACCESSION NUMBER: AK104022
  ref <309>: DATABASE ENTRY DATE: 2002-08-28
atcgttgggagcctctctgccttccgacctccatcgaattgggtgcagaccagcagcagccaataattaaggtcgtcggccgtatatatgatgatggagaatagcagggagcagcagccggagtcgtcgccggcgaacaacaatagcaagaagaagaagaagaagaagacggcgtcgcggttccggcgtgtgtgcgtgttctgcggcagcagccccgggaagaaggcgtcgtaccaggtggccgccgtgcagctggggcagcagctggtggagcgcggcatcgacctggtgtacggcggcggcagcgttgggctgatggggctggtgtcccgcgccgtccacggaggcggcgggcacgtggtgggcgtggtgcccaatggcgtgctgccacgcgagctgatcggcgagacgctgggggaggtgagggcggtgggaagcatgcaccagcggaaggcggagatggcgcgggagtcggacgccttcatcgccctccccggcggctacggcacgctggaggagctcctcgaggtcatcacctgggctcagctccgcatccaccacaagcccgtcggcctcctcaacgtcgacggctactacgactccctgctcgccttcatcgacaaggccgtccacgaaggcttcgtctcgccgcccgcccgccgcatcatcgtcgccgcacccaccgcctccgacctgctctgcaagctcgaggaatacgtgccgccgccgcacgacgccaccgccctgaagctcacctgggagatgtccaccgtatcggagcagcacgccggaagcatctactcccccaagcccgacatggcacgctagctagctagctagctactcgatccacttcattattacttatcttgtttcttctcatataatcttgctgctaattatttcttccatatattaattccctatatatatgtatatatactcgatcgtactatattgtatacatcatcaattacttgtaacttcaattaatcctagctacatcgaagaggcaggcggccctagttagttttcctgt

SEQ ID NO: 818 - DNA, 929 bp, Oryza sativa
  ref <308>: DATABASE ACCESSION NUMBER: AK058909
  ref <309>: DATABASE ENTRY DATE: 2001-12-06
acaaagaaaccaactccgacgaccaccggagtcggagagcatcaagaatcgacgacgatcgatcatggccatccccaccatcctgggcagtctgaagctcacgccatccccaccctccgccacgccggtgcgctcctccgcctcctcctccctgcatttccacctcgccaacgccggcgccgccgcgctcgtcgcggcctcgctcctcgtcgccgacccggccctggcattcaagggaggaggcccgtacgggcagcaggtgacacgggggcaggacctcaccggcaaggacttcagtggccagacgctcatcaggcaggacttcaagacgtctatactgaggcaggcgaacttcaaaggcgcgaagctgctcggcgcgagcttctttgatgcagatctgacaggtgctgatctctctgatgctgatcttagaggtgcagatttctcactggcaaatgtatcgaaggtaaatctgacaaatgccaacttggaaggggcacttgccacaggaaacacgacgttcaaaggttccaacatatatggagcagattttacagatgttccactgcgagacgatcagcgtgaatacctctgcaaaattgctgatggggtcaatacaaccactggaaacgccacgaaggagactcttttctgcaaatgatgaacaatagagagacagaggaagagatccagtagagttgagggtgctgattaaattagttgctgaatagtatcactactactagtatattgccgccatgttctctcttttttccccaagtgcagagaggagtagtacacgatcacatgacatgaataaatgtgcaaatgcttaagagcaagttcaataatatagccaactactatctccaattcatctatagtcaatataatagctcattcatacaatagttacatactacactatt

SEQ ID NO: 819 - DNA, 1287 bp, Oryza sativa
  ref <308>: DATABASE ACCESSION NUMBER: AK058910
  ref <309>: DATABASE ENTRY DATE: 2001-12-06
attttgatattagtttgtcttgtctcttgagggattagctactctatgtcttggctgacaaaattgccctctagtaggcagaaactagctgcttactatttttatataggtaaaagttgaattttatcaaagttctctaaattccttgaagtttcaacttcaagtaacatttagattttagatacaagcgctcacacaatcaatgcgaagataccccgaatcaatcagtttactatttgtaccactggttaaccagtaacttgctggattttgtaacctgcccactcaattttttcttgtctttctttatgggcatgtcaaggggggacttacatgcactgctgatctctggaaacttggattctagggtcctaatggaagcaccaggattccaatgaaatggcataaataaacccttttaattttggcagatgaccctgccgatctctttcttgttaatgcacgtgattttcaaaatttgtttttcttgattaaatagccaattccattacatcgcaaacaactaaaacggcatattgttcttagttatttgactctgcatgaaagggaatttgaccgactttctgttccgaaaaaggtcgagggacagggcatgctatatttatcgaatctgttctcgtttaggtggtatctccagtcacccctgcttggttgattttctgaagttaggaacatgaaaaagtatgtgatatagttggccactgaacaatgttgtgtgaacaatttgttccgtggactatttcatattgattggtgagaaagcaaatattttaaaatactctattctacaatgtatcacgtcttcgacatcccattgtctccaataaacaccgcaaaaattattaaacttttcatgatgaatctaatggctccattttcatacgaaaagttctaaagaccttttgatatggagtaaatttcagattactgcaactattttgtcgaaattatcaatttactgcaactttatctagacatttcagagaactgtgacaatagtgtatgattttatcagagaactgcaattttatttgcttggcatgttttgggcccgcctgttatacagacatgcaatacgtatgctggtgtaagccaggtccacatgtcatacacatggggggtgggggggggggcagtgttgttaaggcggtaaggcggtttaaggcgacccaccactgccttagcgctgaggcgtaaggcgttgcgacgccttatgagatgattgaggcgtgattagtggaggatatggtagagaaattaggaagg

SEQ ID NO: 820 - DNA, 1083 bp, Oryza sativa
  ref <308>: DATABASE ACCESSION NUMBER: AK058911
  ref <309>: DATABASE ENTRY DATE: 2001-12-06
acttaaccatttcttttggatacaagcgaagcatattcctccgtcttctccccgcccgggtgtcgctcttctcctcgtcgccgtcgccggtcgtcgccggtcgcgggtggcgcgcaacccggagtctctgccggctgcttactcgccgcgggcttcagcttcctcctcgatctccggcgcgcctccaagctgcagatcggccgacccccccagtgtgttgaagcctgcccttgacacttagcaactgcagagtcctgctggagagagatggggttcatcggcgacacgatagagtcaatccgctcgatgcaggtccgccaggtgctggcgcaaatcatcagcttaggtatgattgttacctctgcattgatcatatggaagggtttaatagttgtaacaggtagtgaatctccagtggtggtggttctttctggtagcatggaacctggatttaaaagaggtgacatcctgtttttgcacatgagcaaagaccctatccgcactggagaaatagttgtttttaatgttgatggccgtgaaattccaattgttcaccgtgtgatcaaggttcatgaacgccaggagagtgcagaagttgacatcctcacaaaaggtgataacaattttggggatgaccgacttctgtatgcacatgggcagctttggcttcagcaacatcatattatggggcgagctgttggttttctgccatatgttggatgggttacaattatcatgactgagaagccaattattaagtaccttctgatcggcgcgctgggcctactggttataacatcaaaggagtaataaagatgcggcttttcagtagagtagtggcctctctagtcgcatggaagaagctggtatttgtttcaccatgtttccaatggaagatgcgaggggtttatttttaggataactgtgcgacaattggcattgtattttccagcggtttatcatgtggcatccatctttcagtggtttacagttaattgcgcaagaaaatttaacgtgacttttggttcggcaactggttattggatgctgactttgatacaatataagatgaattcataaagc

SEQ ID NO: 821 - DNA, 925 bp, Oryza sativa
  ref <308>: DATABASE ACCESSION NUMBER: AK058912
  ref <309>: DATABASE ENTRY DATE: 2001-12-06
gagaaaggagccaccaaacccagaacccgcagagaaaagaagagagagagagagagatcagaggagagagagagacagacagagtgcggcgccgaggaggagaggagcaataatccaattccaatccattcctccgcgacctcgtcgtccgatcatggccatggccgcctccaggttgctgtgggcttcccgcgccgcctcctacctcaagatctccactttccccagggccttctccaccgtgctgaaggatctgaagtatgctgacactcatgaatgggttaaggttgagggtgattcggcaaccgttggaattacagaccatgcccagcaccatttgggtgatgttgtgtatgtggagcttccagaagttggcagcagtgtatcccagggaaagaactttggtgctgttgaaagtgtgaaggcaaccagcgatatctactctccagtatctggagaggtggttgcagtgaacgatggactaggcgatgaacctggattggttaatacaagtccatacgagagtgggtggatcatcaaggtcaaggttagtgattcaggtgagctcaattcattgatggatgacgcgaaatactcgaaattctgcgaggaagaagatagcaagcattgaacaaataccagtgacttgtgatctgcaaagaatgcgccttgacccttttgtcaatgcttgtgatgtgctatcgagcacttatctttaccaccggctgctcctgaaatcagcaccgatcaacacatgaataaattagtgttggcattgcctcttccacaaagagttgcaaacttcgaacctgtaaatgacatgagtttcgttatttctttgtagtatcgcgtgatttcatcttcaattgtagctctgccgcctctgctccgtttatttctgaaacgtgtgcttcgtttacttctg

SEQ ID NO: 822 - DNA, 733 bp, Oryza sativa
  ref <308>: DATABASE ACCESSION NUMBER: AK058913
  ref <309>: DATABASE ENTRY DATE: 2001-12-06
atcgtctcatccgccgcctcccctcgcctcgccgcgcgcttcctccgcctccgccgccgcgtcgatctcgctcgcgcagccggtttcttctctcgtcggtgggtggggtataggatggcgggacgcgggaaggcgatcggcgccggggccgcgaagaaggcgacgtcgaggagctccaaggccgggctgcagttccccgtcgggaggatcgccaggttcctcaaggccggcaagtacgccgagcgcgtcggcgccggcgctcccgtctacctcgccgccgtcctcgagtacctcgccgccgaggtgctggagctcgccgggaacgcggcgagggacaacaagaagacccgcattgtgccgcgccacatccagctcgcggtgcgcaacgacgaggagctcaccaagctgctcggcggcgccaccatcgccagcggcggcgtcatgcccaacatccaccagcacctcctccccaagaaggccgggtcatccaaggcgtcccacgccgacgacgacgacaactgagcccccctcctcctcctccgccgccgccgccgcctgcattcgtcatcttgtcttatgcactagtaggatatttagctgtttattttggaccaaggtgtgttgttgcgttaagcagtaggaagaaacaagaaaaaaattgcttagttcttggtttgttttggtggcctgattgatggctgtgaatatggtgaaatttttggctatttatctc

SEQ ID NO: 823 - DNA, 1050 bp, Oryza sativa
  ref <308>: DATABASE ACCESSION NUMBER: AK058914
  ref <309>: DATABASE ENTRY DATE: 2001-12-06
acacggcagcgagagacgcttcgatggacgcctcctcctccgcctccgccggcggcgaggccgacgcgatggcgctcgtgcaggggtacaacgccgacgagctcgccatcgccggggagttcctcaccacgtggctccccttcctctccgcgggcctctgcgcctcctgcgccgactccctccgcagccgcgtctcctccctgctgcccccacaagccgaggaatccccgtcgtcgccgccgccgcggatcgatcagattgagccctcggggtgggagtccgatccggctacggctcacccgcagcatctgccgttcgagccgagcggatgggactcggatccgccgcagctgccaccggagcaggagcagcagaagcagaagccgcagccggcggagaagccgcggaagtcgtgggcagacatggctcaggaggacgagctcgccgccgcggcagaggaggacgcggcggcagccgcggctgatgacggcgaggaagggagcgaggctggtaggccgggtgtgcagctgacgagggagcagcgggagctgaggcggttccggaacgtggtgcggaggaaggatttcatctgttttgagagggtcaatggtcggctcgtcaatatcctcgctggcctggaacttcattgcggtgtgtttagcgcggccgaacagaagcgtattgtcgactacgtatacgatcttcaggagatgggcaagcacggggagcttggaggtgagatttaagctgcatggagattcgatatgtttttctatggcgctagttgaatttggctaaattttcatgtaaagtcttgagttttgagaaatgctttaatgaaaagggttttaggtcaggattatgtaaaattttaggcaaaggttttagctgtaattaaggtcatgctttgctacttaggctatggtagttgtggggatatggatcataggcaaacatttagatgtctatatgcaccacagtagttctatcgtgtagaactggaacttgtatagtgttctcgtgcaaagtagaaagccgaagaattattat

SEQ ID NO: 824 - DNA, 1011 bp, Oryza sativa
  ref <308>: DATABASE ACCESSION NUMBER: AK058915
  ref <309>: DATABASE ENTRY DATE: 2001-12-06
aaaaaaaaaaaagtgataccactagatacaaaaatggatgggccatctgcaacacgcacgctcgaccttgcatccgcccttgaggttggaccaggtggagcttcgcgtgcttcagttgaagcatctggcacatgtaacagatcagtcctgaccattgctttccaattctcatacgagaaccaccttcgtgagagcgtggcggcaatggctaagagttatgtcagagctgtgatggcatccgtgcagagggtggctgtggcaatagctccttctcgacttggaccccagatcggaatgaagcaccctccagcctctcctgaggcgcttacacttgctagctggattggtaggagctatagggctcacaccggagcagatatccgttggtctgataccgaagatgccgattctcccctggcgctcctgtggaagcacagcgacgcaatactgtgctgttctctgaagcctgctcctatgttcaccttcgccaacaatgccggcctcgacatccttgagacgacgctggtcaacctccaggacatctcgctcgagatgatcctggatgacgagggccggaagacgctgtgctcggagttccccaagatcatgcagcagggtttcacctatctccctggaggcgtctgcaagtcgagcatggggcggcaggcatcgtatgagcaggcggtggcgtggaaggttcttagcgacgacgacgcgccgcactgcctcgccttcatgctcgtcaactggaccttcatgtgatccaccatccatggtttccagcttccagctagtgcttttgcttttgtgccattgtggcaaactgaacaaagacctgaataccaccaccgtattgtattaaacatatgcgtccatacatgcatggtgcttgctttatcctagctagtgctagcacctgtgtgtatggtctctccatgtttgaagcttaaaattttagaaccctggtttttttttttctgctgctgtgtggatgaacaagtttcaggacct

SEQ ID NO: 825 - DNA, 409 bp, Oryza sativa
  ref <308>: DATABASE ACCESSION NUMBER: AK058916
  ref <309>: DATABASE ENTRY DATE: 2001-12-06
tatgttctggtcaatggattacagaagttggttttgccactagttgaggcttttgaatccatcaactttggcttgagtatggtagctactcaagtaggcgtgcaaaaaatttctggaattacactgtatgccgtgcaggaaaagaagctttacgaacctttgtcagacatagagattttcgttgatgcagaatagaacaacgctgcattggaaaacagacacagatgttcccccatgttttcatcatctgagaaagggatatacatatcgtcaagcgtattctagttgatgtattttttgtttattgtacaattgattatatccgattgtaacgagacacatttttaccaaaaagggaaatagattgaatgttcttccaaggaatgcagatgcgggcattgtgaagttc

SEQ ID NO: 826 - DNA, 630 bp, Oryza sativa
  ref <308>: DATABASE ACCESSION NUMBER: AK058917
  ref <309>: DATABASE ENTRY DATE: 2001-12-06
ttccacctcgcagtcgccaccccgagcagaagccgccgccgccgcccgaaaccctcgccgccgtcgcttctcctcggggcgcagccatggtggccgcaaagaagacgaagaagtccacggacaacatcaacaacaagctgcagctcgtgatgaagagcggcaagtacacgctcggctacaagaccgtcctcaggaccctcaggaactccaaggcgaagctagtgatcatttctaacaactgcccacctcttcggaagtcagaaattgagtactacgctatgttggccaaggtcaccgtccaccatttccacggaaataatgtcgatctggggacagcctgtggtaaatacttccgtgtttgctgcctcagcattattgatcctggtgactcggatatcatcaagaccacgggtgagcagtaaggatgagcggttccgctggcgcttcagatgctgtcacactgagctgttctagacattgtagttgttgctggacttgatttggtctctctcgtgtatcgaacagcttttaccagtcaaccaaagtttcgtgggaacattgttcttggattggaaaattttgttcctggcccgaatcatgttttcaattagaacgcttggctgtttgttc

SEQ ID NO: 827 - DNA, 579 bp, Oryza sativa
  ref <308>: DATABASE ACCESSION NUMBER: AK058918
  ref <309>: DATABASE ENTRY DATE: 2001-12-06
ctagccgccgccgcttcatttctcccaggtaaggaaaaagggctccccgatggcgccgtcgcagccgaagtccgggctcttcgtgggcatcaacaagggccacgtcgtcaccaagcgcgagctgccgcctcgcccgtccgaccgcaaggggaaatccaccaagagggtgacctttgtcaggaacttgatcagggaggttgctggatttgctccctatgagaagcgtatcactgagcttctcaaagttggcaaggacaagcgtgcactgaaggtggcaaagagaaagcttggcacccacaagagggccaagaagaagagagaggagatggctggtgtcctcaggaagatgaggtctggtggcggtcacgctcacaccgagaagaagaaatagagtatctccaagttcatgaagtccatggcaatattgtcttgttgagtttactcttgtagaaccctactactagaattgcactctattatccagctaaacatcatggtgttagttctgtgttaaaaacctcctgtcttgtgtttttgatcctttcaatgcatggtttgccaccttaaatttgcttgatt

SEQ ID NO: 828 - DNA, 745 bp, Oryza sativa
  ref <308>: DATABASE ACCESSION NUMBER: AK104023
  ref <309>: DATABASE ENTRY DATE: 2002-08-28
agttcgcagcaccgaggcgatattccccgtcccccatcattttctcccatttcttgatttcttgtcattattattattactatattccccaacacctagattcccttccctggtggttgatcgatcgatgcgcccagcccacatggccgcgtgccgatcgccatcatgacattgccatggcggtgatcgccgccgccggaggggagggggacgcgggcgtcatcgcgcatgtggtggtcgacgtcgacgagagttgtgcggcggcggcggatgatgatgatcgcagccggcgcccgagcacgggctgcaggatttgccacctcggcggcggcggcgacggcgagatggcggcggagagcgggagcgggcggctggtgaggctcgggtgcggctgccgcggcgagctggcggcggcgcaccggcgttgcgccgaggcgtggttctccgtcaggggcaacaggcgctgcgagatctgcggcgagacggcggagaacatcaccggctggggcggcggaggcaaggagttcatgaagcggtggcacgcgacggcgggcgtcgacgtcgaaggctcctccaaggcatgcagcggcttctgcaagagccactcattatgcaatctcttgattgcgtgcttgatcattgtaatcgtcttgccatggttgctccataatcatgtgctttgagatcctctaaattgccattttggataaatcattttcagctattcagatgagatggctatttt

SEQ ID NO: 829 - DNA, 846 bp, Oryza sativa
  ref <308>: DATABASE ACCESSION NUMBER: AK058919
  ref <309>: DATABASE ENTRY DATE: 2001-12-06
ttgatagcgatgagtccactttttctgagattctctgtctgatgtgtggaagtccgttcagtgaatcagaactccagaatttggaaagcacaaaacacaaggctcagaagaaaattgatctttatactgctcattgttgtcaaagctgttatttccagattctaccagccggtgaaaacttgaatgaacatttcttttcactactaccaaaattatggactggaaaaatggataccatatctgacagccatagcttgctaagagatcaaatagaagagtacctgcttgaagaaaatgatgatggaaactgaacttgatatttcagtgaagcccgaatatatttgccagaaagacagcagagattcctgcctagttgggctcctcacattggcataatcacataatccaaacttgcttcggataatagtgtttctatctagcatggcattggtttattcagaattctgccagatacttacaatttcaacacattatatccttgactcaattcctgatgtttctgtatgtccttcctactcttaagagttgaaacctgtatgaaatccgtatagtgatagcctgatggggcagaccgtcacttgccagcaagtttccaccgatctcaagaccacagacattggacagaaacttccatgtgattacagtattctgattggtcacatctcctgtaccaactattctgtctgcaaaagattgtaacctgaagaatttattcgattattttggaacaatcttctctatacaagatttgcacatactatggtttcaatcaagtacaacgtcctgttggctcttcccatttatcatgccttcaaggaaactttt

SEQ ID NO: 830 - DNA, 319 bp, Oryza sativa
  ref <308>: DATABASE ACCESSION NUMBER: AK058920
  ref <309>: DATABASE ENTRY DATE: 2001-12-06
cggtcgcacgtaaagcacctagtaattcgagggagaaggcagtgtccagtagaagtcgcaagaactcaactattgatgacattgtggcatatgagctgcacagagagttcatacaagttgatggtccatccactgaacatagcgcaacacctagtgatgaaagctgccaaagtgttgttgattgggacacagagcctagcattgatggcattcgggaagatttgagtgaatcctatgaagctccagtgactaccagctctgcggaaagaaccgattcagctaacggagatccttttcacccatcgacacacttagtatc

SEQ ID NO: 831 - DNA, 286 bp, Oryza sativa
  ref <308>: DATABASE ACCESSION NUMBER: AK058921
  ref <309>: DATABASE ENTRY DATE: 2001-12-06
atctgtgtttatgctgaataaaatgagagctagctagctaggtcgatccatcgccatgcatacatggttgatcgcccggccggtcactacgctatctgtttccttaatttattcgtcgatcgactatacgtacctgagagctagagatcagtttttgtaccatatgcatatgtacttctgcatgtacatggagtactacttgtactacgtgcgtgtacgttgtggattatacatagatatatagctctttttcgtatacaaatacatgttctacaccgattactcc

SEQ ID NO: 832 - DNA, 532 bp, Oryza sativa
  ref <308>: DATABASE ACCESSION NUMBER: AK058922
  ref <309>: DATABASE ENTRY DATE: 2001-12-06
agaatcttcccaaaagcctctctctctaatctggttcgtggtggtgtttgccatgaggccctcacaatatctgagcttggaatttatggtgcttacttgcggaacaatgataaggtggttatgaatgaacagagtggttacttgatgcggacaaaagtttcatcgtcagatgaaggtggcgttgctgcaggatttgctgttttggatagtttgtacttaaccgacaaggcgatgtagacatgattgttgaacattttctcagatttagcctgctcatttctgatggacagcaaattccaaaacaagaacacattgtatcgtgtttcaagtgtactatatgcttgaagctgaggagcattataggcttatagcttctcatctgattatttccttgggacgttatgataattatccctatttatgctcccgatatgtaattttgtactacaaggtggtgtcttcagttggcagtttactttagatgtggtgtttgcagtttttgaatggcaatcccagtgatgttctgctgtct

SEQ ID NO: 833 - DNA, 759 bp, Oryza sativa
  ref <308>: DATABASE ACCESSION NUMBER: AK058923
  ref <309>: DATABASE ENTRY DATE: 2001-12-06
tgctattgaggatggaataagagggaaagcactagcttatggtgcaaaagagaagggagcacgagttgtaatagcaaaccgtacttttgcgcgtgctcaagaacttggcaacttacttggtgcgcctgctctgactttggcggagttggaattaccatccagaggaagaaatgattcttgcaaacacaactgcaattggaatgcatccaaatgtcaatgaaactcctttatccaagcaagcacttaaatcttatgccgttgccttcgacgcggtgtatacaccaaaagagaccagacttctccgagaggccgcagagtgtggagccacagtagttagcggtttggagatgttcataaggcaagcaatgggtcaatttgagcattttacaggcatgccagctccagatagcttgatgcgtgatattgttctgacaaagatacagtaaggtttgtccaaagagcaaccttcccttcgatcataatgtctacaaaatcggttctagttcatccttaacttttagaaaccgctgtttgtaaaccatgtcggatattggttccattttattgcaattaccctgttgattgtgaagattcagtatcagtatgttcacatattataccatatttctgattagcttggtgttcaacaaagatacattctagcgcaaccttcgtagagagattatatgttatcaaggctgcaaaacctgttaaatgcttgtaataataatttaatggttgcgaacatctaacattgcc

SEQ ID NO: 834 - DNA, 676 bp, Oryza sativa
  ref <308>: DATABASE ACCESSION NUMBER: AK058924
  ref <309>: DATABASE ENTRY DATE: 2001-12-06
ctactgcaagaacaaggagtgcaggaagcacacccttcacaaggtcactcagtacaagaagggtaaggacagcctgtctgcccagggaaagcgccgttatgaccgtaagcagtcaggatatggtggtcagaccaagcctgttttccacaagaaggcaaaaaccaccaagaagattgtgctgaagctgcaatgccaaagctgcaagcattactcccagcaccccatcaagaggtgcaagcatttcgagattggtggagacaagaagggcaagggaacatctcttttctaaactacctactggatactgaagttgtgggtctattgtgcttcatacttcaatgttattaggaacttaatttaagcagaccatatcatgtattcaagtatcatcgtctgacatttactctagcaaggattggctttctgctgaatcgagttttcttgcttaatgctcgtcgaatccaatgtgatgcatgtctttagatggcactgcaattgtgacttttgtcttatggcagttttatctccctaagtcctcagtgtctgtttttcgttatcttacccgagtttgcaatcctagagcgacccacgtaaacgaattcctgtgacatgaatccctgagaggctagtctgatgaacttccgtttttcagatcgaatttcgtatatggttaact

SEQ ID NO: 835 - DNA, 701 bp, Oryza sativa
  ref <308>: DATABASE ACCESSION NUMBER: AK058925
  ref <309>: DATABASE ENTRY DATE: 2001-12-06
aagatcagcgaaaccgcggcacccaaccccaacccaaaccaccagaccggcggcggcgggggcgacctaaggcgagaacacgagcgaaaccagagagggggcgatggcgacggcgacggcgctcaaccgcggcctccgctccgggatccgcctcctcgccaccggcgctgaggcctccaagacagattctcgtggattccatgccactggtgtgaagaggatgggagggcatggccatgatgagccctactacctccatgccaagcacatgtacaacttgcacaggatgaagcaccagaagccgaaggtgtatctttccgtgctgggagcagttggcattggcatcgcagtcccagtttatgcggttgttttccagcagaagaagaccgcctccggataagctctctaagtgctacataatgaacttactttctatagcactccgcgaagttaaaattgggacttcactttaaattggttattgcttgttactccattttgcacttgcctgaagttgtaagctccttttcatggcgtttgatgtaggaatactgctattttctgttaataatatcatggcatgaactttcctggctgtggagaaaccaggcagcgtgatcacagttgttttaactcatatttttttttatttcttattgtgattgaaattgatagttggaattcatgtttactacttgttt

SEQ ID NO: 836 - DNA, 1080 bp, Oryza sativa
  ref <308>: DATABASE ACCESSION NUMBER: AK058926
  ref <309>: DATABASE ENTRY DATE: 2001-12-06
tgctgtatctatgttgagtttttaaatttgtatttatgtaatcttgtaggttgaggttgtatgaactagttgagcacaaggtgaaaggagatggcaactgtcagtttcgggcactatcagatcaactgtatcaaagtcccgatcaccatgagtttgtgaggcagcagattatgagccagcttaaaagtaaccgtgatgcctacgatggatatgtccccatggcatatgacgattacttggagaaagtatcacaaaatggtgaatggggtgaccatgtgactctacaggctgctgctgacaaggtgtttatacaaatctctctccctgctgtctcattcatggcattacaaatcagagctgacaaagactagtcttttctattcccaaagccgttctaatgtaacgctacaatctgctgcagtatggagttaagattttcgtgatgacatcgttcaaggatacgtgctacattgggatccaaccaaaggttcagaagtccaacaaagtggtgctgttgagcttttgggcggaggttcactacaactccatatatccgcagaacggtgagtaggccctgcctgccattggcatacgatgcaatgcatgtccggtcttcgtcgccagcatgcgccgaggtcgcagacgacgaggaagaggagatggtggccgttctctcacaaccaccaccatcaccaccattgatgcctgggctgcaaagcttttcttccttgatcaagatgacccaggttgatcaagatgacccagaaagaaagctggtgctcattgtcttgttggtctgatgacaatcatggacatctgatagtaggaggaggacattgtggtgatgattatatatctccaaatgatatagaagatacatggaaatatggaatccatggaaggaataatttcgtcttagtccggtccggtcccgtatatagctgctgctgagctgcactgcactgcattgcattccctgaatcaattatcaatcacctcacctgtattattatttctcaaaaattttgccggaatgaggctacaattattcattcggaacgaatgccaccatataatacc

SEQ ID NO: 837 - DNA, 236 bp, Oryza sativa
  ref <308>: DATABASE ACCESSION NUMBER: AK058927
  ref <309>: DATABASE ENTRY DATE: 2001-12-06
aaaaaaaaatcttgtaatgtatatcttacatctgcacaaactacaataggaaccatgtctggttaatctggtgggtattatgtttattttttttcctgatgttttgctaatgtggcagcgcttcatactcgtatgtcttctgtagaagactgtttttttattggtagctgtattatctatgttgtaatatacagtgcaatctgaatcaaggaaatggaagctggatcctggatatc

SEQ ID NO: 838 - DNA, 588 bp, Oryza sativa
  ref <308>: DATABASE ACCESSION NUMBER: AK058928
  ref <309>: DATABASE ENTRY DATE: 2001-12-06
ctatttccttttgccatgtagtagttcagccaaattttgctcaatcaagttgttatctcaagctaattttagagacaggtttggaaatgcatttagcagtcaattatgtactatgctaacacattgaccaattaataaattgttgccttctccaacaaatacatgatacatttgctattctatactttctcatagttgctctgattttccaaatggtttcgattgagcttctatcaggttttcagaatcttagccgaaactacaagagaaggccatctatgtcattgctatcatgcatcatcaagtacacctttttttgtcttgatctgatgttttcatacaaaaacgaaggattatttacatgtcagtggtgatagcagaacatatatcaaatcgaaccagcgttggcatatttgtttagttttaatgctgtcaaacagaatttcctcaacatttatagtcactctcatcttggggttgatcttcttcttcttcttcttcttcttaagttatttctagctgggcttgtaagatgatttcgtgaaactttttcatgtgcgtttattcaatggagacatgtttcaagat

SEQ ID NO: 839 - DNA, 723 bp, Oryza sativa
  ref <308>: DATABASE ACCESSION NUMBER: AK058929
  ref <309>: DATABASE ENTRY DATE: 2001-12-06
aacgaacgcctcgtcgcaacagctacaaacgcccacatcacacgcagaaatccgcatcaacagccagccatggcgtccacgctgaccaacgtcggcctgtctaccccggcggcggcggcgtcgtccctcgttaggccggtcgccggagctggacgcgtggtgtttccccgtgttggccgcggcgggttcgcggcggtgagggcgagcgggccggcgacgccgccggacatctcggacaagatgtcggagagcatcgacaaggcgaaggaggcgtgcgcagaggacacggcgagcggcgagtgcgcggcggcgtgggacgaggtggaggagctgagcgcggcggcgagccacgcgcgcgacaagctcaaggagacctccgacccgctcgaggcctactgcaaggacaacccggagaccgacgagtgccgcacctacgacaactgattcttaccattatatgtttgctaatctctctgtaattaattataagttactgggttgaaaagattatttgtcgtagaagacagaggggagtttggtggaatggtggtatttacggatagttcaagggggaaatgggaaaaaaaaggttttttacacttgtttgtctggatgaatttgtatggaacttttctgcttgataattttcgcatgtgttagtatttgtatatgatgatataagtgggaaataaatcatcaaattttccagcaggaactttgtgg

SEQ ID NO: 840 - DNA, 347 bp, Oryza sativa
  ref <308>: DATABASE ACCESSION NUMBER: AK058930
  ref <309>: DATABASE ENTRY DATE: 2001-12-06
actacatgttctacaaggagatccttctggactatgtccatcacgatatcaccaggaagtgggttttcatatacttcaagattctcctgataatcatggccaaggaaacagttgtctacttcgatttattttaagttcatggtagtttcttgagagacgtgttaggcacccatctgtacactgaaaataatcaagatggacaaatgcctgctgctggtttcctctgttctgcagttccaacttgctatctttttctgattttggctgaactgatttaaggccaactaaggcaccaaacaatgtatttcttcaagcaacgatcagtttgtccctaaaaccttagattg

SEQ ID NO: 841 - DNA, 529 bp, Oryza sativa
  ref <308>: DATABASE ACCESSION NUMBER: AK058931
  ref <309>: DATABASE ENTRY DATE: 2001-12-06
gctgtatgagaagtacaaggtccaaggctttgagatattggctttcccgtgcaatcagtttggggggcaggaacccggctccaatgaggagattgtccagtttgcttgcactcgcttcaaggctgagtatcccatttttgacaaggttgatgtcaacggtaacaatgctgcacccctgtacaagtatctgaagtctaacaaaggtgggcttttcggtgatagcatcaagtggaacttctccaaattcttggttgacaaggagggtcgcgtggtggatcgctatgcgcccaccacctcccctcttagtattgagaaggatatcaagaagctgcttgggagctcttaaacctaaaggtcgggatctgtagagcaacctgcacttatgcactgtattcagcactgagagttgtattaataaattggtgacatgtacttcacaggttgcatttgcactatactccttgcatcctgaatctttattgtactctgtacctgtatagttattcatgtcaataaatttccttgctgt

SEQ ID NO: 842 - DNA, 1488 bp, Oryza sativa
  ref <308>: DATABASE ACCESSION NUMBER: AK058932
  ref <309>: DATABASE ENTRY DATE: 2001-12-06
atgattagggaagcactctctgaggcacaggttgtgctttctactaacacaggggcagccgatccacttatcaggagaacatgttgttttgacttggtaatcatagatgaagcagggcaagcaatagaaccctcctgctggattcccatattgcagggaaagcgttgcattctcgctggtgatcattgccagcttgcaccagtaattttgtcaagaaaggccttagatggagggcttggtaaatctttgttggaaagagcttcgtcattgcacaatggattactgacaacaaggttgacagtgcagcacagaatgaatgactcaatagctagttgggcatctaaagagatgtatcatggactgctcaaatcttctcattctgttgcttcacaaactcttgctgactctccagttgtgaaggctacctggataacacggtgcccactgcttttacttgatactcgaatgccatatggggccctggacactggttgtggggaacaaatagacctttctggtacaggctcattttataatgatggagaggcagatattgtgacacaacatgttctcaaccttgtacattgtggagtatctccaacagcgatagccgttcaatcaccctacattgctcaagtgcagttgttaagagagaggctagaagaatatccagggctttctggggttgaggtttcaaccatagatagctttcaagggagggaagctgatgcagttgtcatatcgatggttcgatcaaacccactgggagcggtaggtttccttggtgacagcaggcgcatgaatgtggctattacaagggcatgccggcatgtcaccgtggtatgtgacacctctactatctgtcacagcaccttcctggcaaggctccttcgtcatatcaggcgatatgggcaagtgaaacatgtagtgcctggttctttggatggggtgtctggccttggcttcagtcaacccactctgccgtccatcagttagcacacacaacaaatgacttcccacattatcattcggtggacatgcccatctgagcatgtatgtatatatgcaaagaggtagactctgtaaatacacaaagaactgaagactgaagaaccatagggtccccgttcgatatttatctgtgaagaggatacaaacagtgattcatggatagacatggaagagcttgcgatgacgcatgatgcatggccagttgatctgttgttgagagtaactggaggcaggaggttagtcggtcttgcattttggattggtgtacatgatcgtttcagcagcaggataaattttagtgtcctgggcatctcgaacctactgcattgccgactatgatgctcctgctgcctgtaatttcatatagtttctttttgttggactttaggggcctccctacattgtaattagttcaaatactgttgacaaggataaatactgcccacaaaggaaatgtatagtaaattggcatttcac

SEQ ID NO: 843 - DNA, 287 bp, Oryza sativa
  ref <308>: DATABASE ACCESSION NUMBER: AK058933
  ref <309>: DATABASE ENTRY DATE: 2001-12-06
aatgatatggctagaggaaattttactggaagctcgattctttagtttgaagttgctgttgtgttttatgcagcttaagaagttattggcctgttaagcagcagatcagcataccaactattcttggactagtgtaaaatattagaagctgtcattttagtttttctttttgagagagaaaagtggcatttagttgaaaaattctttttctctttttggtatacaccattctttttggttaaccattttgctaccaggcttttcattttgattagccacttccaaac

SEQ ID NO: 844 - DNA, 485 bp, Oryza sativa
  ref <308>: DATABASE ACCESSION NUMBER: AK104024
  ref <309>: DATABASE ENTRY DATE: 2002-08-28
ataaaaggaaggatgatagaaagaaggaagagaaataagaaagatataggattccaatatgtatggtctatgaattacatcataaaaagcaatgtgataaagcatcaatataataaaaataacagagaattcgaaatcgtaatttgattgaaacaaggaatacaaatttcaaggaataacaaagagcgtcccgagttaataaaactgagaaattgactcggaaagaaattttttggaagctccattgcgagattcaaacctaaccattaaaggagaagcagtgggaacgacagaacctatgactggataggattttcttgaaaagaatcccaatacttcattgggtgggatggcggaacaaaccaaaaaaattgtcttatttgataaggttatgaattaacaaataagacaggaaagagtaaatattcgcccgcgaaatttttattgaattagaatactttaccgcgattcaataagagtaaaat

SEQ ID NO: 845 - DNA, 260 bp, Oryza sativa
  ref <308>: DATABASE ACCESSION NUMBER: AK058934
  ref <309>: DATABASE ENTRY DATE: 2001-12-06
cagggtttattctcttctgatgctgctttagtttttccggtgctcaaatgtttattgtcatgaacatagagggggtttactgtgatcttccaattaaccaacacaaaagggtatatgtgatatgatgcaaattatgcaattcttgagttcggtcatagttttacttattttcagcaacttgtaatttgtacagactcgattctgttgagcttttgattcaggaaacaatcaattcagtttcgggagtttacggagctttg

SEQ ID NO: 846 - DNA, 523 bp, Oryza sativa
  ref <308>: DATABASE ACCESSION NUMBER: AK058935
  ref <309>: DATABASE ENTRY DATE: 2001-12-06
tttttggagcatgaaaccagatgccactctagaccctttaagtttgcatgggggttgtcctgtcatcaaaggaaacaaatggtcatcaaccaagtggatgcatgtccgtgagtacaaagcttgagctttctgaagtcgtgattaccaaagatggaccctatataaagcattgactggggcactttccaggatggcagttatgtaggctttagagatccacaccggtggtattctttgctctctgagaatatatagtagaggcactaagcaagggggtttacttgtccataccgtgtttttggagatggtcttgttgaacctggcgccttttcttctttattttttctggcagactacagaggaatgaatggtccattgttggggacatagggtgtggcgtttgatttagtttgttttgtggtgtattgctatctgctaatgttagtagcttaattatgtacactgttgagctaagttgtcattactatagagctctctcctatacatgaggggaggtgacatg

SEQ ID NO: 847 - DNA, 323 bp, Oryza sativa
  ref <308>: DATABASE ACCESSION NUMBER: AK058936
  ref <309>: DATABASE ENTRY DATE: 2001-12-06
gttattattgcatggtacgtagctatatattgctgtgtgagtgagtgagtgattatgttgggattgggtgcgtgattccgcacataaactgtaaggtaaatatgtgttgagtattcttcgttttccaattttttcgattcagtacagtatatgcagctatgcatctgtctgaattttgagtcagtatgctcgtgtgtgcacggtccagattgatcgtcgatccatgaagcatctgtactgtcagtcagtgtcatgttcagtgtaccttcaaatttatttggaataaatcggcccatggaccgtctaccattgggctgttcgac

SEQ ID NO: 848 - DNA, 848 bp, Oryza sativa
  ref <308>: DATABASE ACCESSION NUMBER: AK058937
  ref <309>: DATABASE ENTRY DATE: 2001-12-06
tggctctgcttgatgagggtaaagttgttttgggtgtattggcttgtcccaacctttctttgggatcaataggcaaccttaatggtggctcctcgggagatcaagttggtgctctcttttctgctactattggttgtggagctgaagtagagtctttacagggctctccagcacaaaagattagtgtctgttccatcgacaatccagtcgaagcttcattctttgagtcctacgaaggggcacactccttgcgtgatttaacaggctccattgcggagaaacttggtgtccaagctcctccagttagaattgatagccaagcaaaatacggtgccctagcccgaggtgacggtgccatttacttgcgttttccacacaaaggttacagagagaagatctgggatcatgcagctgggtcaatcgtcgtgacagaagctggaggtctggtgacagatgcatcaggaaacgatttggatttctccaaagggagatttcttgatctcgacacagggatcatcgcgacgaacaagcagctgatgccttcactcctgaaggctgtgcaagatgccatcaaggagcaaaaccaggctgcttccccgttgtagtagctgtctcaatccacaatccacaaatatcataatgtttccatataataataattgcagtgctgcttccccatcaacattactttaaatgtgtgtacagcaccactttgttgttgttgctgctgcaaattcagtatcttattgttgcacatttctgcatctaattggtgggtgagctggcaccacatgaatgttctttcatctggattcagaagaaataattaaattggcctgattctccct

SEQ ID NO: 849 - DNA, 1401 bp, Oryza sativa
  ref <308>: DATABASE ACCESSION NUMBER: AK058938
  ref <309>: DATABASE ENTRY DATE: 2001-12-06
atggtccagtgcaccgtgtggatgtttgtgtggatttgctgcttgtgtgtttcggcaggatttggagcctcacgagagaagctaagctagtactactagtgtaaaatttcttggataccgtttgatctgagatctacagttttgtcacttcgttagattgtaagtagcgagaacatctgacaagtggatagttgttctgttctgcggcagctaggtttgtttaaggcttctgaaagaaaaagataattgtcacgtttggcttgaataagttaagcattttctgatcactacgtactgaaagatggggctccatggctgctcaggtgtcagatttccctcatgcatctgtgactgtgagcatgcatttgcatttggtacctttgcagctttgctgatcaatcgggacaattcttcacctgtgcacatcttatcgttgtagacttgtagaaagaagacatgatatgaactattatgaagtttgtaattggcctatcagtttgtaaattgcacatgaagtctttacatttacagtttattgcattcgcgaaaaaacatttacagtttacaaattggtaggaaaattagaaacataaacacatgccctcatcaatctgcaatcactgagttgattggtctgtcctgtcgtttggccgcttcatatcctaacttttgaggctaacaaatgaaagcagtcctctctttctctgaatgatgtccatttgattcatgggcaagtaatttgggcatatctgtgatttcttttatcgataaaatgcatgaataaacgtgtacgtttgatgattactcatgaatgtaacctttggtgtacagatcaaactccagtcggtgaagttagcaatgaagtacttgaagcgggtctcttctgaacttgaggccataaagggtggtcctgacgaagaagaactaatgcttcaaggagtgcgattcgccttcagggtacaccagtttgcaggcgggttcgacgtggacaccatgcgggcattccaagagctcaaggagaaggcatctatgtgccggatacaacgacaagagcagaaccgtcatctaaggaggcagcaaaaactcgttgccagggcctgagcaccattttactatcccgatgtatcatatcatttcgtcgttaccatagttcgtttgctttcttgcttgtttctgttgagaaatgttctcactagatttatcacaccagtgaacaatctatgttctcgttgtcactgtagccgtctttcatttttgtcccctccatgttctctctctagggccctattcctaaccagtatctcgtcagcttggctgggttgtgattagctttacataattttgcagcgaaatgtatgtgtgtggtggtagataaatctgttgtctggaaattctggtact

SEQ ID NO: 850 - DNA, 731 bp, Oryza sativa
  ref <308>: DATABASE ACCESSION NUMBER: AK104025
  ref <309>: DATABASE ENTRY DATE: 2002-08-28
gatgtgcagattcctcatcagtacgcctttctctcggaggagaggggaaaggaaggcggaggcggggaggatggcgcggagcgtgtcgtacgtgtcggcggcgaagctcctggccatggcgcgcagcaacccccgcgtcgccatcatcgacgtcagggacgaggagaggagctaccaggcgcacatcggggggtcgcaccacttctccagccgcagcttcgcggcgcggctgccggagctcgcgcgtgccaccggcgacaaggacaccgtcgtcttccactgcgccctcagcaaggtgcgaggtccatcgtgtgccaagatgttctccgactatctatctgagaccaaggaagaatcaggaacaaagaacatcatggtgctggaacgtgggttcaatggatgggagctttcgggacaacccgtttgccggtgcactgatgccccttgcaaaggcacatgctcacctgaagaacctgagttgtaactctactcgcttcctgaatgatcagcaatgttggcagtcgatctccaatgctgaatttggtctattttgcctcatgagatcattcgtcacagtgtattggactgaaatgccactttgtggacaatttcatcagatatagcataagttaactaccccactgtagtgtcaggcacaccacggggtactgaattattactgattactaaaaactctttacatcttggctgaagaaatgttcagcttcttc

SEQ ID NO: 851 - DNA, 795 bp, Oryza sativa
  ref <308>: DATABASE ACCESSION NUMBER: AK058939
  ref <309>: DATABASE ENTRY DATE: 2001-12-06
gaaatgacgaaagtgcgcctcccgccgcagaccagaccgaccaccgatcgacgacttctctccgcggcgcaccacggattagccaaaaataagcgagagcgagtacgagagagattgagagagagagtcagagagagagagaagaaactgctctcgagatctcaccggcgaggcggggcgagatctggtaagagagaaggagggagggaggccgagagagcgagatgcacgacttctgcttcacgatcccctacggcttcgccgtcctggccggcggcgtgctgggctacgcccgccgcggcagcaccgcctccctggccggcggcgcgggcgccggcgcgctcctcctcctcgcgggcttcgtcagcctcaagaccttcgagaagcgccgcaactcctacctcgccctcgccctcgagaccctatgtgcactagctttgacttatgttatggggcagagataccttgagacttcaaagataatgccagctggtgtcgttgctggcctcagtgctttgatgtctgcgttctacctgttcaaaattgcaactggtggcaaccatatcccaccgaagaaagagtgaaccaggctttgcttgtgaagcatgttttgttatactctaagactacgacagatttgtgttgtggagtttcattgtaagtccagtgatcagcaaagccatttttcgcctgtaattctttagagtgcacttctgatgtctgaacaatgtaaaagaattaaatatttaacttcctacggtacgtgtatatgaatgatatactcctgaacttttt

SEQ ID NO: 852 - DNA, 499 bp, Oryza sativa
  ref <308>: DATABASE ACCESSION NUMBER: AK058940
  ref <309>: DATABASE ENTRY DATE: 2001-12-06
gagtgcaacacagaccaaagcaatctagtgaagaaaagccatagaaacagaacctagcagaaagcaagcagcaatgccgatacttgagctagcgatcttcatcatcccgatgacgctcatttttgccccatgccggcgattagtgttactaattaccaagcttcagcaactggaagagatcatcatgcacacaaggtcaacatctccagcaatatggagttttctggcaaggatacaaacaataaggattacattatgaagctcggaagtggctgctctactggtactggagatacgcaaagtaccagtttcatcaggtgggtcagtgtgtggccttagatagatttcttttccttgcctggtgcggtgtgagtgataaccaatcccctttgttcatgatgactgttctgtattatagcagttctcttgaaaccaatgtgtagctttcctcgatgcatgcaaaaatggagaaaagaatacgcaaggggtagttttctct

SEQ ID NO: 853 - DNA, 758 bp, Oryza sativa
  ref <308>: DATABASE ACCESSION NUMBER: AK058941
  ref <309>: DATABASE ENTRY DATE: 2001-12-06
gctgcagtagcagaagcgtctcgctttcccctttgctgctgctgctgctgctgcgccgccgcctccgccgccgccgccgccgattccgctcccctcccttcccctccgagctcagcaatggcaaattcatcatctggagttgcaattcatgatgattgcaagctgaagttcaatgagctacagtccaaaaggatgcaccgcttcataactttcatgatggataacaaggggaaagagatcattgtggacaagattggggatcgcacaacaagctatgaggatttcactagcagcctgcctgaaggggactgccggtttgcaatctatgactttgacttccttactgcagaggatgtgccaaagagcaggatattctatatcttatggtccccagacaatgcaaaagtgaggagcaagatgctttatgctagctccaacgaaagattcaagaaggagctgaatggcattcagttggaagtgcaggctactgacgccggcgaaatcagtctcgatgcgctcaaagatcgtgtgaaataagcattgccatgcctttcatgatcttgcaatatggacttgtctattatggatttgtgtgtcactataaatttggtagtgtgagactgcttgatggtttgtgggtttgttcatggaaccatggagatatggctctatcctgtatttcgttgttgcgctcagaatgtatgggcctgtgatgcactgttccaagtttaattgagatgtgtcaatgttcaagttac

SEQ ID NO: 854 - DNA, 536 bp, Oryza sativa
  ref <308>: DATABASE ACCESSION NUMBER: AK104026
  ref <309>: DATABASE ENTRY DATE: 2002-08-28
ctccttctccggttctccctctcctatctctctctcaccggtcggcatggagcagcggtaactccacgaaaaggcccggcggcggtgactgcaaagcgagcatggctcgcggcaactcaacaaagcggcccaccagcgacggctgcaaagcgggaaggaggggcgtagcggcggctcagtgaaggggtttggcgcatctcctcctctgctcccgcccgcctctaccaactaagcccatagtcgacgagcctcgagaggccgcatcagaagccaacagccttgggtggtgacgacgacctcgatgatatgacgatttctaggaacaagctcgggggaggtggatccatcgccggtgagcttgggggaggccgacgatccgttgccaacaagctcaggggaggtggatcatcgtctgcgggctcaggggaggccgattattcatcagcttgtttgtaacctattgtttgttctagtggatctaattatagctgtgttcgatgttgttcttgtttatacttgtcttttcttgtttgtct

SEQ ID NO: 855 - DNA, 1103 bp, Oryza sativa
  ref <308>: DATABASE ACCESSION NUMBER: AK058942
  ref <309>: DATABASE ENTRY DATE: 2001-12-06
atacaagacctcctcttttgcagctgatgtggtccaaggacattattgttgcaaatataacattgaagaattcacctttctggcacttccacccatatgattgcacgaatataactgtttctaatgttactatcttagctcctatttctagtgctccaaacacagatggcatagatccagattcttgtcaggatgtgcttattgagaattgctacatttcagttggtgatgatgccatagcggtaaagagtgggtgggatcaatatgggattgcatatgggcgcccatctcgtaacattgtgatacgcaatgtaatggctcgttcattggtcagtgctggaatttcaattggcagtgagatgtctggtgggattgcaaatgttacagtggaggatgtccgcatttgggagtcacggcgaggtttgagaataaagactgccataggaagagggggctacatccgcgatatctcctatcgcaacatgaccttcgacaatgtccgtgctggtattgtgataaaggttgactacaatgagcacgctgatgatgggtatgaccgggatgcctttccagacatcacaaacatatcattcaaggaaatacatgggcgaggtgtccgggtgccagtccgtgctcatggcagcagtgacattcccatcaaggacatcagctttcaggacatgtctatcggcatcagctacaagaagaaacatattttccagtgttccttcattgaggggcgtgtcatcgggtcagtgtttccaaaaccatgcgagaatttggatctctacaatgagcaagggcagcttgttaagcgtgcagcaatggtaaacagcacggaagttgattatgacatatgatgatataggtggctaaggctaacagcagaacatgggtggcattcccatcctcatttttgttcttttagtctttctgtgttttttgagattagaactgtatatacataggagattcacctcttcataggtttgaatgcagtggctaattgtatctctcatttcatttgtccaccagcattttgttcttgctgccaaacatgtaatacaaccttgcaatcttagaaatacacttggccattcacc

SEQ ID NO: 856 - DNA, 956 bp, Oryza sativa
  ref <308>: DATABASE ACCESSION NUMBER: AK058943
  ref <309>: DATABASE ENTRY DATE: 2001-12-06
aaaagatgacaggttgacctttgtttggttggatggagaagtgcagaagaaactttgtgccttctaccttgcaactgattacagtggagcctgtggtcctggaggttttggagatgataatgataaatctgaactgtttattgttcgtttccaaagaaatgcaacatttgaggcgttgaaagctgagaaaacaaataatcttatggaggctctccaaagacagcataccgctgatgcctcccagctagtggcaaggtataaaggcccggacgaaatagaggagataaacaaatggatctctcagattatcaaagatggagatactagggaaataccttactttacttcaaaggtaccagatcttgtgcctgaggaaacaagtaaggaatggataaaaagtaccaaaagtatccgctcagcaggaaacagtgtaaaacagaggatccagagcagtggatttcatttcggagattacctgactgacccaaggatcggcccagctttgcttatgtctgcatgcatttcaatgggaataatatggtacaagagcaaccaacgaactcaaactacggaggatggagcacctcctaaagacaaaactaagaagcgtcgtcctcgtccgaagcttagcacgtcactgtttggccagcccgagtatcccgctgacgctgatcctgaacccaaagatgctcgtcagtgggagatgactgactctgattcggactagcgagttaaactctctataatcaatccaccaataggactagagataggactaggtaaaatgctaatgccaccaatatctgcaatcttttttttttagaattccaatatatgcaatctggaaaaacttcgagcagttcatctgtctgttcattcatgtatctacccaactgcttggaagcggacaagcatgatatagacctctcacgcagtaatatactgtatgactgtat

SEQ ID NO: 857 - DNA, 972 bp, Oryza sativa
  ref <308>: DATABASE ACCESSION NUMBER: AK058944
  ref <309>: DATABASE ENTRY DATE: 2001-12-06
cagcggtgaaatctatgccctcagagtacctaaggcaaggggaagctgagatgatagttcctttatggctcagcgtacttcatgatgcagcctcagactatcttcacagtaggactggtgataatgtcagaaacaaccatgcttacatgcaagggaaaggcggaagaacccttaagcgtattgccagggactttgcagaaagccatcggaatgcccccatgccctgcccttcataacgtgtttgatgaaactacctcatgcggatggaactgccgcgattaatagtgttgattttggagctgtcaatgatcccggagagctcactgctcacatgaggatctaaagagagaccgtgtggagcttctgtctggcgttacgggtatatcacaatgctgataccaaaggtttgatctccacatattccatccgttatcttttagcgggattaggaggtcgtttggtgcctattatgcaaaagacctggtttggagtctgtttctccttttgcatagcggctgcaagggacaaggtcactctgcagactagtagctgctcagatttgagtgggtcagtatcctcgaggccaatgaccgttcttcaagttggagtttgctatgctatactcttggaaacacatggtttagctgtggcatactccaacatcttctggttttttgggaagctgggaacgaagaggtcagaggtgaattttatagctctctacaccctcttttcacaacccgtgcgatgtacaaaacattcatctgtattctgtctcaaattttgagttcattacctaagttatatgtgggcatgtccgcatgtgatcaaagccatcagcatgtcaagtgaaattttgaggggtaagattttgagaaatgtatatataattgctagctcatgaatctcccctttaaaactaaatggggtttgaaagactcatatagatatttatgtggcctcattcggatc

SEQ ID NO: 858 - DNA, 1313 bp, Oryza sativa
  ref <308>: DATABASE ACCESSION NUMBER: AK058945
  ref <309>: DATABASE ENTRY DATE: 2001-12-06
aaagcacccaacttgttctcgtttgttctgacggcgagagaaccaaccaaccctaccttggctttgccggcgggcggcggcgatggcggccgcgacggaggctgcctccacctcggaggcggaggctgaggggaggggcaaacccatcgtcgtccgtgtcaagcgcaagccctcccagacccgccccgacgctttctggctagagatcaatgagaggccggtgaagaaggctatgctcgatttctccagcctttcagtctccgatccatcctctgctcctaataaagcttcagaggaaccacgggttaagaaacttctggtacagcacattgagacagtacaccattctgaggcagttcaggatgttttgcactctcttctgcattctgacttggatgccaaagagataaagagcaagacaaaggaatggaacaacagaactaagcaagataaaaaacaagaccagctacggtcagcagccagacagaggcatgaggatcttggaagaaatgctcgctttgcgcaaatttggaggagtcggaaaggagacaggaatgaagttgatgaatcactacgagaaatatgccatctttatgatgctgtccaagtagattctgatgaagagaagcatcccacagaaccaaggattacgtcttttgaagagggcgcaattttatgcaattttcttccacttatacgggaacatttgccgtcagctgctgaagaaattgaatcagatattatttcgctggcacaatcggaagattcagatgtttatgacatatatactgtcacggaggtggatgatgatacaacaatggagggcacatcttcagctccatacccactattacaagtggacaatgacgatgatgtatgttatgatgatgacgatccttatggtacagatgattcaaatgcggaggataacccattatatgattatcctgaagagttgtcagaggatgaggatgatgattccaatagcgagaatccattttcagagctagacggttctgatcccgagtatgagaaggaagaggtggaggaagaaagggatgaagacgggagatagaatctatgctcggggtacaaatatgggtagtaactagagataagatgatgtatgggctagcgcttgagctggctgtgatgtttcctgttgggctggctatatgtgagagaacttttggtgttagtatgctgatgaattgtattcccagcctcagctgttagacctgtaactcgatatgatcactgaaggagaagtgtaggagtaagaagaatgaattattaaggccgagtttagttcc

SEQ ID NO: 859 - DNA, 1373 bp, Oryza sativa
  ref <308>: DATABASE ACCESSION NUMBER: AK058946
  ref <309>: DATABASE ENTRY DATE: 2001-12-06
tcgacaaaagatcaaggaaaatttgttcctagtgaaaaggttatgcagcttcgaaacaaattgatgaagtttatggaagattacatatacccgatggagagtgagttctataaacgcgcacattcgacctcaaggtggacaattcatccagaagaagaaaaactaaaagccttagcaaagagagagggactatggaacttgtttattccgctagacagtgctgctagagcaagagagcttctgtttgaggacatgtctcatggttctcctggaagttctgaggagcttttgctaggtgcaggtctcacaaatcttgaatatggatatctatgtgagattatgggccgttcaatttgggctccacaaatatttaactgtggtccacctgatacaggcaacatggaggtcctgttgagatatgggactaaggagcaacaaaagcagtggcttgttcctttgttggaagggaaaattcgttctggatttgcaatgacagaaccacaagttgcatcttcagatgcaacaaacatcgagtgttcaatatcaaggcaaggagatttctatgtgataaatggaacgaaatggtggaccagtggggctatggatccaaggggaagacagatttttctgcacctaaacataaacagcaatcgatgattttagttgatgtcaaaacacctggagtgcagataaggagaccgttgttagtatttggtttcgatgatgcacctcatgggcatgcagagattacttttgagaatgtgcgcgttccagccacaaatattctccttggggaaggccggggttttgagattgctcagggaagactaggccctggaagattacatcattgcatgagactaataggggcagcagaacgtggcatgaatttgatggtcgagagggccttaagtaggaccacttttggaaaaaagattgcgcaacatggttcctttttagcagatctggcgaagtgccgggtagaactggagcaggctagacttctggtgcttgaagcagccgatcaacttgaccgacatgggaacaagaaagctcgtggtatccttgcaatggccaaggtggcagctccaaatatggccctgaaagtgcttgacatggcaatgcaagttcatggtggtgctggtctctcatcagacacagttctatcacatctatgggcaactgctaggacactgaggatcgccgacggccctgatgaagttcatcttgggacaatcgctaagctggagctgcaaagagcaaggatgtagtctcgcgtcatcaggatgccgcccagatttcatgaataataaatactaggggagagggaaatcgttgtgtaacatgtccccgtttttattgaacgaaattgg

SEQ ID NO: 860 - DNA, 730 bp, Oryza sativa
  ref <308>: DATABASE ACCESSION NUMBER: AK058947
  ref <309>: DATABASE ENTRY DATE: 2001-12-06
acaacctgacagccgcggcgagacaagtcaagattcaaaccaacccaacccaacccaaccgccgtcaccgacgacgaccaccaccaccatggcggccaaggcggcgttccccgcgccggccggcgacgagccggcgatcggcatcccgtaccatccggcggcggcgggggcccagggcggttactactacgcgccggacccctacgcggcggggatgcccccgccgaacgcgatctacgccggcgcgcccaagggggtgcccctgcagcagaccatgttccgcgacacccccgcgccattccactgccaggcctgcggcgccgcggccgtctcctccctccggtcgaagccaagtctagcatcagttgtggcttgcatgatgcccttcatgatgggcgtctgcttcctttgtccttccatggactgcctctggcacaaataccactactgccccagctgtggggaaaaggtggctgagttcaagaagtcggatccgtgcctcgttgtggatccaactcgctggtctgaaccgagcttcgctgtgcctgcgtaagaacataccctcttgatatccaaaccgtttccatggatgagaactatgcattgttcttgagtgatctgctctgtacatagagaaggcaactaccttgttgtataccatatatatgtatctaaaccgctgtattttcgctaaagtaatgaactgtttattcatgtttgtcactcgatc

SEQ ID NO: 861 - DNA, 681 bp, Oryza sativa
  ref <308>: DATABASE ACCESSION NUMBER: AK104027
  ref <309>: DATABASE ENTRY DATE: 2002-08-28
agcacggaaaccgcccaccaactttcgccgcatggccgccggtcgccggggcggcgtctgagagggcgcccgcgcggcgcgcggcgcgggtcggaagcggaggagggcgatcgagatgagggagctcgccggcagccccgagacgtggagcggcctctcgctgcgggtggggcagctcgtcttcgccgccgcgtccgtctgcgccacggcctccgccctcggcttcgccgcatacaccgccttctgttacttgattgcatcgatgggactacaggcactctggagcttgggacttgcttgccttgattgctatgccttgaaattcaagaaagatctccacagtgctgttctcctgagcttatttgttgttggcgactgggtaacagcaatcctgtcgttcgcggcatcatgctcagcagcaggtgtagttgttctcttcgatagggacatatacgcttgcaggaatccccaactcccttgtggaagatttgaactagccatagcatgtgcttttctttcttgggcgtttagtgccacatctgctctcgtaatgttttggctcctcgcttcattgtgaataaatttgtacaacctctgtctgtagctcccctctgtttgatcccttctctgtatacgaactaatttttgaagacgacaacacaacagaagttctgaaatgtc

SEQ ID NO: 862 - DNA, 1100 bp, Oryza sativa
  ref <308>: DATABASE ACCESSION NUMBER: AK058948
  ref <309>: DATABASE ENTRY DATE: 2001-12-06
atttgactcatacacttgacaaggtaagatatgtcatgagatgcatatttggggatcccaagaatgctcctcctccactggtgaggctaactgggagaagtctagtttctgccatctggaaaggggaaggctcgttagttgatgaacttcttgagtcaatggaacctcatgttgaggaagatgtacttactgacctcaaagccaaaattcgtgctcatgatccatctggttccgaggacattgagggagaaatccgaagttctcttttatggttgcgtgatgagctgagaactctttcatgcacatacaagtgtcggcatgatgctgctgctgatttgattcacatgtatgcttacacaaagtgttttttcagagtccgagattacaagacggtaaaatctccaccggttcttatcagtcctcttgatttaggtcccaaatatgcagataaactgggaccaggcttccaggagtactgtaagacatacccagaaaattattgcttaggtcaactcatttattggtatagccagaatgcggagcctgaatctagattgacaagagctagaaagggttgtatgtcattgccagatgtatcctccttctatgtgaagtcagtaaaaccaacacaagagcgagtctatggcagcagaactgtgagattcatgttagcgcgcatggagaaccaggcacaaaggccatggcccaaggaccggatatgggttttcaagagtgacccaagattctttggtactccaatgatggatgccgtattgaataattccccccttgacaaggagatggtgcattggctcaagacaagatccaacgtcttcctaggctagccaaggaattgtaggcagagggtattggtttttttcctttggagattttagtcagacaccattcttttttcttcctactcacacctttcctacctaatcatggggatttagcttttagatggcagggtaacaacagtctctctcaccttccccatttgtacagccccctcctccccttaccttgtagagatgtgttccattattaactgatagatccatcattgatttaatgtagcgccttatcccgttgcgtag

SEQ ID NO: 863 - DNA, 160 bp, Oryza sativa
  ref <308>: DATABASE ACCESSION NUMBER: AK058949
  ref <309>: DATABASE ENTRY DATE: 2001-12-06
aactgtatgctagatcttgagttgcttttatttttaaaaggatgtcagaagctttactccttcaagtacgtgtatttattcttttggtagcagtaagataaacgctgcactgttgtacctgtacattacttcgcaccagatggcttccaatactttttac

SEQ ID NO: 864 - DNA, 1344 bp, Oryza sativa
  ref <308>: DATABASE ACCESSION NUMBER: AK058950
  ref <309>: DATABASE ENTRY DATE: 2001-12-06
accaccatcttgctccactacgcggaccaccgcgcgcgagcagagcatctcctcactctctagcttgctccagtttcgcgtagctgcgtgacagttcaattgaactctctggattcgttggttacttcgtctgagctgctgcagcgttgaggaggaggaggagcaatggcgctcacgacgttctccatttcgagaggaggcttcgtcggcgcgctgccgcaggaggggcatttcgctccggcggcggcggagctcagtctccacaagctccagagcaggccacacaaggctaggcggaggtcgtcgtcgagcatctcggcgtcgctgtccacggagagggaggcggcggagtaccactcgcagcggccaccgacgccgctgctggacacggtcaactaccccatccacatgaagaacctgtccctcaaggagctccagcagctcgccgacgagctccgctccgacgtcatcttccacgtctccaagaccgggggacatctcgggtccagcctcggcgtcgtcgagctcaccgtcgcgctccactacgtgttcaacacgcctcaggacaagatcctctgggacgtcggccaccagtcgtaccctcacaagattctgaccgggcggcgcgacaagatgccgacgatgcgtcagaccaacggcttgtcgggattcaccaagcggtcggagagcgagtacgactccttcggcaccggccacagctccaccaccatctccgccgccctcgggatggcggtggggagggatctcaagggagggaagaacaacgtggtggcggtgatcggcgacggcgccatgacggccgggcaggcgtacgaggcgatgaataacgcggggtatctcgactccgatatgatcgtgattctcaacgacaacaagcaggtgtcgctgccgacggcgacgctcgacgggccggcgccgccggtgggcgcgctcagcagcgccctcagcaagctgcagtccagccgcccactcagggagctcagggaggtggcaaaggtaaggcctcacaagcgttcaacgctcacgctcgattgcccactgcccagaaaggcacgtgaatgaaaaagaaaagggaagacaaaaaaacaaaaaatagtgtcgccggataagcgtataactactacgaaatgcgccaaatttttaacgggttttagaatgaaaccgtctagtttttacctaaattttaaggacacgttcgcttgtccagagagcagaggggccttacgaaatttgaaggcgaccatggaaattagtgaggaaatagtgacaatttaacttgcgtccagcagcagcaatcaacagtgttaagagtacgccgttagc

SEQ ID NO: 865 - DNA, 325 bp, Oryza sativa
  ref <308>: DATABASE ACCESSION NUMBER: AK058951
  ref <309>: DATABASE ENTRY DATE: 2001-12-06
tttcaacagttcaccaataagattcttgacattgttagcccacaacaatgaacaccaactttctggtggagctattcagcagaagagtgcacgcatcggggcaaatgacaacatgtagagcaacttacctcagatgctgttttcctaccatgatgagattgcctatacccgtgacatttccttctactactttgagaaagttttgtcgtccaatatggtgctagtattttaccatggcatctctggctcaatcaacaactgttcaatttgtctacatccgtgacatcttctttggctaatggctactgtgagagttttgttgtcc

SEQ ID NO: 866 - DNA, 263 bp, Oryza sativa
  ref <308>: DATABASE ACCESSION NUMBER: AK058952
  ref <309>: DATABASE ENTRY DATE: 2001-12-06
aaaattgggatcttcttgttggaacgctgaatcagaaatggatgcaatgagtacccctacaagtttattgagcatgttttggtcggttgtgtaccatactagctcgcattatagtagtaagtttgaaccttggtatgattggcaatatctaggttaggtaactcatggacatggtgaacaaatgtggtgtagaggaacatgagctatcatgtttatttgttcagtacaattgttccttgtgattatgttcataaccatatggc

SEQ ID NO: 867 - DNA, 1133 bp, Oryza sativa
  ref <308>: DATABASE ACCESSION NUMBER: AK058953
  ref <309>: DATABASE ENTRY DATE: 2001-12-06
gacagtgcagtacacactcattggccactttcccttcttccaccgctataccttcccttcctccatggcttcagaatctctgcaatgcaaggttttggctctcagagtgtccatccactgcgagggatgcaagaagaaggtgaagaaggtgctccagagagttgaaggcgtgtacagatgcgacgtcgatggccggagcaacaaggcgacggtcaccgtcaccggcaaggtcagcgccgacactctcgtaaggaagctgaggagggccgggaagcacgccgagcaatggccggaggagcagcagcagcagcaacccaatggtggtcagtgccaagaagaaaccaagaaccaagctgccgagccgggcatgtccggcgagccggctgagccggagaagccggcgtccggcgacgccgcggagccaagcgacccaaaggtgacgcatgaagaacccaagaaggtcgccggcgagggcgccgccgccgtggcgccggctgaagacggtggcacggagatcaccgacgccaatgtcagtgagagcgccggcgacggcggcggcggcggcggcggcgtcgagacggtcaaggcgcagcagcccagtgagcccaagaggagaaggaagcagcagccgccgcagcagcagaaagaggagaaggcaggtgaagccaccatggccacggcggcggcggcggcggcatcaacgcagggcaaccacacgagccaccacttcccggcggcgccattgcagcagcagccggtgcacgtcatgagctacaacgtggcgcggccgagctcgagcgcggcgtactacgccgccgcgcgtcctgcatccgccgcgaggcctccacctccattgccgccggcgccgccgcaggagcactcgtacgcgtactcgccgtactactcgcagtctcagccgtcgccttaccgctacggcggctactacagctactactactacggcggcggcggcggcggcggtggcggcggccagaggacgccgcagaggagcgcggcctcgccggcgaggaactcctacggcgaccttttcagcgacgacaacgccaactcttgcagcgtcatgtgaaaccaagctcgaaaaaattagttcagattacatgtttagacttgct

SEQ ID NO: 868 - DNA, 1780 bp, Oryza sativa
  ref <308>: DATABASE ACCESSION NUMBER: AK104028
  ref <309>: DATABASE ENTRY DATE: 2002-08-28
ctcctctcctcgcgacagcgccgccccaaaaaccctcaaaaccccggcggcggcggcggcggcggcggagtagtcggcggcggcggcgagatggcgacgcgggtgaaggacgtggcgcggcggtcgagcaagaagtacgtcgacgaggcgctgtaccggcggctgttccgccggggctccacgccgcaggccgtgcgggaggaggtggacggcttcctcgacagccggaagcgcgccttcaagtgggaggtcggcgtctgcgtccgccgcctccggaagcaggccctctaccgccccgccctcaagctttctgaagtcatggcaagaagaggcatgaatcctacagtcagtgaccaggcaatccgccttgatctcgttgccaaatcaagaggcattgctgctgctgagaagtacttcctggacctcccagaaacttccaaaactcatctcacatatggtgctcttcttaactgttactgcaaagacttaatgactgagaaggctgaagcccttatgggaaaaatgaaggaactcaactttgctttcactgccatgtgctataacagcttaatgacactatacacgaaagtcaaccaacatgagaaggtccctagtgtcatccaggatatgaaagccgatgatgtgttgcctgatatttatacctataatgtttggatgagggcgcctgcagctcgtgtagacataaaaggggttgagagggtgattgaagagatgaaacgggatggtcgtgttactcctgattggacaacctacagtaacctggcttctatatatgttgatgctggactgtttgagaaagcagaagctgccctgaaggagctggagaagtggaacactagcaatgatcttgaagcataccagttcctcattacattatatgcaagaacacaaaatttagtggaagttcatcgtgtttggcgatcattgaagcggaatcaaccaagaagggcaaacatgagttaccttaacatgattcaagccttggcaaatttgaaggatctgcctggtgctgaggcctgtttcaaagagtgggaagctcagtacatcaatccacctaagactaacacaaaggcccctgggacagctgaaacgtcatctaatgaatctgatgtcaaggcaaccaaggacaagggcacagatggggaattgaagcatcctaaatatgatatccgggttgcaaatgccatgatcaaagcatatattacagagggtatgtttgacaaagctgttgctgtcaagaagcgtgccaagatgcgtggtggaagacttaacgctaagacctgggaaattttcatggaacattatctcaaggaaggggatctcaagatggttcactggtgcgctgatcgtgcaatcaagaaagggcacagcgctggtaggatctgggtgccaccacatgaagtgactgaaaccttgatggattactttgagaagaacaaagatgtagatggagctgagaaatttgtcgaggtattaaagaaggtacagaaggatttgggcacggtggtgtttgaaccactggttcgcacgtatgcagctgctgggaagaagctccctgggatgaggcaccgccttaagatcgaaaatgtggaagtcagcgaggaaaccgccaagctgcttgattctgtctgtattgatcaatgaacgtgccttagatttggattatgtaataacatcaggatgcatgcaaattgacatggttcttctgcaaaacctgtaatagttgctgtaagctgaaatttagcactacatttacttt

SEQ ID NO: 869 - DNA, 483 bp, Oryza sativa
  ref <308>: DATABASE ACCESSION NUMBER: AK058954
  ref <309>: DATABASE ENTRY DATE: 2001-12-06
ccgtcaggtcaaccatctcttcgcagatccacctgctccgccgccgccgccgccgccggcctcctccgacccgcgcgtctcagccgtcgaggatgacagaggcaccgtttgtgccacgtgagaagctgtttaagcaacagcaatattttcagaatttaaccaagcacacctacctgaaggggcgttacgatgtgatcacatctgttgccattccccttgcgctggctggcaccagcttgttcatgattggccgtggagtttacaacatgtcccacggtattgggaaaaaagagtaggcggttcagtatctcaacttggcatggaagtggtaccatccaggctacattgtctttggttgcaaaataatactgtcaatctgagcacattttggttcgctttgttgttatttgtttatatctgatgtcagcaaattgatgctaacttatcagaaatgtgagaacattggcatcgttgcatttcccc

SEQ ID NO: 870 - DNA, 685 bp, Oryza sativa
  ref <308>: DATABASE ACCESSION NUMBER: AK058955
  ref <309>: DATABASE ENTRY DATE: 2001-12-06
atcaaagttcgtgcagtacagggaaatgatggtcgtcgaaggctagttgatataatccgaaccatccctgaactctctagaaactatttcagaagccggtcaaggagagctctttttggtggtatctcacttctgggaggcttttatgtggcgcagacaatatctctgtctttcggagcgttgggtgtgaacgatgtcatagcagcagttgtgtgtgtcctgcttactgaatacgtaactaagttctactacagccggcctaaggttaccttcccatttgctctcctcaacaacttcaagatgggtttcacatatggcctgtttattgatgccttcaagcttgctagctgacctgcaattcttcctattggtgctttgacatgttatgttcttgaatcttgaaaaacagcaaagatggtgaaaaaatagcatgcccccacgatgttattactgagacgagggatctatagttctgtggctttcctcagctttgttctcctatgtgaaggcaggcttgttgctggtatagtttttgagttggtggatagattttcaaagattggtccacatgtgggtatactgtagtgtgatgataacaactatttattttgagattcagattacatatgattgaagcccggtgtgtacatatgcaaatttcaagctatctgatcttgatcatctc

SEQ ID NO: 871 - DNA, 115 bp, Oryza sativa
  ref <308>: DATABASE ACCESSION NUMBER: AK058956
  ref <309>: DATABASE ENTRY DATE: 2001-12-06
aaaaaagtgtgtttatgcgtgtaaaatcatgtgtaatcactctcgtgtttaagtttttttttttttgctgtttcaaattcgatcggtggcaaatgaaggaagtgagcttatcctt

SEQ ID NO: 872 - DNA, 516 bp, Oryza sativa
  ref <308>: DATABASE ACCESSION NUMBER: AK058957
  ref <309>: DATABASE ENTRY DATE: 2001-12-06
aatgagagggacatactccggactcaggctgaaagctctggaaaatcccaaatggccatggagaaaatggtggaaggccgactaagaaagtattttgaagaagttgtgcttttggagcaaaaatatgttgtcaatgacagcacaaacatcaagagcgccctgaatgatttgtcaaaggaagttggctcaaaagttacagttggcaattttgctaggatggaagttggcgaaggagtttcagaggcctgatgagtccactgggtctgaagctacggctcgttctgcatagttttcaagctgacatgaatcaaatgtgataattgagatatgctgaggtttctcttcttctcaagttagatttattagtctcctgagaactgtactactttttccgcggtttggctccaacaatacggtcatatttttctacaaatgctatgtatcaattagtttacaagtgaactttctctagagagtattgtaacaattcgaatttaatgaaataatgtttgatct

SEQ ID NO: 873 - DNA, 894 bp, Oryza sativa
  ref <308>: DATABASE ACCESSION NUMBER: AK104029
  ref <309>: DATABASE ENTRY DATE: 2002-08-28
tcagatgcaaaagataccgctagtaaaaagaaggctgcaacagggagcagccacaagacaggtactccaaggacagtgagcaagagttcaagcaaaacaccatcttcaaaagtttccaaggaaaaggagagccctgaggacagtgcaaaagtcttctctaggaagaagaaatctgtcacaccaaagcgtccttcaagctctgaaaaggagataaaagacaagaagtcatcaggtaaaaaggtgacaaagggtaaaggagaatcagcagaagtaggtctacccagtaaggacgagctgaggaaaaccataactgaaatccttaaaaaagttgatttcaacacggctactttcagtgacattcttaaaaagcttgaggatcgctacaagattgacctgacaccacgaaagtcagctatcaaaatcatgatccaagaggagctaaccaggctgtcgaaagaagacgacgatgaggatgaggacgaggatggaaatgaagacgctgagaagaaaaaaccacaacatcaagccaaggaggtggtggcctgagctgagcattggtgaaacctcgtaggtttagcacccgctgttaattattatccgctgttaattattattttgtacctgcatgtatgccgaaccttgtgcttgcatcatgggcagcccccatgttaattattgttaatccgtgtccacagatagccaaaaaccatatccctgtttggtaatgtcaaaaacaaggttcgcttaggcagccctacacctgtagctgacttgggaggcaatttcttaggtaactgttgatgtccaaaaactctgcaatgggatgtggcagagcatcatgtaatgaatcatgttcgtcataggtttgaataacaagtggacgtattaggctgt

SEQ ID NO: 874 - DNA, 1259 bp, Oryza sativa
  ref <308>: DATABASE ACCESSION NUMBER: AK058958
  ref <309>: DATABASE ENTRY DATE: 2001-12-06
aattattgacgagatgcgctatactcttcaaaacagatttgctgaagctgaagtggagactgtagcagctgagaagaagaaggttgaaagggaaacattggctgagaaaatgttgaatgaacaagaactcatacttgatgctacaaaggaaagatccaagatgctggaacagcaagtgcgggagaatgcaaagctgagggagttactaatggaccgaggccaaattgtggatgcattgcagggggaaatgctgggaatcttcgataaaatttcacaacttcaactcagggttgataagcaacttcctgaacccctgctatcaagcatgtcctcctcagtcaactcagctgataacattgcacagctccagtgcagagttgatgacccacagcattctgttgatgattcattgcaactagcttcacctagattgtccagctcattcaaatcaacagatagcactgcgcaagcccattgtagagttgatgagccacaaatttctgttgatgaatcgctgcttcctgttgacgagtgtgagcagctgaaactgattttaccaaggttatctagctcagtcatgtctgcacaatcccaatatagagttgatgaaccgctacttcctgttgatgaggtgttgcaactagcttcatcaagcttatccagttcgctcaaatcaggagataacatcgctcaacttttgggagtacttgatgtgcatttacctgttgatgagttactgcaactaccttcattgatcttatctagctcagtgaaatcatcagacagcattgcgcagttccaacaaaaggctgatgctgatgagatgctgcaatcatctagcttagccagctcagagaaaccagcaactttcaagaattggtcatctgcttcagacaccattacacagttccagcaaagggctaatgctgatgagtcgctgccgcttccttcatctagcttggccagctcagagaaaccagcaacattcaagagtacttggtcatctgctgcagaatcaaattcagttttcagtggtgatgaagagattgatgatgcttccttccatgacagtattgatttggatgatagctgggatttagttgacgatgaagccatctatatgtgtgctaactagccgtatgaatactacacatatggtgctgaattcgtgaatggcgtgttttataagaagtaaaaccaaatctaggatcttgctatgaacttggtccttcttattatttgaattcgcaaatctgctt

SEQ ID NO: 875 - DNA, 1601 bp, Oryza sativa
  ref <308>: DATABASE ACCESSION NUMBER: AK058959
  ref <309>: DATABASE ENTRY DATE: 2001-12-06
gagccacgcacattttcacacttcactctctctctctctctctctctcgtgcgccgcgccgcgccgcgcggcgagggtggtggtgggtgagcggcgagccgagccgggccacgggcggcgccgcgggaggcgtcccggcgagcggaggggaggggggcatccgagcgctgggggaggtagctcagcgggaacgggaacggggcgatcccccccggcgttctcctccccggtctctcctgtagctagctagctagccatggcggcgaatggcgagggtggcggcgacccggcggcgcggaggcggtgggatctgacgaacaagggtgccgagagcattccaatggtgaaagaggctgtggaaatgtccacagacgaagaatcagacggtgtcgttatatgtccaccagatggcaacaatgatgatcgagaggaagccattagtagtaataatcatgataattgccaggaaggcgaagtcacttgtgttaaagacccggttatagacagtgaaacccaggaagacaagtgtgtgaaccaagattcagttaagttgatagatcaagagaagtctggtccacccaaatcaccatctaaacctggcatttctgggtcagataggtccaaacgtactgttcctcaaccatttgccctttcttctcaaagaaaatctcatggaggaaatagtaaggcggctcatccatctggcaatggagaaaattctggtgataagagcaactcctctccagcaagtttgacaaagaagactgcaccgattactcccaagaagattgcacagcctgatcatatgcttcaccatcaagaggaggactcctgctctgtgacttcttcaaccacaacttcaacaagagctggcaaaaccaaggcaactgttggtgttgccccttcatttgtatgtgctgatcgtgctgacaagagaaaggagttctacacaaaattagaagagaaacacaaggccttggaagctgagaagaatgaggccgaggcccggaaaaaggaagagcaagaaacagccttaaaacaactaagaaagtccttagtcatcagggcaaagcccatgccaagcttctaccaagaaggacctcctccaaaggctgaacttaagaaggtccctccaactcgtgctaaatcaccaaagtttacaaggaggaggagctgcagtgatgcaccgccgacgccagaggcagcaaataccaccgcagcatctagtcgatcacatcgtcacagcattgcgaaccctaaagatgctaacagagtacaatgctcaccaaaaaatggcgtcgctgccaaaactagagctgtcaaacctgtgagctgaaggccctctggagattctagatcagccaagtgttgcgaatgtcgctgtacaaacctaactttagccgtctctcggtttcatggcattttgcatttgatttatacttcctgtcaccaaaagaaggccacagtgccgaggccggtgtgcttgcagctgaaccctttcatttcttttcttcttttcgcgttgctgtgtaagaactctgttgctgggaccatgtactgtgttccttgttgtaaatggtcgagggtttctgtcagaactc

SEQ ID NO: 876 - DNA, 874 bp, Oryza sativa
  ref <308>: DATABASE ACCESSION NUMBER: AK058960
  ref <309>: DATABASE ENTRY DATE: 2001-12-06
aataaagacggtttatgagacgttttaaataacgccctagttttacattgatttctcaaaaattaagattacattgaatttttttttctcctggaaaccacccacgtcctcatcctctctgcgtgctgcaacaaactcccatctagattgaactgcctgcttggtgccgccgcctatcttccaccggtcgccatctcgatgcctgccgccggctcgtcctcgaccgggggccagcggcgcctcatcctcggcgagtcaatgccacatctgcctcctcctcctcaggccgccgcccaccactgcctgctctgatcctcgccataggagccaccgctggcagtttgccgccttatcagcgactccccgtcgccaacgcgtccctccctcagttgccttcaccagcccagcgacaactccacggtggtagcttgcttcaagaaggcacaaaaatacagatgagtattgttgaagttctgaatgatgcgatggttcttcatactgtccttcggtggcatatgagtaaaggaatagagatgctggtccaaaatgggagatttgctttctatatgctgaagtttccaaagtatttacatgcaggagggagagcaactgctaaagtgtcaaagatactgaagattgtaaaggattgctacatcatgctgtgaaggaggaggagataaagcaagaattatcttaagaacagttatagatatattttatcatgctgtgaagaagggaggagataaaacaagaattatcttaggaagagttataaatttatttttctaagagatgacgcaaatctcttttttctgtatggctgtttagctgacttgtgaatcacaattgtccttaatataattacctttcatct

SEQ ID NO: 877 - DNA, 850 bp, Oryza sativa
  ref <308>: DATABASE ACCESSION NUMBER: AK058961
  ref <309>: DATABASE ENTRY DATE: 2001-12-06
ctttgcatccccaatcaatcagaaggcactaactctaggtgctgacttagttatccattcagcaacaaagtacattgctgggcacaatgatgttattggaggctgcatcagtggcagagatgagctagtttccaaagtccgcatctatcaccatgtagttggtggtgttctaaatccgaatgctgcctacttgattcttcgaggcatgaagacactgcatctccgtgtacaatgtcagaataatactgcaatgcggatggcccaatttttagaggaacatccaaagattgcacgtgtctactatcctggtctgccaagtcacccagaacatcacattgccaagagtcagatgaccggctttggtggtgtcattagttctgaggttgctggagactttgatgctactaggagatttattgattctgttaagataccctatcatgccccatcatttgggggctgtgagagcattattgatcagcctgccatcatgtcttactgggattcaaaggagcagagagaaatctatggaatcaaggacaacttgatcaggttcagcattggagtggaggattttgaggatttgaagaatgacgttgttcaggcgcttgacaagatctaagcacctgattgcatcctcatcatgagagttcatctatctgatcttgtttgcctctgcatcacgtggagaactttgatattccagctgagaattgcgaataagtttcttcattagttcccattatctagtctttagttccaattaagtttgtgtctctgttttttcctctcaaaatggctatgttcagaattatttttgaaatgctgaaaatccaccgttgtgttgtgt

SEQ ID NO: 878 - DNA, 909 bp, Oryza sativa
  ref <308>: DATABASE ACCESSION NUMBER: AK104030
  ref <309>: DATABASE ENTRY DATE: 2002-08-28
ctgccactcgcccactcctcctcctcccccatcctccagtgctacggtgtcacgcagccatggcgctccgcacgctggcctcgaggaaaaccctagccgccgcggcgctgccgctggctgcggcggcggcggcgaggggtgtgacgaccgtcgcgctcccggacctcccctacgactacggcgcgctggagccggccatctccggggagatcatgcgcctgcaccaccagaagcaccacgccacctacgtcgccaactacaacaaggccctcgagcagctcgacgccgccgtcgccaagggcgacgcccccgccatcgtgcacctccagagcgccatcaagttcaacggcggaggccatgtcaatcattcgatcttctggaataacctcaagcctatcagcgagggtggtggtgatccaccacatgcaaaacttggctgggccattgatgaggattttggttcatttgaggcacttgtaaagaagatgagtgcagaaggtgctgctttacaaggatctggatgggtgtggctagctttggataaagaggcaaagaagctttcagtggaaacaactgctaaccaggaccctctggtaacgaagggggccaacttggttcctttgttgggaattgatgtctgggagcatgcgtactacctgcagtacaagaatgtcaggccagactacctgagcaacatctggaaggtgatgaactggaaatacgcaggggaggtgtacgaaaatgcgactgcttgatgttgtctgaaggcaacgctcatggttttttttcacctagtactgccatggatctttgtatgcaataaaaatgggcctattgcacttctggaccttgtgtacattgcgtagaggtggactaatgcataacataatatgcctgagattttcttct

SEQ ID NO: 879 - DNA, 231 bp, Oryza sativa
  ref <308>: DATABASE ACCESSION NUMBER: AK058962
  ref <309>: DATABASE ENTRY DATE: 2001-12-06
aaaaatcccctccccttacctattggtggcaggaggtggcaggcggcggtcgggcgggtggaggggaggacggtggcaggcggcggcccggaggggttgtcgcggcactgacgagcgggctgatgcagcgctgaagacgacgatgtgaggacttgtttttgtgatgtcgttgtagatgtgtggtgctgctgtggatgattaattttgtgaagtatgtgaatttgtgatatc

SEQ ID NO: 880 - DNA, 352 bp, Oryza sativa
  ref <308>: DATABASE ACCESSION NUMBER: AK058963
  ref <309>: DATABASE ENTRY DATE: 2001-12-06
attttgtgactattgctaaggggttcaatattcctgcagtccgtgtaacaaagaagagtgaagtccgtgccgccatcaagaagatgctcgagactccagggccatacttgttggatatcatcgtcccgcaccaggagcatgtgctgcctatgatcccaagtgggggcgcattcaaggacatgatcctggatggtgatggcaggactgtgtattaatctataatctgtatgttggcaaagcaccagcccggcctatgtttgacctgaatgacccataaagagtggtatgcctatgatgtttgtatgtgctctatcaataactaaggtgtcaactatgaaccatatgctcttct

SEQ ID NO: 881 - DNA, 1168 bp, Oryza sativa
  ref <308>: DATABASE ACCESSION NUMBER: AK058964
  ref <309>: DATABASE ENTRY DATE: 2001-12-06
atgtgcagatctagtatagcttctttttcgctccacaaggatcaagatcaaatgaatacttattccttttctgttgacggaaggtatatctttggcctctcgatggctgatgatgaggtaagacatagactgttggatacttttggtaaaaaagatagggaaattcttgattattcaacgccggatcgaatcatgtccaatggtcattggaattttgtctatccttctattcttcaaaataattttgatttgttagcgaaaaagcgaagaaataggttcgccattccattacagtatcatcaagaacaagagaaagaaccaatatcctgttttgggatttcgattgaaataccctttatgggtgttttacgtagaaatactatagttgcttattttgacgacccacgatacaaaaaagataaaaagggttcaggaattgttaaatttagatataggaccctagaggacgaatataggactcgagagaaagactcagagaacgaatacgggagcccagaaaacgaatataggacccgagaggaagaatgtaaaaccctagaagacgaatataggactcgagaggaggagtatgaaaccctagaagatgaatatgggatcccagagaacgaatatgaaaccctagaagatgaatatggaatcctagaggacgaatataggactcgagaggaggaatccgaggacgaatatgggagtccagagaacaaatataggccccgagaggataaatatggcactttagaggaagactcagaggacgaacatgggactttagaggaagactcagaggaagactcagaggacgaatatgggaacccggaggaagattccgtcttaaaaaagggggttttgattgagcatcgaggaacaaaagaatttagtctaaaataccaaaaagaagtagatcggttttttttcattctccaagaactgcatatcttgccgagatcctcatccctaaaggtacttgacaatagtattattggagtggatacacaactcacaaaaaatacaagaagtcggctgggtggattggttcgagtgaagagaaaaaaaagccatacggaactaaaaatctttcctggagatattcattttcctgaagaggcggataagatattaggtggcagtttgataccactagaaagag

SEQ ID NO: 882 - DNA, 1480 bp, Oryza sativa
  ref <308>: DATABASE ACCESSION NUMBER: AK058965
  ref <309>: DATABASE ENTRY DATE: 2001-12-06
gcggatggggttgtgctccccgtccactcctcgtcagcccctctccaccgtcgctctcttcgccttcggcgcaggcctcctcgcctacggcgtccacctctcctacgcccacgtcgagccccagcgggcgcgcacgctcgcccgcgaccagttcgtccgcgattacctcaaaaggaagtacgacaagtagcacacggcctccccccctccccccaacgagatccccttcccgctcaatttcttgggaggggtgggggagcgatggctttggcccccgcgagctcgggcagtgggccggtggttacggaggtggagatgaacgccggcgccgaccagggtgccaccggcaccgtgcgtgccaccgtcgtgcaggcctgcaccgtgttctacgacacccctgcgactctcgataaagcagagaaactggtagctgaagcagctggatatggttcacagatagttctatttccagaagtctttgttggtggttaccctcatggatctacctttggactgactattggcaatcgatctgccaagggaaaggaagacttccataaatatcatgcagctgctatagatgtgcctggtccagaggtgacccgcttagctgcattggctggaaaatacaagattttcttggtgatgggggtggttgaaagggtagggtacacactatataatacagtgctcttctttgatcctctggggaaatacctcgggaaacaccgcaaggtcatgcctactggactggaacgagtgttttgggggtttggggatggatctactatacctgtttatgatactccaatagggaagattggtgccgtcatttgctgggaaaacagaatgccacttctcaggacagcaatgtacgctaaaggtgttcagatatactgtgctccaactgctgatttctcgcctagttggcaggcctccatgacgcatattgccgttgaagggggatgctttgtactttctgcaaaccagttttgtcgcagaaagaactatccaccagcgcctgaatatacttttggtggccttgatgaagagccatccccagaatctgttatttggcctggaggaagttccatcgtctcaccatctggaacagttctggcaggtccaaactatgaaggcgagggcctcctcacagctgacttggaccttggagaaattgctcgagctaagtttgatttcgacgtcgtgggacactatgcacgacccgaggtgctgagcctgaccgtgaaaaccgaatcaaagctgcccgtttcttttacttctgctgcagagaaaaattctgctgcaaagagtgacggtatctctaggacctgatggccattaatcttccatcgcggtgtgcaataaaattgtcagctggccagtgttggtatcacatgaataatctgtctttagtttcttgtaaagatttggagacgatgcttccctgataaacaattggtgcctatagtgctgtaat

SEQ ID NO: 883 - DNA, 1495 bp, Oryza sativa
  ref <308>: DATABASE ACCESSION NUMBER: AK058966
  ref <309>: DATABASE ENTRY DATE: 2001-12-06
atgtccccttctcctcggccgcgccctcgactccccgtctcgttcgcccgccgcgccgcgccgccttcccactgcatcccgcgccgcgccgccagccgccgcagcatcttaggaaggaggggagcccgcggcggcggcggcggccaagatgagcgacgacgtgatatggcactgcatccggcacaaccactgcagcttcatggccaagatcacgacggggatattctgccggaacccgtacaacgccaccggaatatgcaaccggagctcctgccctctcgccaacagccgctacgccaccatccgggaccatgacggtattttctacctatacatgaaaacagctgaaagagcccatcttccgaacaaattatgggagagggtcaaactacccagaaattatgagaaagcaatggaagtcatcaataagcatcttgaattttggcccaagttacttgtgcacaaaattaagcagcgcctgacaaaaatgactcagtatcggataagaatgaggaagcttcaactgaaagtgagagagaaggtgatgacaatgcccaggaaggagactcagcgccatctcagaagaatggataaagctgaaaaggccgctcagttggaaaagaatattgaaagtgaattgaaggaacggttgaagaaaggtgtctatggtgacatctataactatcccttcaaagaatttgacactattcttgaaatggaaaaagatgatgtagctcctactgaggaagaggaagaagaagaggtggagtatgttgaaggtgatgatgaaatggatgacatggaagacattgaagattttggaggccttcctgatgatgatgaagatgatgataatgatggtgagacggatgaagatgatcttttggatgaaccggtagcaaagaaacctaaagggcgaggttctgatttgagatcaaaatagggaaaaatccaagaagcttatcactgaggtggaacgagatgatgacatgggtatcagacgaaggacgcgaatgtgagttgtgcgagcactggcttcaattgcatatgccacggggtgctgtgctgtcagttttggttgtacctgagattggcttagacttagttgctgagaaatcaagatgagttgtggcatagaacattatatttatatgttggcaaactattaggtttagcgttcaaattgcaagataagtgtaacattattttgcagcaagcactttacaggaagatgctcactctggcctgaggcagttgtttagggttgtttgtatcaacttatccatcgacggataagccatccaatttggctcttaggcaagcgggtgttttgcgttacacagatcttaacagttccaacgtcacaaacaatctgtttgtaaccgctacgtccaccaaaagcagtaattttcttaatgttttgcagcaacatttgatcaaactctctggtttaaaatgatcattggatggtttccactggaattggaatctgatt

SEQ ID NO: 884 - DNA, 1736 bp, Oryza sativa
  ref <308>: DATABASE ACCESSION NUMBER: AK058967
  ref <309>: DATABASE ENTRY DATE: 2001-12-06
ttttttatgatgagcacctgaggtgttccctatcacctgattctcaaattgaagatagcggaagtgaagagtcaacagatgatgaaactgtggatatcaaggacagtggatttcatgatgcagagaatgatgcagatcaagaattagatgactctgagcgcatattgagtggaaaattaagtgaaaccagtgcatgcactgctggtgacctctatgactacaaggtagctgatgatgattcagacggtgaaccttctacagaagataaggctttggaaacaaaggtggatgtaaatgatgcccagcatagtcatttagctgaaaatgtttcagtgaatgtccagagatcaccgaatgaaaaagatccaccaaatatggtgtccagtcaggattccccgttgtcgatgggagatattctttcttctttggatgctggaatttccttacctggtcctggacctgaatattctgtagacaggcagtccatcaaatccaatggaactcagatgcatgtgaagcgctccaacttttggggacggaacaatggaagaaaaagtcaacagtcagaattggctgattcatcgggtgaagaagagcttgctatccaaagactggagatcacaaagaatgacctccagatcagaatcgcgaaagaggctagaggaaatgcaatcttacaagcaagtttggaaagaagaaaacaagcactacatgagcgccgtttggctctggagcaggatgtttcaaggttgcaagagcagctacaagctgaaagagatcttagagctgcattggaggttggattaagcatgtcttctgcacatatttctagctcacgttctatggattcaaagacgaaggcagagcttgaggagattgctcttgcggaggctgatgttgcaaggttaaagcagaaggttgcggagctccatctccaactcaaccagcagcgtcaacatcagtatggctctttggcagatgcaaatgatcgttatcaacatcttccaaaccatctcccacagaactttgttcaatcaggttttgatatgaaccttgctttctgtaatcaggagaagaagcaaaggaatgagcagggccccgcaggtgcatcgcattggagaagcatcaagcagcacgtgctacctcatggttcttcaaggcccttctcccggaagcactccatggacgcctcgtcgagtgattcgagggaggcatcaacgagcatgccagcggatggcaattccatgtccgtgaacatcccgaaggcaaccgagggcgtcgagtacgggaggcaagctcccgtggcatcgtccactctggtcgaactgacgaccaggctagatttcttcaaagaacggcggtcacaattaatggagcaactccacagcctggatttaggaaatggatcagctaatcatggtttcccatacaagtcttcgtcaccttggaacagtccaaggtaggaggagacttctttttttttgcgacattctgtttgtatattcttggtaaagaatcctctcgttttctttcgtagaagctgctagtgagaatgaatgtatatccctttcctgttcgtcttccatttgtttttgttttgttgttgcatgcggcagcctcttttgggtgtgattttgtaatatgctttttgtaatctattgtatgtaacacaagttggggggatcataatcattgccacttgtttctggtgtctttccaatatatattgtgttttt

SEQ ID NO: 885 - DNA, 1393 bp, Oryza sativa
  ref <308>: DATABASE ACCESSION NUMBER: AK058968
  ref <309>: DATABASE ENTRY DATE: 2001-12-06
ttagtggtgttgaggggatgcaggctgtcatggcaagtgattttgcaattgctcagttccgtttcctggaaaggttactgcttattcatgggcattggtgttaccgtcgcatttcagtgatgatatgctatttcttctacaagaatgtaacttttggagtcactatctttctctatgaagcatttgcgtctttctcagggaaaccagcttataatgattggtttttgtcactatacaatgttattttcacttctctcccagtcattgcattgggggtatttgaccaagatgtgtctcaaaggctgtgtctgcagtatccagggctctaccaagaaggtgtgcagaatatattgtttagttggcgccggatacttggctggatggctaatggcgtaatcaatgccatcctaatcttttacttctgcactactgccttcggtatccaggcattccgtcaggatggccaagttgcaggcttggatgctctaggagtcctcatgtacacttgtgtggtatgggtagtgaactgccaaatggcgctctctgtgaactacttcacaataatccagcacatattcatatggggaagcattgccgtatggtacctcttcctcttggcttatggtgctgtggacccgaggttttcgaaatcagcttacatggttttcattgaacaagtggctccagcactttcatattggttggtcacactttttgctgtgatggcaacactcatcccttacttctgctatgccgcaatccagatcagattcttccctatgttccacaacaagattcagtggaaaagacacttagggaaggctgaagacccggaagtggcgagacaattgtcgtcacgacaccggacatcgtcacaccagaggatggttgggatctctgctcgccgtgatggcaaggctatgcaagtaacgaaggaaaccgaattacaagttcagggataatttttttttccctttagattttgtatcctgtacagcttataggatgttatctcctgaaagatgacaaaaaaaaagtagactaattggaactcagggacattcttgggttgttgcttctatggtatttgtggagttctagtttagacagagcaagaccacagtatttagtagatagaccacaggaagaccaagagagcacctactgtaaagttcaattttagggttgtgtattcttttcaccttttcttttacacctctagatgtatgtaacttgatggtagaatttcattttattgtatgcctttttactcccccttacctgctatcccctcaagtgtattgtaaacaaatagtggtaaggaattgtgatgaaataatggctggcgccagtgttctattggaaaggatcataaatggaagtatgttgaaat

SEQ ID NO: 886 - DNA, 1566 bp, Oryza sativa
  ref <308>: DATABASE ACCESSION NUMBER: AK058969
  ref <309>: DATABASE ENTRY DATE: 2001-12-06
cacttgtcaaattttcagttcatttggccttggcaggagtgggcttacgtcaaggaccttccaaaatgggctccacagcgtgtttttgtccaagaagtattagaaagggaaattcgcttgtcctactttgacaaaattaagcagagcatagaggatgctgttgaattggaagaactgttacccccaaaagctgggcctaacttcagatatcatagtgatgaaggcaaagaaagcactgatggccacagactctccaaggaacttgttgccatggttagaggaaggaagacacaaggtgatattatttcatgggtagacgaaaaaataattcctgtaaatggtgccaaatttgcacttgatgtagttagccagacacttctggacattggctcaaaaagtttcacccatcttatcactgttttggagagatatggtcaaataatatcaaagctgtgcccgaatgaagaaatgcagttattgttgatggatgaagtcagtgcttattggaagaacagtacccagatgattgccatagctattgataggatgatgggttatcgcctactttccaatctggctatagtcaaatgggttttttctcctgctaatgttgatcaatttcatgtttcagatcgtccatgggagattcttagaaatgctgttagtaaaacatacaatcggatttttgacctccggaaagaaattcagacactcaggaaaggtcttcaagctgctaaagaggccagtgaaaaggccgccagagagttggaggaggctaaatctattattgagattgtagatggccaacctgtgccatctgaaaatccaggaaggctaagacgacttcaagcgcgtgctgacaaagcgaaagaaggagaagtaaccactgaagaatctttagaagcaaaggaggccctccttgctcgagggcttgaagaaagcaaggaattgcttaggttactattcaagagctttgttgaagtgctaactgaacgtttgccacctatttctgctgatggagatgttcctaatttacgtgctggagacccgaatgtaaattcttcagcccgtgaccctgaagcaacaaccatggaaatagacaatgaaaatggaggagataacgatagtcagctgaatggtcaaaacaagaaaatcagtcacaatgttggagagcttgagcaatggtgtctctgcacattgggctatctcgagtcgttttctcgtcaatatgctactgagatctggtcccatattgccatgttggatcaggagattttcgttgggaatattcaccctcttatccggaaagctgctttctccggtttgtgcagacctaccagtgaagggtctcacctttgattttgacccttccagtgagttggagtttacctgtattatacgcgacaaatttttcatcatgcttcactaactggacatgcccaaaagtactctgatgtgtactcaggaactccatcgattctcctgtaatcctggccccgaggaacacccttggtggaaagcactgtaacgactttaggtgattaaattatcagttaggtttatttg

SEQ ID NO: 887 - DNA, 306 bp, Oryza sativa
  ref <308>: DATABASE ACCESSION NUMBER: AK058970
  ref <309>: DATABASE ENTRY DATE: 2001-12-06
attctaaaagttcgatgaaatgttgatttcatgtgaaacttgtctgttcgagttgtgaattcagctattgagacagtgaaaagagcagttattccacaagatccagctattgagacagtgaaaagagcagttattccacaagatcagaactagacaagaacacttccaacctgtaaaatcttattttgtactattggctgtaatgacaatatgcggactatgagatgtatttgtagtatgcaatatccgttgtgatttttgcataacaagcagctgattatattttattattcatcttgcattgtc

SEQ ID NO: 888 - DNA, 1849 bp, Oryza sativa
  ref <308>: DATABASE ACCESSION NUMBER: AK058971
  ref <309>: DATABASE ENTRY DATE: 2001-12-06
gaaaaaggaaaaaaaaacagccaagccgccgccgcgcggagcacagcggctcagcgtcagcgagcgagcggcggcgcgcccccctcgtcacgcacgccgcactcggctgctacggtcctcacgccgcttcggcttcgcgagcggacgccggcgcgcgcgcgcgttcggcgagacgcggcggcccttctccccctcttgcacaccccccagaccatgcgcgtctccgaccacgctgctctcccgtcgcgctcctcccagcagcagcagcgcctgtccccgcatggcgagccccgacaaggtcggctgctcaccggagccgctgcccctcgaccgcctcctggccgagctcgccgccaacgccgagcggctcgggaggaggtgggaggcggcgctccgcaaacggggaagggagggagccagagcggcgggcgtggggttggaggagggtaggaaggcggattcggcggcgatgcagctgcacacgccgctgttctacgccacctgcgccctcggcgggctcctcagcaccggcctcacccacctcgccgtcactcccctcgacctcgtcaagtgcaacatgcaggtctttcgccgtgttactgtagctcaaatctctagcttccccaatgactaatggaactcatacaaatcactagctccctaaatggttaatggaattcgtgtgtacaatgtattcttgcaggttgaccctggtaagtacagggacatttcatctggatttggtgtcctgctccaagagcaaggtcttggtggattcttcaagggctggatggccacgctggttgggtacagcagccagggggcttgcaaatttgggttctacgagttctttaagaagtgctactcggacattgctggccccgagcatgctgagaagtggaagaccttcatctaccttgcagcgtcggcatcggctgagatgattgcagatgtagctctctgccccatggaggctgtgaaggttcgagtccaaactcagccaggatttgctcggtgcctgacggatgggtttccgaagattgtccaatctgaaggtgcctttgggctttataaaggactacttcctctctggggtcgccaagttcctttatataagcatgcagttccaaagccaaaagatgaatgcagtaagccactccagctagcagtgagctttgcagggggatatattgcaggagtcttctgtgcagctatctctcatcctgcagacaacctggtgtctttcctcaacaatgcaaaggggggcactatggctgatgctgtaagaactctaggagtgtggggccttctcactcgtggccttccactccgtattattatggttggtactcttactggagctcaatgggcaacatatgatgcatttaaagtctttgttggactgccaacatctggtggattcattcctagtcctgctgccaccgatttgcgccaggtggatcatgaaaagcggagttgaccacatcgcgtaaatgttgtgctgagctactacccttaatcggagtagatgatggcaggcagttgctctgattttcatgagagcgggaacgtaggagatgacctgttgagcgaatttggaacacaattttaagatttagcagtaggaaattcacattcaaggggtttttgttgctacctcttgaatgacaggcaagtgcaaggaaggcaataagcttgagggatgtatttggcacattgccaaactgatctgatcatctgatgtttcaattggtcattcttgcctctgttggcatttcctctggtagtttccatacgactgtttatccagcgtacatgatagcatgaataaatgaaaagaatgttaaac

SEQ ID NO: 889 - DNA, 2129 bp, Oryza sativa
  ref <308>: DATABASE ACCESSION NUMBER: AK058972
  ref <309>: DATABASE ENTRY DATE: 2001-12-06
aaccaaccaacctcaaatcaaatcaagaacagctcgtgcttagatcgctctctcgcttgctgttcttccaatccactcctcttgtttgtggcaaagatctgggttctttttttttctttttttgccgggtttttttggagaggttttgtgagcatggagggtttaaggggcggcggccatggcgaggcggcggtggacggcggcgacgagaggtgggtggaggactcgtcggtggattaccaagggcggcctcctctccgcgccgccaccggatcatggaaggccgcaatgttcatcatcttgattgagttcagcgagaggctgagctacttcgggctagcgacgagcttgatgatctacctgaccaaggttctccaggaggagatgaagttcgccgccaagaatgtcaactactggaccagcgtcaccaccctcatgcccctcgtcggcggcttcctcgccgacggctacctcggccgcttctccactgtcctcttctccactctcatctacctctcggggttgattctgctggcgatatcgcagctgtcgccgaggctgaaacccgagcgcaacctgcacctccacgagacgctcttcttcgtggcgatctacctggtgtcggtcggcaccggcgggcacaagccggcgctggagagcttcggcgccgaccagttcgacgacggccacgcggcggagcgggtgcagaagatgtcctacttcaactggtggaactgcgcgctctgcgccggcgtcctgctcggcgtcaccgtcatcgtctacctccaggagaaggtcggctggggcgccgccgccgtcgtgctcgccgccgtcatggccgcctccctcgccgtcttcctcgccggctggcgccactaccggtacagggtccccgagggcagcccgctcacgccgctcgtccgcgtcctcgtcgccgccgcgaggaagaggcacctccacctccccgccgacgccaacgagctctacgaggtgaagccgcagaatatcaagaggcggctgctctgccataccgatcaacttaggtttcttgacaaggcggccgtagtggagcacgacggcggcgaggagcggcgcggggcgtggcggttggcgacggtgacgcaggtggaggagacgaagctggtgctggcgatggtgcccatctgggtggcgacgctgccgttcggcatcacggcggcgcaggtgtccaccttcttcatcaagcagggcagcgtgatggaccgccgcatgggcccgcacttcacgctgccgccggcgtccaccttcgccatggccgccatcggcatgatcgtcgccgtggccgtgtacgacaaggtcctggagccgtacctgcgccgcctgaccggcggcgagcgcgggctcagcatcctgaagcgcatcggcgtcggcatcgcgttcaccatcgtggccatggcggtggcggcgacagtggagaggcagcgcctccgcagcgcctcgccggcgtccatgtcggtgttctggctggtgccgcagttcttgctgatgggcatcggcgacgggttcgcgctggtcggtctccaagaatacttctacgaccaggtgccggacagcatgcgcagcctcggcatcggcctctacctcagcgtcatcggcgccggcagcttcctgagcagccagctgatcacggcggtggaccgcgtcacctcgcacggcggcgccgccgccggctggttcggcaaggacctgaacagcagcaggctggacctcttctactggcttctcgcctgcatcggcgtcgccaacctcgtcttctacgtggtcatcgccaccaggtactcgtacaagaccgtcatggccggcggcaaggtcgtcgacgacaaggccggcgacatcgagtgcgccgccgccgcagctgctgctgcctactgatcaatatcaagcagtagctgatcgattagctagctagctagaaaatcatggtaagaaagaaaatggcatcatcatgtattatgatctgctttcgtggtacgtgacaacaacaaaaaaattgtaaggattatgtcgttcgtccatgtatatgcttaatctgcttgtgattgccatctgatcgtgtgatctactgctactgctgatgttgccaagtcctg

SEQ ID NO: 890 - DNA, 1175 bp, Oryza sativa
  ref <308>: DATABASE ACCESSION NUMBER: AK058973
  ref <309>: DATABASE ENTRY DATE: 2001-12-06
atgcactatctcccttcaaccctttgagcgaaatgtggcaaaaggaaggaaaatccatggaccgaccccattatctccaccccgtaggaactacgagatcaccccaaggacgccttcggcgtccaggggtcacggaccgaccatagaccctgttcaataagtggaacacattagccgtccgctctccggttgggcagtaagggtcggagaagggcaatcactcgttcttaaaaccagcattcttaagtttaagatcaaagagtcgggcggaaaaaggggagagctccccgttcctggttctcctgtagctggattccccggaaccacaagaatccttagaatgggattccaactcagcaccttttgttttgagattttgaaaaaaccctagccgccgttccagcttgcggagaagaagcgcgcgagccagcaatctcgggcggcggcggcggcgaggaggaggaagtagccggagaggagggagatggggagcgacacggaggcggagaagaagaagacgcccgtggcgctggcgcccatcgcgaagccgctcgccggcaagaagctctgcaagcgaaccctcaagctcgtccgccgagcgtctgaggccaaatgcttgaagcgaggagtcaaggaggtcgtcaagagcatccgccgcgggcagaaaggattgtgcatcattgctggcaacatttctcccattgatgtgataacacatgttcccatcctttgcgaagaagccaacattccttatgtatatgttccgtcgaaagaggatctcgcaacagctgggactaccaagaggcctacctgttgtgtattggttctgaccaagccagccaagggcgagcttgaggaagatgtcaaggagaaacttaagacggactacgatcaagttatgtctgaagttgctgaggtcacgtcttcaatgttctaagttcacacttgtacttgtagctacaaaatcagaatcaacatccacttccagcacacagccctgttttgtactgtgtcagcatgacatcaacctgtggcggatgtttttcgagtgcctgtaggagacaatagttcctctgctagattatctatcggatgttgtctttttggactaattgattccctacctggatcatatataattagctcctctataaatcattttgtgcgaaacaacc

SEQ ID NO: 891 - DNA, 1195 bp, Oryza sativa
  ref <308>: DATABASE ACCESSION NUMBER: AK058974
  ref <309>: DATABASE ENTRY DATE: 2001-12-06
ggtgggctcatctctctctctctcactcttctccctcttctcaccaccagacgccatcaaacccctacctcccgcggcggcggcggcggcggcggccggcggcgagctccggacagacagaggagggcgcgagcggagagggcgaggagggaaggagggagggaggcgacaggcatggggaccctcgggcgcgcgatctacacggtggggaagtggatccgcggcacggggcaggccatggaccgcctcggatccaccatccagggcggcctccgcgtcgaggagcagctttcaaggcatcgcacgatcatgaacatatttgagaaagagcccagagtccacaaggatgtttttgttgctcccagtgcagctgtgattggcgatgttgagatcggacatggatcctcaatctggtacggctccattttaagaggtgatgtcaacagcattcatattggatctggatcaaatatacaagacaattcccttgtacatgttgcaaaagctaacatcagcgggaaggttctcccaaccataattggaaacaatgttacaataggtcatagtgctgttctgcacgcatgcaccgtcgaggatgaagcttttgttggtatgggtgccactctgcttgatggagtggtcgttgaaaagcacagcatggttggtgcaggatcgcttgttaagcagaacacaaggattccttctggagaggtctgggtcggtagtcctgccaagttcctaagaaagcttactgaagaggagatagcgttcattgctcagtcagcaacgaactacatcaatctggcccaagtccatgctgccgagaattccaagaccttcgacgagatcgagctcgagaagatgctgaggaaaaagtatgcccacaaagacgaggagtatgattcgatgctcggcgtggtccgtgagatcccgccggagctcatcctcccggacaacatcctcccaaacaaggctcagaaggctgttgctcactgaatgttttgtcaagctcccgcttgggaaaagcttggtttttttgttacgtgttttgacctggaacaacatttgacacatgtcttttgatctcattgtctgtttttcaagcccaataagaatttgggtcgagcattgttttaggatcgaccatatacagtacctctctttgcattacaatgaagagcagttaatttgggtc

SEQ ID NO: 892 - DNA, 1550 bp, Oryza sativa
  ref <308>: DATABASE ACCESSION NUMBER: AK058975
  ref <309>: DATABASE ENTRY DATE: 2001-12-06
gataatactagatcaaagttaagaagagttgtagagtgggcctggatgcaacacaacaaatgcactctttcggaaaattgccataaggtgaggttgaagaactggaaagatgaaaaagaaaaggaatcgggaaacttcttatctatctcagagctactgtctcagagcaaattacatggtgttggtgtttatgcatccatttccaaaatggtgttaacaggttctctggcgtctcacttcaataggaagttttcagtcattgaaagattttccctgaaagaacatgatgatattttcagagatttagttactgctggatgcacgttatgtggttcacctttatatccaaaaaacctccatggagaaaatacttatcccattgactgcccaaaaagtccaaaatatcttcatgttattgggcagatatacaaacccttcatgatatatgtgcgagaccaatctggacaaattcctgttcttgtaaggaataaagctgcagagatcttgtttgcaaacattattgcagatgatgtatctgaatgctataagaaccatcatcctatgttgttagatacttgtgactgtggcagcttgaacacttcaggtggcgagacaggaattataaaaaggaaaaggacaaaagaaaagcctgattggcatctcatttggcttataataattaaatgtctgttgaatcaacacaagaacagcccattctgcttacaaatttcagtcaatactgacaagagtgtcgaagatggacgttttgaactggtttctctgacaatgacaataccatgaggtcgcatgtttttgtagcacagtatgtgttagttcaaatgatggttaaaactgaaaggtttctttccgtggattggatcagtggaacttatcttatctgatggtgcaacctttagagtgatatagttgggatggcagaactattaaccatcttcagtttgagaatgccttatcttacaataaactagacctgggccattccagactaaccttatgtctgacaacctggaactcattttgacgaacacagtatgagacaggccaggagtaacaatgatgcaggggattatgcaacatggtgatgataatgatgatttgaatctgaagcagccttgaaacagcaagtggtttttgccgatgcttccctgccagcaaataaagttagctcgatgattttcattaatcccctccgaagtggccatgctgatgattccattgtgatgtgtcctgtggttaaaattgttagctgcaacacggtcctggaactagaaaggccttccagacactgagcagcatgaggtgctttgacctcgaatgcttgatgatgaatcggtggtttatttgttcatcaatgcttgataatgtttttcttttgcttgttattgtcaaccttaggctatgcagttctcttaatgataatggagacagagttggcatgatctatccttttttaaaaaaactttgtaagtatgacatattcaggttgcttgaagcaacatttttctcattaccatttccttgcacctgac

SEQ ID NO: 893 - DNA, 302 bp, Oryza sativa
  ref <308>: DATABASE ACCESSION NUMBER: AK058976
  ref <309>: DATABASE ENTRY DATE: 2001-12-06
atcatctgctttcataaaatggacctgtttactcaaaatattcgaccgtgtcggttgaagctgaccttactcccaggtgcgaaccaataatgtaaaaaaaacatgtacttcatcctatttctgcaaagtagtttgatgtatttctccaattcttttcccatttgctgtggcgtcagtcgttgggatgtcatctttcttttcattttctggtgattacacatttttggcccttccataaataacacggataagccagtgtaatagggattaattaattaattaattatgaaccaactttggag

SEQ ID NO: 894 - DNA, 599 bp, Oryza sativa
  ref <308>: DATABASE ACCESSION NUMBER: AK058977
  ref <309>: DATABASE ENTRY DATE: 2001-12-06
atactatgttgatgctcaaactgtcttgcggtgtcataccagcgctcatcaagcagagctgctaagggatggacacacacatttccttgtaactggggatgtttatcgtagggattctattgattcaactcactatccttgcttccatcagatggagggcttccgtgtcttcactccagatgaatggtcagattctggcatggatgggacagcatatgcagctgcagacctcaagaaaacactggaaggcttggcaaaacatctctttggtgctgtggaaatgcgatgggttgacacatacttcccattcactaacccgtcctttgaactcgagatatattttcaggatgattggttggaagttctgggatgtggagtcactgagcaggaaattttgaaaaactgaagccttgtgccaactcattgcctaccgatggaatgtaaagtttgctttttatttatagcacaataaagagatatggttcacaaatagattgcaaatttctttcaaattctttgtattatatgtctataattgaacatggtacagataattgtcccaaaaagttgataataaggaatgaatgatgcgttgtgct

SEQ ID NO: 895 - DNA, 414 bp, Oryza sativa
  ref <308>: DATABASE ACCESSION NUMBER: AK058978
  ref <309>: DATABASE ENTRY DATE: 2001-12-06
tatggctacaaagttgtggagaatgggaacctgaggtctgcgctgacgacaagtaatgtgatcgaactcccaaagaaagaagagctcaaaactgtggttgacaaggtgaaggacttcttcggcgacgtaacctctggcgccaaagagtcgtttgcgcagattacaggatctgtcagcgcagaggcagaagcgccagtggaggaagagaagccctgggtgaagaggcgaaacgagaggaagcggaaacagaaggagaagcagaaccagaagcaggggatcaaaacggagagctgattgtaaagcgcagcataccagagatcgtcaagtgaacagccggctgtaattttccagtgtgctcatttccctgtcccagattagctctgtgtagttcctcaatacttcgagtttttttgc

SEQ ID NO: 896 - DNA, 1607 bp, Oryza sativa
  ref <308>: DATABASE ACCESSION NUMBER: AK058979
  ref <309>: DATABASE ENTRY DATE: 2001-12-06
atcccctctctccgcgcctcgcctcgccacccgcatcgccatctcgcaccgccacctcctccactctcggcggcgggggcctcatcgatggcgtcgaggatggcgctccggcccaacgacgtcacgctccgcctcaccccgcccctcgccgccgccgcgcggcgcaaccgccgcgccgccgccggcggtgtcagggtctacgccgtcgcgtccggggccgtctccaccaaggttgagaacaagaagccatttgctcctccacgagaggtgcacgtccaggttacacattccatgccaccccagaagattgaaatattcaagtctcttgatgattgggccagagataatattttgtcccaccttaagcctgtcgagaaatgttggcaaccacaggattttcttcctgatccagcctcagatgggtttcatgatgaagtcaaagaacttagagaacgtgccaaggaaattcctgatgattattttgtttgtttggttggagacatgattacggaggaagctcttcctacgtaccagactatgcttaacactctcgatggtgtccgagatgaaacaggtgcaagccccactgcctgggctgtttggacaagggcatggactgctgaggagaacaggcatggtgacctcctgaacaaatatctctacctcactggtagggtggacatgagacaaattgagaagacaattcagtatcttattggctctggaatggaccctaggacagagaacaatccttatcttggattcatctacacctccttccaagagcgtgcgaccttcatctcacatgggaacactgctcgccatgccaaagactttggcgacctaaaacttgcacagatctgtggcatcatcgcctcagatgagaagcgtcatgagactgcatacaccaagattgttgagaagctgtttgagattgaccctgatggcactgtgcttgcttttgctgacatgatgaagaagaagatctcgatgcctgcccacctgatgttcgatggggaggatgataagctctttgagcacttctccatggttgcacagaggcttggtgtttacaccgccaaggactacgccgacatccttgagttcctcgttagcaggtggaagatatctgacctgactggcctatctagcgagggaaacaaggcgcaagactacctttgcacccttgctgctaggatcagaaggctggatgagagggcacaatcgagagccaagaaagctggtacattgcctttcagctgggtatatggtagggaagttcaactctgagcatcagacgccattgcgacttcttcgagctccagtgttactactgtccgtgcttgtcgagacacattttgagaacaataccaggtgtgtcttgctacatagttcttcaggttgaccaaatgaactgagggcatatgttcgtggtatctttgcttagagtgatagagagatttgcgtctgtgttttagctctttttttcttttctgccttttcatgcacaacttctggccgtgtggattggacatgtactgaacgtgagtctgtcgttggccgtgtcaatctgctcgtgtgtttaaactggctgctgttcaggtctg

SEQ ID NO: 897 - DNA, 634 bp, Oryza sativa
  ref <308>: DATABASE ACCESSION NUMBER: AK104031
  ref <309>: DATABASE ENTRY DATE: 2002-08-28
acaaccaaggagttgggaactgtcatgcgttcactagggcagaacccaacggaagctgagctccaggacatgatcaacgaggttgatgctgatggcaatggaaccattgattttcctgagtttctcaatctgatggctcgcaagatgaaggacactgattcagaggaagaactcaaggaggccttccgggtgtttgacaaggaccaaaatggcttcatctccgctgctgagctccgccatgtgatgacaaatcttggcgagaagctaactgacgaggaggtggatgagatgatccgtgaggctgatgttgatggtgatggtcagataaactatgaggagtttgtgaaggtcatgatggccaagtgagccatggaaccatactctaaggcagaggagattgtgtgttgcatagtcctagttaagatgcaacacttgttttatcaatttccagtgaagcatcctactagctgtagtcgctaaaaaggattttcctgctatgttcctctgaagtgtgttttcagatctcttgtgttttatgtgaaccagtaattcttgtccttggtatgtccagattgcagttgggcctgtatgtagttatatattttttcatcaatttatgctcgagtctagtatc

SEQ ID NO: 898 - DNA, 1462 bp, Oryza sativa
  ref <308>: DATABASE ACCESSION NUMBER: AK058980
  ref <309>: DATABASE ENTRY DATE: 2001-12-06
aaaaatgcaacctctcatcaaccggctctctcctcctcctaaaccgggcagcttctctctctcgcgttgctgccgcgcgcggggcacacagctaagctagtgtcgccattgccattgtcttggaaggaggttggttagcatggctcgcgtgtcggcggcggcggttgccgtgctggtggtggcgttcgcggcggcggcggcggcgcaggagagctgcaacaccgagctgccgggcgtgctcgtcggcaactactccggcctgaattgccagccggtctggaacaatttcgtgctccggtatcaccaagacaagaacaacgtgctgagggtggtgctgtcgacgatgtacagcacggggtgggtggggatggggttctcccgggacggcctcatggtgggctcgagcgccatggtcgggtggatcgggcggaagggcctcccgcacgtcaagcagttcgcgctgcgcggcaagacgagcggcaaggtggtcgtcaaccgcggcttcctcgtctccaactccaacaaccacgaccacaccgtcgtggtgcagcaggccaggatctacctcgcgttccagctccagttctcctaccgactcacccaccagcacatcatcctcgccttcggctcctccatccccgtcaacaacaagctcaccaagcaccaggacaagacatccttcaccttcgatttcaccactggtaaagctttcgtggacgggtcgttcccctacggtctgaggagggcacacggtgctctgaacctgttcgcgtggggcgtcctgatgccgatcggcgccatcctggcgcgctacttccggcggatggaccctctctggttctacctccacgtcggcgtccagttcgtcgccttcatcatcggcctcgccggcgtcgtcgccggagttgccctctacaacaagatccaggccgacatcccggcgcacaggggcctcggcatcttcatcctcgtcctcggcatccttcagattttggcgttcttcctgcggccgaacacggactccaagtaccggaagtattggaactggtaccaccactggtcgggcaggctggtgctgttcttcgccgccgtcaacatcgtgctcggtatccacgtcggcggcggggacaactcgtggaagatcgggtacggcttcaacctcgccatcatcctcctcgccgtcatcgggctggagttcatgctgcggacgaggtggtccaaggaaagcgagcccacgccgacgtactaggcgcggcgccggcggccgccgttgatgccgcgaacccactattttttggttttttttttgtgcccttgggcgctggactgtgtcttagctctggtggtgttgtgattgttttttggccttctgtgctgttcgattttctgcatgttgctgtcaagtgaaactgtgaaaaagtgtaagcgtgagcaggtgcaattgcactatgccacaattgat

SEQ ID NO: 899 - DNA, 1547 bp, Oryza sativa
  ref <308>: DATABASE ACCESSION NUMBER: AK058981
  ref <309>: DATABASE ENTRY DATE: 2001-12-06
aaagaaagaggctaacaatcgcagtggagcttgttgcaaacccttcgattatattcatggacgagccaacctcagggcttgatgcacgagcagctgcaattgtgatgaggacagtgaggaacactgttaatactggcagaactgtggtgtgcacaattcatcagcctagcattgacatatttgaagcatttgatgagcttttcctgatgaagcgaggtggtgaagagatctatgctggtccactaggccatcattcttcggagctgatcaagtattttgagagtatcccaggggtcagcaaaatcaaagatggctataacccagcaacatggatgttggaggtgacaacaattggtcaagagcaggcacttggtgttgattttagtgatatatacaagaagtctgaactttaccagaggaacaaggccttgataaaggacctgagccaaccagcccccgattcaagtgacctgtatttccctacccaatattctcagtcttctttaacacaatgcatggcttgcctgtggaggcaaaacctgtcatactggaggaaccctccttacaatgccgttaggttctttttcactactgtcattgctcttctctttggtaccatcttctgggaccttggcggcaaagtgacgaagtcacaagacttgttcaatgccatggggtcaatgtatgcagcagtgctgttcatcggtgtcatgaactgtacatctgttcagccagtggtggccgtggagcggacagtcttttaccgtgaaagggctgccggcatgtactcggcgtttccatatgcatttggccaggttgtcattgagatcccatacacactggttcaggctactgtatacgggatcatagtgtatgcgatgattgggttcgagtggacggctgccaagttcttctggtacctcttcttcatggtcttcacgctcctctacttcacattctacggcatgatggcggtcggcctgacaccgaactaccacattgcctcgatcgtctcatcggcgttctacgccatctggaatctcttctccggcttcgtcatcccccgacctagagtcccaatctggtggagatggtattgctgggcgtgccccgtcgcgtggacgctgtacggcctcgtcgtctcccagttcggtgacatcgagacgccgatggaagacggcacccctgtgaaggtgtttgtggagaactacttcggcttcaagcacagctggttgggctgggtggccaccgtggtcgctgccttcgctttcctcttcgcttccttgtttggcttcgctatcatgaagttcaacttccagaagagatgatgatgacaagggatattacattcattgagttgcagacgctacctgaaatttgtgcatatcattggatctaaagaatttttttttgttgccattagaatattgtaaatcataccagcctttcccccttatttttatagaaagattgtactactgttacacctagtaattttgttattagtacccttctttttatagaaagatggtactacttttattttt

SEQ ID NO: 900 - DNA, 1839 bp, Oryza sativa
  ref <308>: DATABASE ACCESSION NUMBER: AK058982
  ref <309>: DATABASE ENTRY DATE: 2001-12-06
tgttcattctccaatttcccctaaattgtgacatggtatcagagcaagagcaagggatcaaaccctaacgtcgatccggagtccacgccggcacgccggtggcagctcgccaccggcgagcccatccaatccgtgcacatcctcgtcagcttcgtcgtccaccaccgtcgagccgtcaatcgtggcagccaatcgtttcgtcgttcgtccacaagcagcaagcagatccagtcagcacaagcaacaagcagcatcaagcaatcaaatccacaagcaagcagcggatgcatgaacaagcattcagatccagttcttcgtcaccacgtcagtcgtagccaggccgtactcgtcgcggatcttgtcgtcgcgtctcgccgtggctcgtcgttgtcgccgcattcccattggccggtcgcggcgctctcttcatcgccgccagcgccgtcctcctcccatgtcagtcgtccagctttccgtccgccgcctgcgcgcgtgaccatctgcatcgtcgccgcacaggtcaaggtcctggtcctcttggtctagcctgctctgttctctctgcttctccacatagatgcttggagactggttactggacttaacagcaacaagccatcgtcttccctaatatcaagtagcagcgacagcaatttgcaagtgtcatgcagatccaccttgttccatattcaaacatcaacaaatagcagtagagaagcccatatcgagttatgcttccctcatcatgcagccggcctctgctcttgccggatttgtgaagccatccatagtctcaactatcttgattgttgaattgttccatcaacagatctattttgtgtttgctatgcttgcttactgctgccatcaacaagtcaattaatatcctttggtcttgcaaacatatcattgtgcttcagtttgagataggcaacagaaaaccaaggcacagccctgtgcatgtccttttgattttgatattgcttcttgtcatctgcatcaattgttctcttatgtcttttgctagtatcctaagtcatttgctagtatatcaatgtcatctacaaatcaatttcctatgtttcctatcaagtccatcaaagtccatcggttcgtcgaagtcatgcttgtcaatcattatcactatctcgctcgctccatgtcgaagttagccttctatcatcaccagaagctccacgtcggagctgatctttgtcatatcaccagctccccatcggagttgacatcatcatcaatcattgaagggccgaagaacagtttgtgaaggtccttcatctcgtcatcatcaccgtctctgaatcagtgaagagccaaagaacagtttgtgaaggcttttggtactaagggctgaagaacagtttgtgaaggctcgaggtctacttcattgaggataggatggttttctcttcttctaattcattcaagagcaatgcttcgacaacatcttcaaacatggactttgtatttatagtagtgtgtcatttatcttgtgtttagtttcaaatgcaatgctattgtatacacattgcatttgagcaggggtgttgagtattatgtgtttaggggtatattagtaatttcctatctctattgtactcatatatgccctttgggctaacacaatagcaactgttcattctccaatttcccctaaattgtgacaatagggtatgatccggaaacaataggccaagagaacccattattagtcatgggtcctgtgtttgtggtctagattactgtaactaaccggaatccttttgcgcacttctgcaagttaaatggtatgatccgtaagcgggatgcttgttcagcctc

SEQ ID NO: 901 - DNA, 1125 bp, Oryza sativa
  ref <308>: DATABASE ACCESSION NUMBER: AK058983
  ref <309>: DATABASE ENTRY DATE: 2001-12-06
aatgcacggatgaagcaaccatcagacccttttgatttcagcactcaaacaaagcaaccctcggcacttccttttgatttcagtactcaacaacctaagccatcatctgcaatcccgcaagtgacaccagctacaatttcgcctgcaccatcacttccatcactgcaatctcttgcaccaagctctggaccccaaacttctggttcatgtgttcctgttgacattgagtggcctcctagaaaaaacacatcgtctgactttaatgcaccattatctgttagtgagcaaagtaaatctggagggctatctagtgatggtcttgctgatattgatccttttgccgactggcccccaaaagcaagcagtggtgccagcattttagctgttggacacctgtcaagcacaagccaaagtatttctggactaagtacaggaaatattgggttcagtggcaacagtggttctctggaacaaatgaaaaccaaccaaatgagctggtcagcgaaaccgaacactactaatttaatggccgtgaactcaacaggcaattacttgaatcagggcaactcagctcttggatttggaaatccaattggaggacggagtacagggtcattgtcaagcagcacaacacagggtccacccaggcttgctcctcctccatctgcttctgttggaagagggcgtggtagaaatcaagggcaatcggcactttcacgagcatcacgtactcctcattccaatgtttcatcagagcagccacctattctagatttactgtagcaattgagggccctctatcttcgttttgcaaatgttgaagttcctatatggtgagcatcatgccttttttcttcccaacctgcttgcggcagtagtgtatttacatgtcagttttgcaaactggatggtctgagactgaggcccccaaatgaagctgcttcagagccttccagaggttacagaatgttccctttctcaggagtcaggatgtcttcttccacacttggtcctagttggacaggcgaaacaggagaaattctatttgtgtataatatatttgttcagacggctgtagattgtagagttcatgaatacagtcaacatgtttgttgggatgttttg

SEQ ID NO: 902 - DNA, 1244 bp, Oryza sativa
  ref <308>: DATABASE ACCESSION NUMBER: AK058984
  ref <309>: DATABASE ENTRY DATE: 2001-12-06
atccccatcccaaaccccgcgccgcctcttaccgcttcgcgtcagcttcgatttgattcggttcggttcgcgcgcgccccgatctatcccgcgcgaagtcgattcccacgccacccgcgctgttatgtgcgcggctcccatggcttccactgcccagccgcagcagcagccgcagcagcagcaggagcagcagccggtggcggcggcggcggtgccgactccggctcctccggcttccgaggcgcggccgcagaagccgacgagggtatcgttgtcgtacgaggagatctccaagctcttctcgctaccaatcgcagaggcagcctccatcctcggtgtttgcaccagcgttttgaagaggatttgccgcagccacggcatcgtcaggtggccgtatcgaaagcttgtatctgggaagtctggtgatgacacaaaaaacgctgaaagagagaaagccaagggacttcttgagatatctaaagttgcaaaacagaaggctctaagcgcatctggtctatcaacagtatcaccaggcgctttccaaggagtggcaaaatctcaacagggaagttcgaaggcaggacaagtctcacccccaggaaaacaaaatgtgttgggtggatcagcaatcttgtcctatggtacccaaaccaaaggcatcccaacctacatggacgacttcaagtacggatttccatcatctggcttgtctttgcaaactatgaaatggtgggggactgacagccacacggagaccacacctgcgaaagacgataacggtgaagcccctgaatcagcaaatgaggcttcgaagggtatgaccgacgatgagttggactggggagcagatgaagctgaagccgaagccgatgccgatagtgcgatcacaaccgaaccatctgcacagctgtgctccctgagaaggaaagctgtagacgatgggcgcaagctgctgactggcaagtcctgcgggggactggagctgtgcaggctgaataagaggcagaagatggccctcgcccaggtgttcggagcctcactgccggagcagttgaggagcaagctcgggtgatgattttgcctgccatttgtacctctgtgtaacactagttactagtagtagcgaccggcatggttaagctggttcctgatgtaacttgtcctgatccatttgtgttgtgagaactagataaattcgttgtgaagaggatggtaggagttttgcctgcctgctttcccatttc

SEQ ID NO: 903 - DNA, 1681 bp, Oryza sativa
  ref <308>: DATABASE ACCESSION NUMBER: AK058985
  ref <309>: DATABASE ENTRY DATE: 2001-12-06
acttcttaagccgcaagcacgcgacgcgacggcgaggccacacgacctcacctcgccaccatgcggctccccggcgacgctcgcctcgccctcctcctcgctcgccgccgcgccctcccctcctcctcgcccgccgcgtcggcgtcccccttccacggctcgcgcgcccacggagcgaggtggggcgacgcgtttcgcgccgcggctcccgcgtggaggtcgccgttctcctcgccgactagtgccaggctcttccacgggacgaggccggtggcagcgagggactactacgatgtgctcggcgtgagcaggaacgcgagccagggggagatcaagaaagcgtattacgcgcttgcgaaaaagctccatccggatacaaataaaggtgattctgatgcagagaggaagtttcaagaggttcagcgagcttatgagactttgaaggatgatcagaagagatcattatatgatcaggttggccctgatcagtatgagaaagcttccgctggaggaggacctggtggtgcatatgaagggggttttggcaatccgtttgaggatatttttggtggaggtggcggcggcggtggaatgaatgatttctttagaaacatattcagagagagagaatttagcgggcatgatgccaaggttgcacttgaaatatcatttatggaagcagttcaggggtgcacaaagacgatcaattttcagactgctgttacatgtgacacctgcaagggagctggcgtaccccctggaaccaaacctgaaacttgcctagcctgcaggggttcaggatttatcttcatgcaaactggtcccttcaggatgcaatcaacatgcacacagtgtggtggtagtgggaagactgtgaaggaattctgcaagtcatgcaaaggaaggaaagttgtgccaggaacaaaaaacatccgactcaacatagtgcctggtacggatgatggtgacgttataaagttggttagatcaggtggagcagatccagatggtggtagtcctggtgatctttatgtaactctgaaggttcgtgaggatccggtatttcgaagagagaaaggtgatattcatgtagatgctgtattgaacgtgactcaggcaattttgggcgggacagttcaggttccaactctctctggagatgtagttctaaaggtcaagcctggtactcagcctggccaaaaggtggttctgagaggaaaaggaatcaagacgagaaattcatcgtactatggagatcagtatgtccacttcaatgtcaacatccctgcgaatttgacaccgagacagcgcgtgctgatcgaggaatttgcgaaggaagagcaagctgaagaggagaaagacgcaaaggcagcaggagcatcgggatagctgattttaggagcgacccgtacatttgattagtgctttagtctcatcatatatcgcgagatagaataggctgctgcctgaaatttgcaggggcaagaagatatagtttggttggatgcatggaattttacatgccgacatatagcagtttcaaattttgtagctgggaataatatacaccacgccgcctgatgtttgcaatctcctaatgtcactagcatcagtgagacaggcggcaggatcctgtattgtataattttgtgtgttaagaaagtatggaactcacggtacc

SEQ ID NO: 904 - DNA, 1315 bp, Oryza sativa
  ref <308>: DATABASE ACCESSION NUMBER: AK058986
  ref <309>: DATABASE ENTRY DATE: 2001-12-06
aggatgtaagtaatgatgattggggtcatgatgaagacttttatgatgctaatcaaccagagacatcaaggagtgtctttttgccattccgcttccaatggtgtcctattggccgcttagcccaacttccatctgtatttgatgaaggagagtcagcaccacccgtaacctttcatgatttcatgggacagaacttcacttctgagcatttgcctgtatcagcacctggggcaactcctccaggcccatatatcgcttactttcagcctcttcaatcatcggcatcatcatcaagttcccatgtcactgaaagaactatggatggcaccacctatcatgatcactggaaccccctacctgggccatcagatggtcgaccattggctacagtgcatcccattgatttccatcataaccactggacgcacctgcccaactcctattctcaacccaacagcaataatggtgtagctgagcagatggcaatccctgtggtaccaatgagggttgggggccttgatagtgatagccaacagcgaggatctctcccctcagtttatggaaatggatctggatcaaggtctagaattccaagtgttcctcctatggcaccacaattcatgaggccgcatggtaacatcaacgaacaatatcagcagaattcgtccagcctgtatgctgcgccgcagcgtaggactgccgtgcaggctgtccaagacagcatgaactttaccctgttcccgcaggctccaactggccctaattcaatggagacggaggatgccggaggcaaccagttctatgcctgggagagggaccgcttcgccccttacccgctaatgcccgtagattctgaagcaaactggtggggcagcacgccgcaatcccatggcgtgacggatcattcagctgcccccggtaggaggctatttggtcaatggatcggcgccgggaggtcgccaccgccgcctccaccgccaccagcggacaactcgtcgtaccgacagatgcacatccctcggatgtagcttagccccccgaccgtcgcctgaaccaacaaagttaaatataagaacctggagaaaacccctgtttggctgtaagaaagtagggtgaagacaccggttgtatgtcgtcctgtgtttgcgtggtaattagactcccgagacaaatatgcaggcaggtgaaaaaagaacaccaagaacgcaaacccaaactacccaaggaggaaaaacgtttcagcttgggtgtttatgtggaattcggttcggtgaagcatcatagtacatattccaagccatgttggggcttcttt

SEQ ID NO: 905 - DNA, 1227 bp, Oryza sativa
  ref <308>: DATABASE ACCESSION NUMBER: AK104032
  ref <309>: DATABASE ENTRY DATE: 2002-08-28
gaccagatgaagtcattcgcagtttgttttacaacaagaacaatgactcactcattactgtatcagtttatggttctgaaaacttcagtgccttaagatgcaggacaactcgaatagagtatatacgacgggggaagccagatgctggtttccctcttttcgagacagagtccttgaaatggccaggttttgtggaatttgatgatgttaacgggaaggtgctgacttattctgcccaagacagtacttacaaggtgtttgacttgaaaaactacactttgttgtatacaatatctgataagaatgttcaagaaataaagatcagccctggcataatgctattgatatactcaagaaaaaagggctgtattccccttgacattctttctattgaagatggtaaacgcttgaagtcattcaaacaccttcttcatcgcaataaaaaagttgatttcattgagcaattcaatgaaaaacttctgatcaaacaggaaggggagaaccttcaaattcttgatgtaagaaacttccaatcaattgaggtaagcagaagtgaatttgtgactccttctgcgtttatctttctgtatgagatgcagctgttcctgaccttccgtagtagatcagtatccgtttggaatttccgtggtgaattagtcacatcttttgaggaccatatgttgtggcaccctgattgcaataccaacagtatttacatcaccagcaaccaagatcttattatttcttactgcaaggctgatccaaatgatccttcttcagaagaaaatgcttgctccataaatatcagtgagatcttaaccggaaaatgcttggccaaaataaaggcagggaaccttaacaagcaaagggtgtctaagttccaaagtacaccttccgaggcactgggggacatcacagctctgtactacgatgaagagcgtgaggagatatacaccggcaaccgactaggccttgtccatgtgtggtcaaattgatagttgctcaggcagtcaagctttccttcgggcaacagcaatcctcacctagcgtggcataatcggggagatactagctacaaccgtagttcatcatcggggagatactagcgtgcctgatcggtgtagctccaagggtgtttactgtttaccatatgtatcgttttggaaggtttgtcactgttagcgtgccatcttaccccccgagctatatatatctgattccaatctg

SEQ ID NO: 906 - DNA, 655 bp, Oryza sativa
  ref <308>: DATABASE ACCESSION NUMBER: AK058987
  ref <309>: DATABASE ENTRY DATE: 2001-12-06
ctctcccaccccacccctttctcgtttcgttggaagaagaagaagaagaagaagaaggtggtttcgctggaagaagaagaaggtgaaaccctagatctgatctcggatgacggcgcgatcgttgttggccggtaggatggtggcggcggctcgccgcgccttccgcagctggcccctccacacaatcacaaccaccaccaccaccgacgccgccactgccatcgccaccaaggaacagcacaaggtggtcagtcgtcttgatgtgatggaggatataagctttccctacatgacacgcgagatggccgccgtactgcggcggagccgtgttgcggctgtcgaacacaacaattttaacatcaggcagcttgctaatccttaccatgggccggctgatggagatatcctgtatgacagggcatggattaacaatcttgctctgctttttactctctccacgttatttggggcgtttagtactctagccaagctaaagcagacacggacagtggaccaatgtgtccagacccaaactagttaaagcaaccactgaggttgtatggattccagtcccaaacttgttaaatcaaccgctgacgttgtattggatatcatactctgtatgtcgtaatacttaatttcatatgctattgtc

SEQ ID NO: 907 - DNA, 1528 bp, Oryza sativa
  ref <308>: DATABASE ACCESSION NUMBER: AK058988
  ref <309>: DATABASE ENTRY DATE: 2001-12-06
atgtcgatacaaggccagatcctcgaagtcagagtcactgggtgcaggaagctgagggacacggagttcttcacgcggcaggatccctacgtctgcatcgagtatgccaccaacaagttccgcacccgcacctgcaccgatgggggaaggaaccctacttttgacgagaagtttcatatacctctcattgaggggcttcgtgagctaaccgtcacagtgtggaacagcaacacgctcacccatgatgatttcattggcaatggcaggtttgtggacctcaattacgcccatttggtgattactgttcttaaataactgtccactgagcctttttgtagggtgcagctgcataaggtgcttacgcgtggctatgatgatgcctcatggcccctccagacacgccatatgaggtagtcgtatttcttttaccttgtgctcattgcacttgtgaacttcctgatagtagtgtatcttcaggtctgctggggaagtgacgctcattatgcattttgatgtttcagcaatgaagaacaagccgggaaaaatttctgccgcgtcaaccacacattctgttcttccagtgccggtaccagcagtaccatatgctgccccctcaccttcatacgcactaccccctgcaggataccctgcagtaccgccatatcaatcctatcctgctagccatgtcccggcgccatatcctacttcagcatacccacatccaccaccatctctgctagctcgcgatgttgagcatgcggcataccctcctacaagtacaacatatcctccacagccgtacccaccacagccgcagggacaaacatacccaccgcagccgcagggagaaacataccaaccgcagccgcagcgagaaacatacccaccgcagcctcaagtacaaccatacccaccaaagccacagggacaaccatacccaccgcagccgcagggacaaccatatccaccgcaaccatatggacaaacttacccaccacctccaaaaggacagcccacatacccacctgcgccctatccttcaacttatccaccagcaccatattgatatggcacacttggtggactgaagttgtccacatacaaaagcaagtaagcaacaagtgatgatcagttcttatatttatccagggtatccagccttcatcatccagttaattgaaacaaatgaaatcattcctgaagcgattcatgtcaacatcttagcaaccaatggtagtagttaccatctggtatgtatcatatatcatagcttgcagaatgtcacgaatggaatttgttcgattatgttgtatgttttgggcttgttgtaacagtgatccacctttgttctgttttgaggtcatgtttggctgttctgtgactgtaactactgctttttacaaaggggggaagcagtaattctagttctacctgcaactgcctgataagtgttaactgtgaaaagttgcagtagcttgtcgactttgtaccatgttgtttgagatgctcaataaatttgctttgtact

SEQ ID NO: 908 - DNA, 1791 bp, Oryza sativa
  ref <308>: DATABASE ACCESSION NUMBER: AK058989
  ref <309>: DATABASE ENTRY DATE: 2001-12-06
gatagctgaacatgttgctacaaaaacaaaagctcagtgcatgctgcacttccttcaaatgcaaattgaggaccgctttcatggcgatgaagatattaatcaaaatatccaggaaaacacagagcaagcttcagcagaaaaaggcgctgctgaaatacctgataaaatggaagttgaagagaaagcagaaggaaaagatactgcaggtgagaaaactccagagaaagcagagggcaatagtgtagaagcacaaacggaagatggaaatgctattgaaaataaagatgccaataattcaggtggcacagattcagttaaatctctaaacactgatgagccaaaaaaatcttctgatgctgacccaccgaaaagttcatccgatgctgaacctgtagtgaaggaaaattctgttgatgttgatacttctcgtgaaaatgcatcaaactttgctattgatacattgaaatccgcatttgaggctgttggttacttcccagaacatgaaggttcatttgctgatgcaggaaatcctgttatggcactggcatcatttttagctggtcttgtggaagatgacactgcaaccaattcatgtcgaagttcactaaaagctatctctgaggtttctcctgcacttcagttggcaactagacactgctttattcttgaggatccaccaagtgatgtgaaagacatgtctggcaatgcaagtactacaagcacagatggtgataaaagaaaagacaaggataagactcaagattcaattgatagtgaagtggaaggcataaataaaaagggagagacggttctatctgttgaagggaaaaaaagttctcccatttcaccaaaaggccaagacacagacaaaaaggatgaatgtgatgaggacccctcagtggatcctaaacacaataatggtaaggagtcagatgatcctgtttctctggataaaagtgtgtccaacaacaaaaaaggaaataccatggaaacaagtaatcctgaaatgatagaggacaaagcaagttctgaagtcaaccctgctgatgattcatctttagaaggcaaggttgagatgaagaagaccaaagatgcagttgctaatgcaactaccgcacaggaacaaaagcaaagccaaatattggaaaatggcaagatggaagaacctaagagtactgaagatgttgctgccgatgaagagaacagctctagagtaaccgccaacctcacggattccataactaggctgaaacgagcagccgctacagctatttctgcagctgctgtgaaggcaaaactccttgctgaccatgaggaagaacaagtccgtcagctggctgcgctgatgattgacaaactgtatcggaaagtagaggcgaaggtgtcttttctcaccgaagttgaacacctggtccagagaacaagagaatacactgaaaagactagaaagaagcttctgatggagcgaaatgcgataatcgctgcccgcatgggttcattgccatctaggccaaaccagcccggtgcagccggcaacagattaccagctggatatggaggccccatcgtgagaccaccaccaaacgcaatgccccgccctagcagctgatcgagctgaccgtggtgatccggacaactagtgctctatacccccattctttagagggatatctcgaaagccatgaactgtgttgtagtagtaccattcttttagaagcagagaatactgtatgacgatctgttgttactgcataagagcttctataaaatttttcacgattttcactttgg

SEQ ID NO: 909 - DNA, 474 bp, Oryza sativa
  ref <308>: DATABASE ACCESSION NUMBER: AK058990
  ref <309>: DATABASE ENTRY DATE: 2001-12-06
agagaagactactcgtctgctccggcatcccggcgacgagagagagagagaggggagaaggctgcgcggcggagatggcggtggcggacgtggcgttcaaggcgctgacggcggggctcggggtggcgacgctctacctcgccggaaccttctccgtcaacgtctaccgcggcctctcgtggcactcggagcaatccaagttagaaaaggagaaacgtgaagactgaaaagcatcagaagctagtctagaatgtcagacacaacaaaagaaaacctaaagataaacactcaccttgtgagatgagttgtctttagactagttatgtttcctgggattgtttttgcagacctttcaagatctccagaatgctattttgatttgatgtaagatgcaaagatctcatgattattattcctctttatgcttacgaaaatatttcgaccaacatatgggtgtcattgatgccattttat

SEQ ID NO: 910 - DNA, 290 bp, Oryza sativa
  ref <308>: DATABASE ACCESSION NUMBER: AK058991
  ref <309>: DATABASE ENTRY DATE: 2001-12-06
gagcacttcaaggaggtgttgggtgggtacaacatcgacaagttcgagaagatgaagcccaagctggtgcaggccgtggacgacatgctcgcgtacgacatcccggagctcctcaagaacttcaggaacccttacgagtgagcccgctgacctctcgtcagttgtaagataaagatgaccccgctcggtcgtgagtcgtgacactgtatgtgagtgacacctgatgatgaaggaatatgttgtcaaggcgagacatggacggttttctactttacctgcccatcttttgc

SEQ ID NO: 911 - DNA, 1002 bp, Oryza sativa
  ref <308>: DATABASE ACCESSION NUMBER: AK058992
  ref <309>: DATABASE ENTRY DATE: 2001-12-06
gtcatggagaaatcttcctagcacagattttgagcttgagaggccagcaactactgctgccacgaagactagctcacatggccatcacaagaagttgctcaacggttctggccttaacctgtcaacacagccatcgaatcacagctctggggatggtctggacatcccaaatatttgcaacaagcgccggaaggattcctcccccacagcgatggaagaagattgcagcaattcaaattcagacaaggtccaggacatggaagtgagccacacgttcgagccgtcatggatgaatgacttcactggtgtgatgcgccatgcttctggtccagtgactgcagcaaaaacaatctatgaagatagcaaggggtacttgatcatcattagcctaccgtttgctgatatacaaagggtgaaggtttcatggaagaatactcttacaaatgggatagttaaggtatcatgcactagtgttggccggatgccattcttgaagagacatgaccggaccttcaagttagtcgatcctacacctgagcattgtccaccaggagagtttattcgggaaattccactccctactcggatcccggaagatgctactttagaagcatactgtgatgaatcaggaacaggcctagagattattgttccaaaataccgtgttggtcctgaagaacatgaagttcatgtgtccatgaggcccccctcgtcatggtgccagtcttaacatgttcaaggtgtgtggtgcatgcccttgtagctggtagaaatcgattattgtcaacttctgttgactgatgttttgctgtctgctaaccctcagctcgcaaggagacgttcagagacatagcatacaagaaaattgctctcatttttgctaattggaaagggaaagggaaacaatcgtaattgattgaagcattctggtatttggcatttgaaacatttgtaggaccatgctacatatcacaaggaacatatctggattaattcgatctt

SEQ ID NO: 912 - DNA, 1433 bp, Oryza sativa
  ref <308>: DATABASE ACCESSION NUMBER: AK104033
  ref <309>: DATABASE ENTRY DATE: 2002-08-28
agcttcagctcctcccccaccatctccctcctcgccgccggcccccatttctcccgcgtccgcttcgagcggcggcgcgcgtgccgtaccgatggctatggtcccctcgggctcgggcggtgggccgccggtgattgcggaggtggagatgaacggcggcgccgactcgggcgccgccacggtcagggccaccgtcgtgcaggcctccaccgtgttctacgacaccccggccactctagataaagcagagaggttgatagaggaggctgctgggtatggttcacagttggttgtgttcccagaagcttttgttggcggctatcctcgtggatccacatttggctttggggccaacataagcattggtaatccaaaagacaaggggaaggaagaattccggaagtatcatgcggcggcaatagaagtgcctggcccagaggtgacacgcttggctgctatggctggaaaatataaagtatttttagtgatgggagtgattgaaagggaaggttacactctgtattgctcggtgctcttctttgatcctctaggacggtacctaggtaagcaccgaaagctcatgccaacagcattagaacgaataatatggggatttggagatggatcaacaattcctgtttatgatactccacttggaaagatcggagccctaatttgctgggaaaataaaatgccactgttgcggacagcactttatggtaaaggtattgagatatattgtgctccaactgctgattccagacaagtttggcaagcctccatgactcatattgccttagaggggggatgctttgtcctgtcagcaaatcaattctgccgtagaaaggactatcctccaccaccggagtatgtattttctggtttaggtgaagagccttctccagacactgttgtctgccctggaggtagcgtcatcatttcaccatccggagaagtcttggcaggtcccaactacgaaggggaggcgctgattacagctgatctagaccttggagaaatcgtgcgagccaagtttgactttgatgtggtgggccactatgctcgacctgaggtcttgagcttggtagtgaatgaccagccgcacctccctgtgtctttcacttctgccgctgagaagacgacagccgcaaaaagtgacagcactgcaaagccctactaagcaagataatcagagtcaatcgcaaaactgattactgtcactagacggtgaatcattggctccgatcgttcatgcttgacgtccctgtcatccccttgcttgtaaattgcagtccagaacaaacttctgaggtctgtagaacttgccccttttatgctgtgtatctatcaaggtaggtgtcagatcaaacttggttcccctccatatcaaatatgagtagtgcatgaactggcactacgatggtttcactgtc

SEQ ID NO: 913 - DNA, 413 bp, Oryza sativa
  ref <308>: DATABASE ACCESSION NUMBER: AK058993
  ref <309>: DATABASE ENTRY DATE: 2001-12-06
aagatggtgacgggagggctcatcggggtcatgggagggttcatgtacgcctaccagaactccgccggccgcctcatgggcttcttccccaacgactccgaggtcgcccgctacaagtacaagctgtagtgagaaactttatcgattcgctgcgttctctctctctctctctgctgctgcaagcgtttacatcttttttttctttttcctgatgatctcgttttagcgtcacttgttgatgtgcgagatgtgtggccttggctgaataaatgttgtacgctgcacgcttgtgaggaattcgtgctacaatttagctccctttgccatggtttagtggcaatttggttgccgatctggtaaaaatttatggaactgaatgtgaccccctgcctgtgaaatttggggattttgtt

SEQ ID NO: 914 - DNA, 1290 bp, Oryza sativa
  ref <308>: DATABASE ACCESSION NUMBER: AK058994
  ref <309>: DATABASE ENTRY DATE: 2001-12-06
ggcaaaagctagtggtgcaagccagcttgttgtgaaggacttgaaagaagagttcgttagtgaatacatttacccctgcttgcgtgctggtgcagtttatgaaagaaagtatctgctggggacttcaatggctaggcctgttattgccaaggcaatggttgatgttgcaaaggaagttggtgcagatgcagttgctcatggatgcactggaaaaggcaatgatcaggttcgttttgagcttacattctatgctttaaaccctgagcttaaagtggtggcaccttggagggagtgggatatcacaggacgtgaagatgctattgagtatgcaaagaaacacaatgtgccaattcctgttacaaagaaatcaatatacagccgtgatcgaaatttgtggcaccttagccatgagggtgacattttggaagatccagcaaatgagccaaaggaagatatgtatatgatgtcagttgcaccagaaaatgcaccttcaaaacctgagtatttggagattggtattattgcaggtgttcctgtttccatcaatggaaaagatctctcaccagcatctctccttgccaagctcaatgaaatcggtggaaagcatggtattgggcgcattgatatggtggaaaaccgcctcgtaggcatgaagtcccgtggtgtatacgagacccccggtggcaccatcatggcagctgctgtccgtgagctcgagtccttgactttggacagggagacaatgcagtggaaggacatgcttgccctcaagtacgccgagctggtctacgctggccgttggttcgacccgctccgacaatccattgatgcgttcatggagaacattaccgcgacaacaaccggctccgtgactctcaagctgtacaagggctccgtaaacgtcgcgtcccggaagagcccatacagcctgtacagggaagacatctcctcatttgagaatggggagatctacaaccaggctgatgctgaagggttcatcaggctatatggtctccctaccagagtccgggcaatgctggagaagggcatctaagcccctgttttctgcttaaaatgtacttctgtgctttggagaaaatgtagcaccacctcatgcagtgttgcctgcaggtaggcactgaatactttccgagttgtattagcgttcgaaagcttaactgccatctcaattcgattacaactttcgtgaagtgttgcatgatcatgtaatgaataatggggttgtacctgattttgacttggttgtctaaattgcaataagattgtctc

SEQ ID NO: 915 - DNA, 566 bp, Oryza sativa
  ref <308>: DATABASE ACCESSION NUMBER: AK058995
  ref <309>: DATABASE ENTRY DATE: 2001-12-06
taccgagcccatctctctcgcaacttcatctctctctctctctctctctctctctctcccaatcgaggaggcggatgcaggcggcaaggcgatgccactactctcggaggcgagccacggggtggctggatccggcgtcggcggcaggcggggtggccggatccggcatcagcagcagacgggggtggctggatccggcgtcggcagcaggcggggtggccggatccgacgtcagcatctgttcccgcggcggatccgcgttgacagcgggaatggtacagcggcagcgtaggtgggcgccctcctcagcaagctaccgtggcagcggcgggcgccatccccggtgagctacgatagcagcggggctcgcacgtgcatgggtggatccggtgacgacaggcgccatcctcggtgagctacagtggcgggcatgcaatggcgaagttctcaaatcagtgatttgtattatatgtttgtgattctgttcttgccttgtgatggttgatgttgattcttgtggttctgttgttgatcttcaatctagatgtgttgattgtttggggatt

SEQ ID NO: 916 - DNA, 1574 bp, Oryza sativa
  ref <308>: DATABASE ACCESSION NUMBER: AK058996
  ref <309>: DATABASE ENTRY DATE: 2001-12-06
ctatgatcgcccaacagtgcttgcaatagggactgtcttctgggccttatcaacaggggctgttggagttagccagcatttccggcaggttgcattctggagagctgtaaatggccttggacttgctattgtaataccggcacttcagtcgttcatcgctgacagctacaaagatggtacacgtggcgcagggtttggtttactaagcctcatcggtgcagtaggtggtataggtggtagcattctagccacaatcatggctggaaatgactattggggtttggcaggatggcgtgttgcatttattatggttgctctcgtcagtttgataattggcattcttgtgtacttatatgcgactgacccaagaaaaatccctggtaatcatcttcttgacgacgatgactatgagaggttacatttggccagcaaagatgttcttccacctccttctatatggagggattctttggtagcaacaagatctgtaatgaaggtgcggacgtttcagatcatcgtcctgcaaggaataattggatcattgccatggactgccatagttttcttcacaatgtggtttgaactcatcggttttgacaataacagctcggcggcattgaatagcctgtttgccattgggtgcgcaactggagctttccttggaggggtgatagcagatcgcctctcgcgacactttccagattctgcacgtgtcatgtgtgctcagttcagtgccttcatgggcatccctttctcgtggatcctcctgacggtcatcccgcagtcggttgattactggtccgcctacgccgtcaccctcttcttcatgggcatcaccataagctggtgcgccacctctgcaaacaaccccatgtttgcggaggtagtccctcccaagcaccggaccatgatctacgccttcgaccgtgcattcgagggctcattcgcctcgctggcagctcccgctgtcggcttggtcaccgagaagatatatggctatgacagcaagactgtgaaccttgcgaacgggtcagcagaaggagcgtatgcgctctccaggggacttctgacaatgatgattgttcctttcggcgtctgcgtcctgttctacagccccttgtaccttgtgttcaagcgtgaccgggagaatgcgaaactgtcgagcttcaaggatcaggagctggtatgaagaaaccgcttgtgctccgactaaagctctggtctggcagctcaaagaaaattcaggttcgggcttcttcaggctacaacatgaagcattcatcttcaggtggatagtttgacctggtgattacccatgtggagagaaagtggtgtttttgctgtaactgtttgcaggcaattgcagctatcatgaccacttgttctttggtaggcaaagagagagtagatggtgtaatccatgctgatgtgatttatgttagtaataccgaattcctagttttgtaacggattaactggaaaattccactgtcaacagattcagtttggatattatgctcattattcagaatacaattttttgagattgctctgggtgctgagctgaccctaat

SEQ ID NO: 917 - DNA, 1202 bp, Oryza sativa
  ref <308>: DATABASE ACCESSION NUMBER: AK058997
  ref <309>: DATABASE ENTRY DATE: 2001-12-06
cagtcactattgtagcaaaaacccaaccaattatggataaggctatcgagaaggtagaatttcttgtgggtcgtgaaattgaagttggcagaacgtacaaaggtgttgtttcctcaataaaggagtacggtgcttttgtggaattcaatggtggacagcaaggtctacttcatatttctgagttgtcacatgataaggtgtctaaggtctcggatgttgtatctgttggccaagtgctctcattgacatgcattggacaggacttgaggggtaacattaaactttctcttaaagctaccctgccccatgcccatgaaaagaaggatttagcaagtaatcatactgatcctttgccaagtcaagaagttgttggctggacggctgtagagaacatgcctagcaaggatgctaatgctgaaccatccatcagcaaagacgaagacaacatgattgaggagacacctgggtgttctactcctgcagttataattcgaagtgctgctgaatgtgatgcgcaagatgttacaaatgatcctaagaagaaacgcccaaaggttgcaaagtcatctcctaagctatctaaaccagccagcgaaaggcaggaagttaagagaactagtgctaagaaaacttcaggtgcatcaacaacggccaagaaaaataagaaagaaaaagctgactcttcaaatgatgtgctggatgccattccagaacaaaataaaagtaacatcatgaactattctagtccctcaaacttcaggtctgggtctatgaagctgggtgacgtagttacagcaaaggtctaccagatacgagcctatggattagtacttgagttgagtgatggagttcgtggaatgcataaatttgcggaaaatggacacaaggattttgaggtcggagaagaactacttgtgaaatgctcaagtttcaatgcaaagggaattccggtcttctcattgctagattagtagccattttgatggggctaatgtcttctctataggcctacagaaatagacgcttgtaaatgtgtagcagctaattcatcgacttgaggaacatgagaaataatactgcggctccctcgacttttgtcagagtgctaccaaaattgtgtggctgtcgttagtagttttgccctgcaactcacaaacgcccaaacattacgcatcacttggtatctgaatctcttttgcaac

SEQ ID NO: 918 - DNA, 1489 bp, Oryza sativa
  ref <308>: DATABASE ACCESSION NUMBER: AK058998
  ref <309>: DATABASE ENTRY DATE: 2001-12-06
agggcctggctctcccgctccacctccccgcggccgccgctcgccgctctccgccgccgcagagacatgggggcttacaggtgcgtgtcggagctatggaggaggaagcagtcggacgtgatgacgttcgtgcagcgcgtgcggtgctgggatcaccggcggcagccggccatcgggcgccccacccgccccgacaaggcccgccgcctcggcgacaaggccaagcaggtcccctgcccccaccgcttcctacccatggccgctgccgccgccacccgccccctcctccggcccacctgctctgttgctagattcaacacgcgccgcctcctctcctccacatcttcacctccacctaccaaccgcagctccaacaccaactctcctgtcgccttcgactggtctgatgatgacgacaacccctccccacctccaatggaagctaagagccccaatctcccgctgccatacgaccccttcagcaagaagcctgcagtcatggagccatctgaccccacgaacctccaggaggtcttccatcggatgcgcaccgagggcctcaccgactatgccatcaagatgttcgacggattgtcgaaggacgggctcacccacgaggcactggagctcttcgcgatcatcaaggacaagggtgccatgcccgatgtggtcgcgcacactgccgtcctagaggcctatgccaatgctggccccgcccattggcgtgacgttgtgcgcacctacgaccgtatgctcgcgtcaggggtcacgcctaacgcgtatacgctcgcggttctggttaaggggctcgcagctagcgaccggttcatggaggctggcaagtacatagtggaaatgcttgaccgcggaatgcgaccaaatgcagcgacatacctggctgtgtttgaggcatacgtgaggatggagaaggtggaagaaggcagagttcttctggaaacaatgaagagtaaggggttcactccaagtgaggaagcagtgcgaagcggcacggtgaagcgagggcatgtgttcaggggcatcatgaacatgctctttgacaagtgatgcggtatgcattgtttcttgataggaaattgttgggctgtgactcttcgtatagaatggatggatattcttctcgggaagtgtgtcaccattccatttggagaaaatgatcagatgcaccgttttcttttcttgtgtcactgtagtatcttaggttctctgtctctactagattttattaggtagatagcattttcaagggatacttttgtcaatgtaggaacatcccttgtaactgtaattggcttaggtaatatagttctataacatgtttttggtgcactattttgcttggaattggcatggtacattggtttgtctgtatttactgtattagttatgatgtgctccctccattttttaatatgtgccgtatattgaaaacggagggagtgccattagcaatctgctgctcatggttgat

SEQ ID NO: 919 - DNA, 751 bp, Oryza sativa
  ref <308>: DATABASE ACCESSION NUMBER: AK104034
  ref <309>: DATABASE ENTRY DATE: 2002-08-28
aaaaaaactgcttctcgctcccgctctgaacttaacgctgcaaaaaaaatcttggagtgtataactgtgtaagctttgctcaatggcggaggagaacaagtccggctccggcgacctgatggcgagcggcaaggtggtcgcggaggcgaccatgtcggtgttccagcagaagagcgtggagggcgtcgacaagaaggaggtcgccggcgccgccgcggacctgctgcactcggcgtccacctacggcaagctcgacgacaagccggtcgggcagtacatcgacaaggcggaggggtacctcaaggacttcagctccggcagtggcggcgccgcaccgccaccgccggcagccggagacgccgcagcgccgaagccagcggcggaggagccgcccaaggagcctgcgccggctgagaaggaggaaggcaagccaccgtcgtcgtcggaagggttcggtctcgacgacgtcatgaagggggccgagtcgctgatggagaagaagggcggcggggaggagagcgccggcagcggcggcgccgccggtgggctgttcaagatggcgcagggtttcatgaagtaggagagctctttggctggatatatagctgcatgcatgcttgtctctggattgtggctctgctttaatttgcttgttaattaactgatgatctgtatgatgttttgtaaatgcctctcagctctgttgttaattttgtgtggtgaataataagaagacagctactttgtgtgt

SEQ ID NO: 920 - DNA, 1629 bp, Oryza sativa
  ref <308>: DATABASE ACCESSION NUMBER: AK058999
  ref <309>: DATABASE ENTRY DATE: 2001-12-06
ggccctccgtggtgacacgagccgtggccacctgaaaaacacactccgcccgcgccgcacctcctcgttgatggatttcagcgtccgagctcgcatccagagcccgcaccggtcggccgcccacttcgtcgccggcgaggggggacgccgccgcccggcaacgtccagggtatccttccgctccatggcgtcggccgcttccgtggaggagcctgccgctgctgcggcggcggcggctgagacgaagaggggaccgagcggcgcctccttcatccgggaacacctcaggagtctcgccccgtaccagcccatcctgcccttcgaggtgttgtccgctcggcttgggcgtaaaccagaggatataatcaagttggatgcaaatgaaaatccatatggtccacctccggaggtagctaaagcattaggaaatttgaagtttccctatgtgtaccctgatcctgaaagccgtcagttgcgtgctgctcttgctgaagattctggtcttgaatctgagtacatacttgctggatgtggtgcagatgaattaattgatttaataatgagatgtgtactcgaaccaggtgacaaaattgttgattgccctccaacttttacgatgtatgagtttgatgcgtcagtcaatggtgcacttgtgatcaaggtaccgagacttcctgatttttctctagacgttgcacagattgtcaaagtggttgaacaggaaaagccaaaatccatatttctgacatctccgaacaacccagatggcagcataatcaatgatgaggatcttttaaagatccttgatcttccaatacttgtagtgctggatgaagcatatattgagttttcgagtcttcaaacaaggatgtcatgggttaagaagcatgataatttgattgttcttcggacatttagcaaacgagcaggtttagctggacttcgtgtgggttacggagcatttcctctaagcataatcgagtatttatggagggctaagcagccctataatgtttctgtagcagcagaagtttcagcctgtgctgccttgcagaacccgacttatttagaggaagtgaaaaatctgctactacaagagagggacaggctgtacgatcttctcaaagaaataccattcctaaagccatttcccagccactctaactttattctctgcgaggtcacatcaggcaaagatgcaaagaaaataaaggaagaccttgcgaagatgggagtaatgatccgccactatgacaagaaggaactaaagggatatattcgtatttcagtgggcaagccagagcataccgatgcactaatgaaaggcctgaaagcacttcaactgtgatcatcccatctgtttgacggaagcactgaagcacttgcccgtggtagtgcactagatgcagtctctcaatggaggttgcatcaatctaacacaaataaggtgcatcctctagggtcgattatgtctcaataatacactcttctgttttgaccagtggcgttttgtccagcatttttgtgttggtcgacttgggtttcttctcaaggtgattgttcgaagcaagaatttgtactgccgtgccctgattggaataaatatgagcgtaaaagtatggcaagtct

SEQ ID NO: 921 - DNA, 1085 bp, Oryza sativa
  ref <308>: DATABASE ACCESSION NUMBER: AK059000
  ref <309>: DATABASE ENTRY DATE: 2001-12-06
gcaaaaccacccattctccttgaatcttgcctccaaaaactcttgccacttagcattcacaatgctcaccacatcatcacatagcaggcaccaccatgcatttgagaggagccccaaccacagcatgatgaagaacatagcagacaggaacaagcatgatcttcttcagagtgccatgaaccatgcagcaagcaagtacatgcagaggatctaccctctggggatccagaggagcagctccaacctcacactctcatcactctccctgtcacagaactccaatgattcttcactcagcagctcaaactctagctgggagcccaaggtgcccctgctgtatggtggcacatttagcccctggggtgatgtgcttgtgtccctggagaggaggagggaagaagatgatgacaaggttagtgatcatgatgttgaggggggagaagaggattttgattgcagtgagcctgggagcttgcataggtgcagctggatcaccaagaacagtgatgaggcgtacgttcagtttcacgacgagtgctggggtgtcccagtgtacagcgacaaccgtctgttcgagctgcttgcgttgtcaggcatgctcatcgaccacaactggactgagatactcaagagaagagacatgtacagggaagcgttcgcggacttcgatcccagcacggtggcgaagatggacgagaacgacgtcgcggagatcagcggcaacaaggagctcaagctggccgagtgcagggtccggtgcatcatcgagaacgccaaatgcattcagaaggtggcgaaggagtttgggtcgttcagcggatacatatgggggcacgtgaaccaccggccgacggtggggaggtacaagcaccacaagtacatcccgttccggacgcccaagtcagaggcggtgagcaaggacctcgtccgccgcggcttccgcctcgttggccccgtcatcgtctactccttcatgcaggcctccggcatcgtcatcgaccacctcgtcgactgcttccgcttccctgaatgcctccacctcgccgaccgctcctggggcattaccaacgtcgctgcctaatgac

SEQ ID NO: 922 - DNA, 1340 bp, Oryza sativa
  ref <308>: DATABASE ACCESSION NUMBER: AK059001
  ref <309>: DATABASE ENTRY DATE: 2001-12-06
attagttatgtttgtgagtgagcattggtattcgatgtttctttgttgggaatggattactaacgctaatatgtttcggagttactaatgcgcggatttgttctttcagtctcaagttgctgggacccaggaggggcaaactggtacagcacaatcagtgctcactgaagatgggcctgatgtccctttatctgacaatattgttttacggaagcttcttcgcataccaagatactttgatcctggtgaaactttattggaaacatgctttaattgtggtgaggagggtcatgtagctgtgaactgtccaatggaaaagcggaagaggccttgttttgtttgtgggttgtttggacacaattcaaagcagtgcacgcaggttggtctccctagctccaaggcattattgcttggtgacttggggtcaagactgtttcatctgcaaaaaaggaggtcatattgcgaaagactgccctgaaaagcacaataggaatactcaacagtctactttttgtttacgatgtggagaatcaggtcatgatatgtttggatgtgccaatgattatccacgcgatgatgttaaggaaataaaatgctatgtgtgtaatcagaaaggtcatctatgttgcgccgacttctctgatatttgtccaaaagaagttagttgttataattgtgcccaacctggtcatactggtttgggatgtgccaagcaacgtagggaagctagtaccgcggcaactccaactttgtgttacaaatgtggcgagggaggccacttcgcacgtgggtgcacaaagaacaccaagtctgatcgtatgaacggtgaatcatctgcatatagtcggaaaaaaggcaaaggcaagaaagattttggcactagatcagctcctcatgatgctcgcaagacaagtaaaaggaaaagccccttatttgaggaaagaaggaactcatctcattttaagtccaaagctaggggtggttggattgcagacgatgcggatgaccagccatacaagaagtgcaaacccaatgtgtgggcttctccatctacccctaagaagcaatacaataaccatcagttctcttctggtggtgactactcaactcctcagtcttcaagatggcagaaacacggtttcgcatcgccgagcgcaacttactcaccaaacacaaggaagcatagcttttcatcgtcgagattcgccagcaacactcatgtccggtttggaagaagctagctggaagctagtttttgacatttttttgccgttctgtttacaaacacaattgatcatcacttgtgcctgcaagggctgtttctgtatcttaaattacac

SEQ ID NO: 923 - DNA, 1268 bp, Oryza sativa
  ref <308>: DATABASE ACCESSION NUMBER: AK104035
  ref <309>: DATABASE ENTRY DATE: 2002-08-28
gtgcacaccccgggaggaggaaccgagggaggaggacaagtcagagcaaggggcctcgacggcggcgaagccctccaactcacaggcgccatgtcgatgtcactgttccctgggatggatcttacgaaaatggatgctcctactcttaccctccttggagcagcctgctgtgtaatgctatcgatgcattttacagtacagttggtgtcgcagcatcttttctattggaagaatcccaaggagcagaaggctatacttattatcgttctcatggctcccttatatgctataaattcctttgttggtcttctggatatcaagggaagcaaaacatttttcactttcttggatgctgtcaaagaatgctacgaggcactggctattgctaagtttatggcactgatgtacagctatttgaatatatctattagtaagaacatagttcctgatgagatcaaagggagggtgcttcatcattccttccctgtttcccttttcctgccccgcaatgttcgattggagcataaaacactgaagcttctgaagtactggacctggcaatttgttgttgttaggcccatatgcgccattctaatgattactcttcagcttcttggtctgtaccccagttgggtcagctggacattcacaatcatactgaacttttcagtctccatggcattatacgcactggttattttctaccacttgtttgcaaaagagctggcacctcacaaacctcttgcaaaattcttatgcatcaaagggattgtcttcttctctttctggcagggttttgcattagaggttttagctgccgtagggatcattcagtcccaccatttctggttggacgtggagcacatccaggaggcaatccagaatgtcttggtgatcatcgaaatggtctccttctccgttctccaacaatatgcttaccatgttgctccatacagcggggctgacagggcgaaattcgagaagaagaatgaatgatccaggttttgtactgagtaataccctccagctcttgtatgatatctctctgtatggactcacagtgttataaactcagtgtttcttatgcacacgagtagagtaagtacattacaatcattagaaagctagaggtgcctgaataagtggtggtttcgtcttgttgtacacaatatcatgttggactgaggatcttgtgtgtacactgtacagtgcagcctttggaggcaagcaaatccattatcaataaagctatgtacttccaagtgcct

SEQ ID NO: 924 - DNA, 951 bp, Oryza sativa
  ref <308>: DATABASE ACCESSION NUMBER: AK104036
  ref <309>: DATABASE ENTRY DATE: 2002-08-28
agaatgcaattgagaaacttcccaacaacatttttgagaagagttatcctttgagacagtttgatctacaaaaacgaatcagtgctttcttttacaaagcggcagagcttagcttgttaggggtagttgctggttctattcaaggtggcctctcaaaagccttgtctgcaagaaaggaaaggaggttatcggttaccattccttctgtcagcacaaatgcccttggctatggagccttcctaggactatatgcaaacttgcggtatcaactattgtgtggactggatcagtatatggtcaggcgatttgatgttcttggtgtggcaatcttcttcagcacagcactaagattgacgaatattcagattggtgaatcatcgagacgcacatggcttggggaggaagctgatccacagtactcagatcggctgctgagagcatataaaagaccagtcgaggttgctggagaccaacaagattcaaggtggtttatatcgaaggatgcgattgtatctggccttggtcttctcggcatcaagcaaggtggaacagaagctgcattgtccaagccccgcaggaagagagttgtccgaaagaaagttgcctcaacctgaatttagttggatgttgtctaatgctggaacaattttgctttagttccactacgccgtattgagttctacccagcaaggcgaacgagggaaaccgtagttggcagccagccttgcagtctgtcgtggaaggcatcgaagcggtggtggtggtcataactgggagggttcagaactggaggccctttaccattttgtatcttttttcttctcgctttctgataagaattgacatcccaatttcttgtactgttgtgagccaagtagactcggcatagttgtagtcctggagattgttaaagatacagtcgttaatatgagcaaaaccattccatttttg

SEQ ID NO: 925 - DNA, 764 bp, Oryza sativa
  ref <308>: DATABASE ACCESSION NUMBER: AK059002
  ref <309>: DATABASE ENTRY DATE: 2001-12-06
gggctgccgagggctccgttcgacgctttacttctgccagagtatgaccaacgctgcggtgatcgccatttctcaaaattgcgtggaccttaaggtattccggttatgcataatgggacgtcaccagcctgaccatgtgactggggagcccatggatgaagggtttggtgccattgttaggaactgcagcaagcttactaggctctccacatctggacacctgactgatcgagctttcgagtacattggcaagtatgccaagtcgctccggacgctctctgttgcgttcgctggagacagcaatctggcgttgcaacacatcctccaggggtgctcgaagctggagaagctggagataagggattgcccatttggggatgctggcctcctctccggaatgcaccatttctataacatgcggttcctctggatgtcaggttgcaaccttacgctgcaaggttgcaaggaggtcgcacggaggctaccaagattggtggtggagctgataaatagccagcctgagaacgaaaggaccgacagcgtggacatcttatacatgtatcggtcgcttgaagggccaagagaggatgtaccaccattcgtgaagatcctataagctgcttctgcagagtggcacttgatacgctgaatgcggcctaagcaacaagggaaggtaagatagctggagtcaggcgtatgatcattttttgtatgcttgaagttggaaggagttctaaagccatctatcagagctgcaaatggtt

SEQ ID NO: 926 - DNA, 572 bp, Oryza sativa
  ref <308>: DATABASE ACCESSION NUMBER: AK059003
  ref <309>: DATABASE ENTRY DATE: 2001-12-06
aaaaagaaatccactagggaaaaaggggcaaggccagctaagttttggtctaagggaagcattgaagcttggttaatggaataactacccctgaatgtagaatggagtgctatttagtaaaggacgaagactgaattcaagaaagcagaagatcaaagacaaacgttggtgttactcctttatcaacactctgtgaagatacaaactaactttttgggttccatcagccggacacacaagaaagccacgtacttgggtttcttcaaagagttcaacatccgtggaccctccaaccgtataggtgtttttttttccttttttaaataggcacaactcacaagaatagcgtgtgtgttgtttcatactttcatgtcctccttttccgttctggaaacccttgtaggatgctctgctgagacggtgaagctttgacacgcttggaacttcggattggagagttggacgagattcctttgcattggagagttgtatagttgctagtattgaaatgttgtaagaattcgtaggttgtaacataaacagtaaaatgaatgaaatggttgttttagtat

SEQ ID NO: 927 - DNA, 858 bp, Oryza sativa
  ref <308>: DATABASE ACCESSION NUMBER: AK059004
  ref <309>: DATABASE ENTRY DATE: 2001-12-06
tctcggcgaaaaaaaaaatcctcttctcatctcctccctccgagtcatttcccgcaccgccgcctccacttcacccgcctcgccgccgccatcgccgacgtcgccgccgccgtcgctgcggcgagcttcccgtccggcaggccgatggacaccgtgggcgcccgcctgagccgctcgtcgacgcggtacggccccgtcgggaacaccgcctcctccttcagcgggcccgtcaggaagtggcgcaaggcctgggtccccatcgccgccggcggggcggggtacgccgggatgatgggccccatgggtgtctccagggggaacaaggtggtgctgttcaggtgggcgccggtgaacggcggcgcggccgggggtggcggtggcagcggcgacggcgacgagtcggcagcggtggcggccaccaggcggcgcttcgttccggcttcaggcgtggcacaaaattctaccaagaagagcggcagcaccgagctgaatttgaaccttgggttggaagatccagatgacgacagcgatgctgatctgagcgcagaagagcaacgtgacagtggaagtaaccaacgctcagacaacagactgaagagaaaagccttttaaccgcccagtcctttgatgatgagaacgtacgtggtcatgcgaggccactcatgtaatcttattagcatctatctcctagctcttagcttgtgttaggcattagcaattgtgtattgtagtccagaacaatgcattagccagttgtagtcttattagcatcttatgccaatatgcccccttccatgagctgatgatgtagcaacatgttattacaccaagtgttaatgcatgaacttgtcagattgg

SEQ ID NO: 928 - DNA, 681 bp, Oryza sativa
  ref <308>: DATABASE ACCESSION NUMBER: AK059005
  ref <309>: DATABASE ENTRY DATE: 2001-12-06
aaaaaaaatgaaagattggagaggagggcgtggtgctgctcaaaacataattcctagctccactggtgcagccaaggctgttgggaaagtcctccctgagctaaatggaaagctcactggtatggccttccgagttccaacaccaaatgtgtctgttgtcgacttgacctgccggattgaaaaaagtgcatcctatgacgatgtgaaagcagccatcaaggcagcatcagagggtgcactgaaaggtattctaggttacacagatgaggatgtggtttccaatgacttcgttggtgatgcaaggtcaagcatctttgatgccaaggctggtattggactgagctcttccttcatgaagcttgtgtcatggtatgacaacgagtggggctacagcaaccgtgtgttggatctgattgcccacatggctcttgtcaacgccaagcactgatttgttgaaaatcctcctccgatagtatctagctaggaaaggctgcaattttgacggtctctttctgttgtcttggaataagatgtaaacttggaaacaaagcaaaaaaagaatggacattgatgtccatgacattgtttgtagcaggcggtgaaatttactctgtatcgacctgggcaagcggaactgttgagtgaaccatatgtcggcaacctgattgattcattgagtcc

SEQ ID NO: 929 - DNA, 1361 bp, Oryza sativa
  ref <308>: DATABASE ACCESSION NUMBER: AK059006
  ref <309>: DATABASE ENTRY DATE: 2001-12-06
agcggatataaaaatccccaaatccccacacgtctatcgtttcgtttcctctctctcctcgtctcgtctcttctctctccatttttctcgaagcgagagtgcgttgcgttgcgagcgggaagcgaaaactcgaaaccatggccacggccggcgacgagcagcagcagcaggcggcggcggcgcagacggcggaggtgacggaggcggcggcgaaggaggtggtgtccgtggagatgccggcgccggaggggtggacgaagaagtttactccccagagaggggggagatttgagattgtttttgtttcaccaactggagaagagattaagaacaagagacagctgagccagtatctgaaggcacaccctggaggccctgcatcctcagagtttgattggggaactggtgatactccaaggcgctctgctcgcattagcgagaaagttaaggctttcgatagcccagaaggggagaagatcccgaaacgttctaggaactcatctggcagaaagggcaagcaggagaaaaaggaggccaccgaaaatgaagaagcgaaagacgctgaagctgacaaggaggcccctagcgaagatgctccaaaggagactgatgtagagacaaagcctgctgaagaggcgaaggaggcccctagcgaagatgctccaaaagacaccgatgtggagatgaaaactgctgaagatgccagcaagaccgcagacgccgacactcctgctccagcaccagccggaaccgagaaggaagatgcaaaaccggctgaatctgaggctgctcctccagcaccatcggaaggaggagagaagaaagaggatgcaaagccagctgaacctgaagcagcagctgctccaccaagcaacccaactgagccttccgcacccaaagctgctgctgctgctccagtagagaactccgcggacaaaggccctcaccaggacagccagccgccttccgccgccgcccccgccaaggagtcatcccctgtcaacaacgggcagctgccggctggtgcctctgccgtgaagtgcacctgaagatgaagatgaaaccccccaacgaatcatcatcctcctccccttgtccgtgatgtacgccttttaggaatcattcgcatttgcattgtgtaatcaaatcgaccaaggaactgacgttgctgggtgacagccggttattaggctctgcatcagtttagcttgcttgtatgtatggtatgattgtggtgtggcacagcaacatacatacatacatacgtgtaccctacccatcatgctcataatatctcttatcatgcctaacttgctgtaagcacattaatcttaggacatatataccgtcgtctgtccgtc

SEQ ID NO: 930 - DNA, 480 bp, Oryza sativa
  ref <308>: DATABASE ACCESSION NUMBER: AK059007
  ref <309>: DATABASE ENTRY DATE: 2001-12-06
gaggagagagagagagagaggaggaggaggaggagagcggcggcggcgatggcggggaaggggttgaacgcgacgggggagttcttccggcggcgggacgactggaggaggcacccgatggtggggaaccagctgcgccacgccacgccggggctcggcatcgccatcgtcgccttcgggatctacctcgtcggcgaggccgcctacaaccgcctctaccgcccctccggcgaccaccaccaccactagatcgcgtcggcggccacgcgcggagacccgcgccgcctccccgaggtgaagtggttggagcaatctttaccaagcaccaatgttgttgatcttttccagtttgagttcataaggtctgccatgaggcccatgaccatcatgtaatttgcaaccagggagacatgaatcatgtacttttatatcaatgttctgtgcttataatccagcatttggaaattggaagtgacactt

SEQ ID NO: 931 - DNA, 400 bp, Oryza sativa
  ref <308>: DATABASE ACCESSION NUMBER: AK059008
  ref <309>: DATABASE ENTRY DATE: 2001-12-06
catgtacccatggaagggctacactctcgtcgaagaggacggctgcctcaagctcgggtggaaggacctgtccctgctcaccgcctcgtcgtgggagccgacagacggcgacgccgacgccgacgtcgccgtcgccggcgatacccaccatgagagccacgattcttgatcacatgatcgcagtagcagccaggtcgattcacctgtcgcagcttttcttggtcatattcattatcctctttctgctagctacttcattcgatcgttcttcctcctgtgagtagtattttggccgatgattaagcttgtaatataatcgtataggcttcatcattcgttccctctccaggttgccatgaacaacaccatttcaattacaaaatagaactcttctacctcc

SEQ ID NO: 932 - DNA, 725 bp, Oryza sativa
  ref <308>: DATABASE ACCESSION NUMBER: AK059009
  ref <309>: DATABASE ENTRY DATE: 2001-12-06
tcaaggccccttcttcgtgctgctgcaaatccaactgcagctgctgcagcagcgattgctgcacctgcagccttcccagctgcggctgcacaggctgcggccactgccgaccgttgtgtggcggcggcggcggctgctgtccgcccagcgactgctgctccagctgcaagtgctcgtgctcgtcctgcacgcggtgctgtagcagctgcgccggcggctgcaagccgagctgcagcggctgcggcacggggtgcttgtcctgcggcggcggctgctgccccaagtgctcgtcctgcgcggcgccgtgcgtcggctgcctggctctgctccggcggtggctgagctgccggtcgtcgtgctgcaaggggcagccgtcctgctgcaagtgccagtcgtcgtgctgcgagggggagccttcctgctgctgctgctgcggcggcgggaagggatcgtcggcgtgctgctgcggcaggccttgctgcctcggaggcgcgacgccggcgccgtcgtgccccgagtgctcctgcggctgctcgtgctcctgcccgaggtgcaaagatgggtgcagccgcccgtcgtgtggcaatccgtgctgtgccggcggatgcttatgctgaagtagatcgttaaactacagtatggttttgtactattctttttgtgcttgttagaacattggatttgagtaaaactcatatggtatatgcaagggcgaatcgagaacg

SEQ ID NO: 933 - DNA, 1669 bp, Oryza sativa
  ref <308>: DATABASE ACCESSION NUMBER: AK059010
  ref <309>: DATABASE ENTRY DATE: 2001-12-06
aaggcaaattaaacaaaacgcatcatcaatggagacgagggagctgtgggtgctagcggcagcgctcgccgtgtcgctcctctactacctcgccgccctgatgcgctacgccggcggcggctgtagcaggagcagcaggccgccgttgccgcctggcccgacgccgctgcctctcatcggcaacctgctcagcctccgcggcgtcctccaccaccggctcgcgagcctcgcccgcgtccacggccccgtcatggcgctcaggctcggcctcaccacggccgtggtcgtctcctccagggacgccgcggcggaggccttcacgaagcacgaccgccgcctcgccgcccgcgtggtcccggacagcaaccgcgcgcacggcttctccgaccgctccatcatatggctcccgagctccgacccgcggtggaaggcgctgcgcggcatccaggccacccacctcttctccccccggggcctcgccgcggtgcgctccgtccgcgagagcaaggtgcgcgacatcgtggcctacttccggtcgcgcgccggggaggaggtggtgttcggcgaggccatctacagcggcgtgctcaacctcgtctccagctccttcttctccgtcaacatggccggcgtgggctccgaggaggcgcacggcctgcgggagctcgtggaggacctcgtcgaggcgatcgcgaagccgaacgtctccgacctcttccctttcctccggcagctcgacctgcagggcttgcggcggcggacggaggagcgcatggcgagagccttcggcatcctagacggcataatcgatcgccgtctggcgaaccgcactcacggcgaccggcacggcgacttcctcgacgcgctcctcgacctcgtctccgagggcaagatggcccgggaccacgtcacgaccatgctcttcgaggtcttcggcgccggcagcgacaccatgtccgtcagcctggagtgggcgatggccgagctgctccgcaacccgcgcgccatgcgcaaggcgcgcgcggagctggaggacgccgccgccgtcgtcgaggagtccgacgcggcgaggctcccttacctccaggccgtggtgaaggaggccatgcggctgcaccccgtggggccgatcctgctcccccaccgcgccgtggaggacggcgtggagatcggcggctacgcggtgcccaggggcgccatggtgatcttcaacgcgtgggcgatcatgcgcgaccccgcggcgtgggagaggcccgacgagttcgtgccggagcgcttcatggagacgactacggcgatcgatttccgcgggaaggagtacgagtacctgccgttcgggtccgggaggaggctgtgcccggggctgccgctggcggagcgcgtcgtgccgttcgtgctggcctcgctgctgcgcgcgttcgagtggcgcctccccgatggcgtgtccgccgaggacctggacgtcagcgagaggttcaacaccgccaatgtgctcgccgtgcctctcaaggtcgtgcctgtcatcgtcaactagtcacaccttccgtatagtatcaaaatatataattttgaaacactcctgttcgagagagtgctttaggagaaaatgcaagaaattaatgttcttgtatcacttcctccaggtttataattattcttgatgctttgt

SEQ ID NO: 934 - DNA, 323 bp, Oryza sativa
  ref <308>: DATABASE ACCESSION NUMBER: AK059011
  ref <309>: DATABASE ENTRY DATE: 2001-12-06
gtcgcttcaggcgcttgcccgcaagtacaaccaggacaagatgatctgccgcaaatgctatgcgcgcctgcaccctagggctgtcaactgccgcaagaagaagtgtggtcacagcaaccagctgaggcccaagaagaagatcaagaactagagcgtcactcgccgggttcatggactggttaaatcaatcgtcatattagacttttatgcttccgttgttatctccctggatgttgttgaaccgtgttttactgtgctggatgcttcagcttcttgttttgacggtcgtggtatatggtaattggcagcaaactatattggtc

SEQ ID NO: 935 - DNA, 703 bp, Oryza sativa
  ref <308>: DATABASE ACCESSION NUMBER: AK059012
  ref <309>: DATABASE ENTRY DATE: 2001-12-06
gcagagagcgcagacgcgagcgcagcgcaaaagatggcgacgatgtccctcgccgcggcgtcccccctcgcctcgactccccgtgggcccgccgtctccactccccgcacggccttcctcggcctcctgaccggaggggcgtcgctggcgccgttcccgggactggcggcggcggcggcgccgccgcggctgccagcggggaggggcgacgcggccgtggccaggatggcgaagagggagcaggagctggaggagattcgggccatgccgacggagaagatcgaggaggaagtggtggacctgaagggggagctcttcatgctccgcctcaagcgctccgcgcgccaggagttcaaatccagcgagttcggccgcatgcgcaagaggattgctcgtatgctgactgtcaaaagagaacgggaaattgaacaaggaatcaacaagagattgtctaggaagcttgacaggaaatggaagcaaagcatcgtggttagaccaccaccatctctaagggagaacaaggaggaatagagagccacgaaagcagacagtctgtagaagtcatttcatgcatgtcttgaaggaaggtttctttctccctgtggtttcattccttataatggattgatatgtaattcacattaactgatttccaagtccttgctgtcaaaaccaaaagttctattaccaattccatttgtgt

SEQ ID NO: 936 - DNA, 1167 bp, Oryza sativa
  ref <308>: DATABASE ACCESSION NUMBER: AK059013
  ref <309>: DATABASE ENTRY DATE: 2001-12-06
aagcctccattagaattattccctcctccctacgttaccctgccggatgattgccctaccctcatctcatcatctcctccacctataaagctacccagctgatgcttccgatacgatcgagccgaagattatctgtctagtagctgatgctaagctcatcgtcgagcttgcatgatagctagtgcatcatcagctgcaagaagaacagccaagaacaagaagctgctgagctcaacaagctgtgtgcatgcgagtcgatagggagatggagagaggggacgaggcgtcggtgaacagggggtggcttgagctcaggctaggcgtgaacggcggcggcggcgttgagacggtgccggtcacggcggcggactcctccgcgtcctcggaggccggcgaggcggacacggtgacgccgtcgcagcagcagcagcagcagcagcagggttctccttcttctccggcggcgtcgtcggcgccgaacaaggtgttctcgtgcaacttctgcatgcgcaagttcttcagctcgcaggcgctgggcgggcaccagaacgcgcacaagcgggagcgcagcgccgccaagcggacgccgtcgtcgtcgccgtaccacctccaccaccacaggatgatgatggccggcgccggcctgccgctcgaggcgcacgccgcgttcatgcgcgccgccctccgcgtcaacccggcgggctcggcgatccacaagcagcagcagcagcaccagccgccgccgccgatcacccaggacgccacggcgccgaggttccacgacggcgcagccgtggcggcggcggcggcggtcacgccgtgggcgcccgtcgccccactcgcctacgacgaggtgctcagctcgtcggcgtcgtcgtggcccgggagcttcaggttcagaacgcagcctgagcctcctcccagctcggagcaggagccgccatcagagcagagtaagaagatagacttgagcctcaggctgtgatgtgagagattatactagtagattatgataggtgatcaattgatcatcatcatgatataaatccatgcatgtcctaggtgtagagctagctcttgtactaattaatttgaccagtatataatcatcatgtgtttgattcttcagtttgatatataatgattccaggaagagattagtctgcc

SEQ ID NO: 937 - DNA, 892 bp, Oryza sativa
  ref <308>: DATABASE ACCESSION NUMBER: AK059014
  ref <309>: DATABASE ENTRY DATE: 2001-12-06
atcagcaatgcttcctgcacaaccaactgcctcgctccgttcgtcaagatcttggacgaagagttcggaatcgtaaagggaaccatgaccacaactcactcctacaccggcgaccagaggttgctggacgcgtcgcaccgtgacctgaggagggcccgggcggcggcgctgaacatcgtgccgacgagcaccggcgccgcgaaggccgtggcgctggtgctcccgcagctgaaggggaagctcaacggcatcgcgctgcgcgtgccgaccccgaacgtgtccgtggtggacctggtgatcaacaccgtgaagaccggcatcaccgccgacgacgtgaacgccgcgttccgcaaggccgcggcggggccactcagcggcatcctcgacgtctgcgacgtgccgctggtgtccgtcgacttccgctgctccgacgtctcctccaccatcgacgcctcgctcaccatggtcatgggcgacgacatggtcaaggtggtcgcctggtgcgacaacgagtggggctacagccaacgcgtggtcgatctggcgcatctggtggcgagcaagtggcccggcgcggcggtgcagggcagcggcgacccactggaggacttctgcaaggacaacccggagaccgacgagtgcaaagtgtacgaaaactaagaccactgtccaagtacgggctcgcgtaggtgcagaaatatatactcctataatgtaacgaagcacacacattgactgtccccgggcagaactgctatactatatatactgtgctcggattggctgcccgtacgttgttccccttcgacagaggaacgcatgactgtcgaagaagaaacacagctgcagacacgggccattttctgtgaggtgtaatactgaactttggtac

SEQ ID NO: 938 - DNA, 437 bp, Oryza sativa
  ref <308>: DATABASE ACCESSION NUMBER: AK059015
  ref <309>: DATABASE ENTRY DATE: 2001-12-06
gaatgttagagatgaaaatttagcgagtgagcgagggagggagtggccgttcttcgcgaaagcactgactgagcacaatgcttcatgtttcagcactcatcaactggtgagatgtcatacttgttgtccttctgcatataaggaaaaatctgtcgaaggatggcgtcttgtaaagtcctttctggtgtgcttttgtgatcttgcatgggtatagttgcaagaatgatgatgaaagttgagattttgggtgcttgggcagtgcttattttcttgtcctttttcttttttgttgatacaacactaagattacattggtttggtttgtgttaggagtctattgatgtactacagcaacttgtgcccctatattttggccaattgtgtattctgtgctgttgatgctttgactaaatagagagcagtttgtgtcgacgtct

SEQ ID NO: 939 - DNA, 1501 bp, Oryza sativa
  ref <308>: DATABASE ACCESSION NUMBER: AK059016
  ref <309>: DATABASE ENTRY DATE: 2001-12-06
gagcatcttatctttgcagctaatagtagccatctcgcactaaaatggcgatcccgaccctcgtgctgctgccaacctggggcaccggccacctcatgtccctgctcgacgccggcaagcggctgctcggctgccgcggcggcggaggcctctcgctcacggtgctcgtcatgcagccgccgaggaaggagtatgcgtccgccgtcgccgccaccgtgcgccgggaggaggcatcgggcctcgacatccgcttccgccacctccccgccgtcgagcccccgaccggctgcgcgggcgtcgaggggttcgtctcccgcttcgtgcagctccacgcggaccacgtgagggcggccgtctccggcctggactgcccggtggccggcctcgtcatcgacttcttttgcacgacgctgctcgacgtggcccgggagctcgccgtcccggcctacgtgtacttcacctccaatgccgcgtgcctcgctctcttgttgcgcctgccggcgctggagggggaggtcaccgtggagttcgaggagatggacggcgaggtggacatccctgggttgccgccggtgccgccgtcgtcgctgccgatgccggtgatggacaagaagaacccgaactacacgtggttcgtgtaccacggcaggcgtttcatggaagccaacggcattatcgtcaacacggtgcgcgagatcgagcggagcgtccttgccgccatcgccgacggccgcgtcacgccgggagtccgtgccccggtgatccatccggtaggcccggtgatctcgttcaccccgccctccgatgacccaccgcacgagtgcgtgcggtggctcgacgcgcagcctccggcctccgtcgtgttcctctgcttcgggagcatgggcagcctcgcgccgccgcaggtgctcgaggtggcgcacggcctggaacgcagcgggcaccggttcctgtgggtgctgcgcggcgctccggccgccggcggcagcatgaatcccaccgacgccgatctcgacgagcttctcccggagggtttcctggagaggacgacggggagagctctcgtgtggccgacgtgggcgccgcagaaggagatcctcgcgcacgccgccgtgggcgggttcgtgacgcacggcgggtggaactcgacgctggagagcctgtggttcggcgtgccgatggtgccgtggccgctctacgcggagcagcacttgaacgcgttcacgctggtggccgccatgggcgtggccgtggccatgaaggtggacaggaaacggaacaacttcgtcgaggcgtccgaggtggagcgcgcggtgaggtcgctgatgggtgggtcggaggaagggaggaaggcaagggagaaggcggcggagatgaaggccgtgtgccggaaggctgtggaggagggtgggtcgtcggacatggcggtgcataagctctacgaggagctctccacgcagacggcttaaaatactactctctctgttccgtttcaggttat

SEQ ID NO: 940 - DNA, 1019 bp, Oryza sativa
  ref <308>: DATABASE ACCESSION NUMBER: AK059017
  ref <309>: DATABASE ENTRY DATE: 2001-12-06
atggcaggaaactctactcaacctgcttcttcgcaactacctgcactacaacttgtatgaccaagcagaaaagcttaggtccaaggcaccgcgttttgaagcacattctaatcagcagttctgcaggtatctgttctacttgggaaaaattaggacaattcagttggagtacactgatgcaaaggaaagcctactgcaagctgctcgaaaggcacccactacagctcgtgggttccgagttcagtgcaacaagtgggctatcatagtgagattacttttaggagaaataccagagagaactgtttttatgcagaaaggaatgaaggctgctttggcaccatattttgagcttacaaatgctgttcgagttggggaccttgaattgttcagagcagtggcagaaaaatttgctagcactttcagcgcggataggacgcgcaatttgatagtgaggctgcgccacaatgtcattcggactggattgcgcaacataagcatttcatactcacggatctcccttgctgacattgccaagaagctgaggttggactcagagaaccctgttgctgatgctgaaagtattgtagccaaagcaatcagggatggggcaattgatgccaccattgatcatgccaatggttggatggtgtcaaaagagactggtgatgtctactcaacgaatgagccacagattgctttcaattcaaggattgcattttgcttgaacatgcacaacgaagcggtcaaagcactgaggttccctccgaattctcacaaggaaaaggagagtgctgagaagaggcgcgagaggctccaacaggaggaagaactagcaaaacacatggctgaggaggacgatgacgacttttagattggtgatttcttttcatgctttcagttgctgcctcaagggtttcattttgaagcatgggcatccattcagttttaagagacggaagatctcgaaatgccaaccctgcttttctgggatagttgaaaccatggaaccgttgacattt

SEQ ID NO: 941 - DNA, 1480 bp, Oryza sativa
  ref <308>: DATABASE ACCESSION NUMBER: AK059018
  ref <309>: DATABASE ENTRY DATE: 2001-12-06
aggatttcagaaaccaaacaatcagcaatcactttcaagagaagcagagaccaacggtcttggtagtagttaccatgatagcagggaaggaggagcttcaataagtcatattgatgaacaggatggtcatcaggaaacaaatgcacagactagcctagacaattcagaaggtttgccatctccatcagggagagcacaacctgcagtttccccacggggtcagacctttggacaaagaattatggggaatatgatggacaatcttttggtcaggagtcttacttccaaatcaaaaggtcgtacagacgatattgtgccaccctcacctgtgaaggcacctgatgctgacggggctgacaaaactgacgatgaagagaatcctatgatggagactgttaggagtaaatgtatcactcaattactgctacttggggccattgacagcatacagaagaggtactggagcaggctaaaaaccacacagcagactgcaataatggatattttgctatcactcctagaatttgcttcttcctataactcaacttcaaatcttcgaaccaggatgcaccatatacccccagaaaggcctccactgaatcttcttcgccaggaactagctggaactgctatctatttggagattcttcagaaatcaactgtggaacatgatgggaatgacccaagtgaggatacaaatgggcacgtcatagaatctgatgaacatgaaaagctcaagagcctcgcagaagggaagcttgtttcgttttgtgggcagatcttgaaagatgcttctgatctccagccaagcactggggaagctgcaagtgcagacatacaccgtgtactggacctaagggcaccagttattgtcaaggttttgaatggaatgtgtatcatggacgctcagatattcaagaagcacatcagagagttctatccattaattacaaaacttatctgctgtgatcagatggatgttcgtggtgcccttggtgaccttttcagcaaacaacttaccccactcatgccctgagttgtgattgtacctccttccgttgcatatatcttctcttgttggagtatattcagtattagcatttttgtgcaaacatggagcgtcagaaagaagcttaacgcccttaaaggcacacatctgagctcggtaggctgtaaattgacaagcttaaggtttttgcaggtgttctaagtacgcaagaaaattagctttgcatgttgcgcatgaaatttttccttgccactttcgttctgtgtattattatttatctatgcggggactggaactatgcttctatacacaagtagaggattgaggcgagggaatagcattggctagtgctatgtatacattgttcaggatattgtactcgaggcgtgttgttatacggcaatactagattactcttggtagagcatctaggttggtgcattcaataaaagttgtgtcatcattgttgtc

SEQ ID NO: 942 - DNA, 594 bp, Oryza sativa
  ref <308>: DATABASE ACCESSION NUMBER: AK059019
  ref <309>: DATABASE ENTRY DATE: 2001-12-06
aattccacacaaggcttcttccacatctccacccaaattccaaatctctcggtgatcggagcggttagctgcggcgatgtcggggcgcggcaagggaggcaaggggctgggcaagggcggcgcgaagcgccaccgcaaggtgctccgcgacaacatccaggggatcaccaagccggcgatccggaggctggcgaggaggggcggcgtcaagcgcatctccgggctcatctacgaggagacccgcggcgtgctcaagatcttcctcgagaacgtcatccgcgacgccgtcacctacaccgagcacgcccgccgcaagaccgtcaccgccatggacgtcgtctacgcgctcaagcgccagggccgcaccctctacggcttcggaggctagacgagtacagattcgatggtgttgggcgtagcagcgctagcattattatgtcgtgtgctccgtgtgtgtcgttgtgtctgtgactccttgtgttctagtcgtcggtgtgtttcatcaagtttcgacttctggtcgactggatgtaataccttgttctgttcaatgaaaccttgtttatgaccgaaaatatggaggtttggaggttt

SEQ ID NO: 943 - DNA, 724 bp, Oryza sativa
  ref <308>: DATABASE ACCESSION NUMBER: AK059020
  ref <309>: DATABASE ENTRY DATE: 2001-12-06
cagctggtgtcaagctaatagccgttggtgttggcactccagataaagcccgtattcttgctgagcgtttaccatttccattggactacctctacgcagatcctgagcgcaaggcctatgatctcttgggtttgtattttggtattggtcgcacattcttcaatccagccagtgcaagtgtgttttcacgatttgactccctcaaggaggcagtgaagaactatacaattgaagccaccccagatgatagggctagtgttctacaacagggtggaatgtttgtgttcagagggaaagaattaatatatgcaaggaaagatgagggcactggtgatcatgcacctctggatgatgtcctcaacatctgttgtaaagcccctgcggcatgatattgtgtaatcaatgtcccatgagaattttcatagcctggttctgttcgtgtcccaaagttgtatgcagaaaagcatctcttgattttggaaggctggcttctgcaaggatagtatctctttgtctgtacgtctgatctaccatgctgttgatatgtaatatatcagttgaaaacttgagggatgtaggcagaccaaaggactttctcatgccataagctcagcagttcttttccttttcctcatagaaatgtactaattatagaagagaatcttacactgtacaataagtttgtgttaaagttggcgaaattttcctacaaaaaaaaaaaaac

SEQ ID NO: 944 - DNA, 354 bp, Oryza sativa
  ref <308>: DATABASE ACCESSION NUMBER: AK059021
  ref <309>: DATABASE ENTRY DATE: 2001-12-06
agggactcgagcaatcgcaacgggcataggtatatgtgctggccatggcaatggttggggctgaactatgtgcgattgccaccgacagaggcagatcaaacctccaacgagatggagctatctgaacctctgatatagttgtgccatatctatacagattgaagaaatacacgacattttgaaaggaaaaaaaaaacgtgagaaggagatttcattttttttaatttgtgtagatgttcgggaaaattgttaatgcttgtgcaaaaactcacgagggtgttagatgcggcggtgcaattgtaaaatcatgcagttgggattatagttaagctgtcaataagttcatctttaaac

SEQ ID NO: 945 - DNA, 1579 bp, Oryza sativa
  ref <308>: DATABASE ACCESSION NUMBER: AK059022
  ref <309>: DATABASE ENTRY DATE: 2001-12-06
ggacgaccgcatggatgagatgcagatggagatggaggcgcaggcgcaggcgcatgtgctcctcttcccgtggccacagcaaggccacatcaaccccatgctccacctcgcctccgccctcctcgacgccggcctccacgtcaccttcctccacaccgaccacaacctccgccaccgcttcgctcgaccccatcacccaacccgtctccgtctgctgtccatccccgatggcctacccgacgaccacccccgcgccgtcggcggcctcatcgagctcctggactccatgcgcacggccagcagcgccgcgtaccgcgccctgctgcttaccgagtcctcccgctcccgccccgactccctcgacgacgctccgccaccggtgacctgcgtcgtcgtcgacggcgtcatgccgttcgccatcacggtggccgaggagatcggcgtcccggccctcgcgttccgtacggaaagcgcgttcgccttcctggcgtatctgtccgtgcccaggctcctcgagctcggcgagacccccgtcccttccgacgagcaggtgcgcggcgtcccagggatggaggggctcctacgccggcgagacctcccgcgtgtagtgccgacgaaacaagacgacgtcggcgcagaagaagccgatcccgtccccgtgctgctgaccgtcgccgacaccgccgcccactgccgcaactcacgcgcgctgatactcaacaccgccgcgtccatggagggcccggcaatcgcacgcatcgcgccgcacatgcgcgacgtcttcgccgtgggaccgctccatgcaagggtcgccaccaataccattgcactagaaaaacacgaggacgacgacgaggacgacgacgactacggctgcaaggcgtggctggacggccaggacgaccggtctgtggtgtacgtaaacctagggagcctcacggtcctctccagcgagcagctggccgagttcctccacggcctcgtcgccgccggctacgccttcctgttcgtgctccagccagatatggtggccagctcgtcggcggtgctccaagaggcggtggaggcagccggtgagagggcgctggtggtggagtgggtgccccgtgacgtgcactacgtgctgcggcaccgcgcggtggggtgcttcctgatgcacggcggttggaactcgatgctggaggccgccgtggagggcgtgccggtggtgtgctggcccttcttcgccgaccagccggtggtcagccgcttcgtggccgccgtctggaagacggggctggacatgaaggacgtgtgcgacagggccgtcgtggagaggatggtgagggaggccatggagtcccccgagatcagggcgtcggcacaggccatggcacgccagcttaggctggacgtcgccgccggtggctcgtcgtcctccgagctgcagcgcctcgtcggcttcatcaacgagctcagcgccgtgcatgttcgatctagagacgccgacgagaattcatcgcccgcggtttcacttctcacttgatcagtgtcgaaatatgaattccgcaataataaaatggggtagcgcacgagacct

SEQ ID NO: 946 - DNA, 1572 bp, Oryza sativa
  ref <308>: DATABASE ACCESSION NUMBER: AK059023
  ref <309>: DATABASE ENTRY DATE: 2001-12-06
aatgtgcagagtcggttcttagaggagcccaggtgtacatcccaggagttttagcttgcagctcacatgttgaaaagggtgacaaagttgcagtgtcggttgctattgaacaacctgctgaggatggtggttggaccgttggtataacacgaggaactgttttacagggattgcagtcagatgcacatcatgaagaaagaaagggtttgtacattggtcaagggatcactgcaatgtcaaggtccggaatatttcgtgttcctcatggagttgcagtggagatgactgagagggtgtacaagctcccatctttcaatgatgtgctcgaaggggagatatttcttcagaatcttccaagtgttgtggctgctcgtgtccttgatccccagcctggagagcggattctggacatgtgtgctgccccaggtgggaaaacaacagcaattgctatcctgatgaaagaccaaggagaaattattgcccttgatagatctcacaataaggtgatggatattttgaagttggccgctgagatggacctaaattgcataaaagcttataagcttgatgcactcaaatctgtacggaagaccaatgaagcaaaatatattggcgaagcaggcagccgcactgatgcaattgtgacactggcagaggactctgagccttgtattaataaagtcgatgctgggactactaatgccagtgaagacagttctactacatcagttgttcagactgataacaaaaaaacagatgataaaagatatgtgagcaaggcagacctcaggaagaacttaaggcgaatgaggaatggaccaggaagaaataactgctcaggtggtagagttgaaaattctaaaggatttttgcccaatagctttgatcgtgtcctccttgatgctccatgttctgcacttggcttaaggcctcgcctctttgctggtgaggaaacgctggaatcactgagaaatcatgcgacgtaccagagaagaatgtttgatcaagctgtcaagctagttcaccctggtggggtgattgtttattccacgtgtactataaatccaggagaaaatgaagctttggtcagatatgcattggataagtacaagtttttgtcgctcggatcacagcacccaaaagttggaggacctggtattgttggttcatttgagcgatcaaccaagaaatatactgaggagtggttgacaaagcatgaatcacaacttgtccagagattcgatccatcatcaactctggatacaattggtttcttcattgcaaagtttgatgttgggcagaaagacgactgacgtaaggggttctcttgagcattctattttggatcctacactctgaaacttgctgttcctgacttcaaatatctcagcattaacacttgctgcagttagatcatttcagggccccaatcatttttcagtatgaatgggaaccaatatcccatatctggtttcccagaaattttgtgctcaactgtcaatattaaattattctttgtccaagggattattgtttgttgtaatgaaatgccaagggtgactggttgaaagt

SEQ ID NO: 947 - DNA, 1462 bp, Oryza sativa
  ref <308>: DATABASE ACCESSION NUMBER: AK059024
  ref <309>: DATABASE ENTRY DATE: 2001-12-06
gaaagcaaaagcgattcccgtagtagcggcgagcgaaatgggagcagcctaaaccgtgaaaacggggttgtgggagagcaatacaagcgttgtgctgctaggcgaagcggttgagtgccgcaccctagatggctaaagtccagtagccgaaagcatcactagcttacgctctgacccgagtagcatggggcacgtggaatcccgtgtgaatcagcaaggaccaccttgcaaggctaaatactcctgggtgaccgatagcgaagtagtaccgtgagggaaaggtgaaaagaacccccagtgggtagtgaaatagaacgtgaaaccgtgctgagctcccaagcagtgggaggggaaagtgatctctgaccgcgtgcctgttgaagaatgagccggcgactcataggcagtggcttggttaagggaacggaacccaccggagccgtagcgaaagcgagtcttcatagggcgattgtcactgcttatggacccgaacctgggtgatctatccatgaccaggatgaagcttggatgaaactaagcagaggtccgaaccgactgatgttgaagaatcagcggatgagttgtggttaggggtgaaatgccactcgaacccagagctagctggttctccccgaaatgcgttgaggcgcagcagttgactggacatctaggggtaaagcactgtttcggtgcgggctgcgcgagcggtaccaaatcgaggcaaactctgaatactagatatgacccaaaaataacaggggtcaaggtcggccagtgagacgatgggggataagcttcatcgtcgagagggaaacagcccggatcaccagctaaggcccctaaatgaccgctcagtgataaaggaggtgggggtgcaaagacagccaggaggtttgcctagaagcagccaccctttaaagagtgcgtaatagctcactgatcgagcgccacctcttctttagggtttgtgccttccccccaatccctcacaacgcagccgccacaaaacccttctccccgcgcgcgcgccctccgctccttcctccgcccagctgcccgccgctcgttcgccaccgccaccgccgccgccgccgctgcgtcgatcgaagatgtatctccagtactacatcaacgagaagggggacaaggtgtacaccaccaagaaggaatctcctctcggtgttcccacgcagtctgctcacccagctcgcttctctccagatgacaagtactcacgccagagatacctgttgaagaagagattcgggttgctgccaacccaaaagccagcaccaaagtactgaaggagaaacctcggaccaccatgttccatggatccctcgaagcgaatcagtcttgcctaccccgctatttacctgtatcactcaaatgatctgatgtatcgcgatgctatctacgaatcgtacttcctctcgaccatattagtatgatcatgaaagtc

SEQ ID NO: 948 - DNA, 1536 bp, Oryza sativa
  ref <308>: DATABASE ACCESSION NUMBER: AK059025
  ref <309>: DATABASE ENTRY DATE: 2001-12-06
atatcacacaaggaaatcatgatggcactgccatgataatctcatgggtgacaacaattgagccaggctcaagcactgtgctctatgggacttcggaggataatcttaatttctctgcagatggaaaacacactcagtatacgttctacaactacacctcaggatacattcatcactgtacaataaaaaagttggagtttgacacaaaatactactatgctgttgggattggacaaaccgtgaggaagttttggttcagaacccctccaaaaagtggcccagatgttccatatacatttggtctcataggtgatcttggtcagagctacgactcgaatattacgctggcccattatgagtccaattcaaaggcgcaagcagtacttttcgttggggatctgtgttatgcagataactacccataccatgacaatgtgaggtgggatacatgggcaagatttgtagagaggaatgttgcctaccagccttggatctggacagctggaaatcatgagatagattttgccccagaacttggtgaaacgaagccattcaagccatacagctataggtaccccacaccttataaggcttccggtagcacggcacctttctggtattctgtcaaaagagcatctgcttatattattgtcttggcatcatattcatcatatggaaagtatactcctcagtacaagtggcttgaagctgagtttcccaaggttaacaggagtgaaacgccatggttgatagtgctattgcatgctccgtggtacaacagctataactatcactacatggaaggtgaaagcatgagagttatgtatgagccgtggttcgtcaagtacaaagttgacctcgtgtttgcaggacatgttcatgcctatgaacggacacacaggatatcaaatgtcgcgtacaacattgtgaatggccagtgcactccagtccatgatcagtctgctccagtctacataaccatcggagatggaggaaaccaggaaggactggccaccaacatgacggcgccgcagcctggctactcggccttcagggagtcgagcttcgggcacgccatcctggacatcaagaacaggacgcacgcgtactacacgtggcaccgcaaccaggacggcaacgctgtggcggctgactccatgtggttcaccaacagatactggcagccgacggatgaatctttggacgactcccagtgatctgagtcgttcgtacatggtttactcacacctgctcctcctccctagtttgtgttgtggttcttctacgtgaataagcactggctcgatttgaacacacaggacggactcacggacgcctccggttcaggcgtcgtgatctaggtggttctttctccgctccagctccctcgtggccgtgtgctgcttgtgtatagaagaagcgcagctcacgtgcagcgagaggaaaagaaagctgagaaattgcgagttgatacttgataggcttgtgtacgttcgtactcgtctagatgttgaataaacacattggtttcgtggc

SEQ ID NO: 949 - DNA, 471 bp, Oryza sativa
  ref <308>: DATABASE ACCESSION NUMBER: AK059026
  ref <309>: DATABASE ENTRY DATE: 2001-12-06
atgatgatggcgagaaggtcgatgcatctgccaagaaaagtaagaaaaagaagtctaaagctgaagctgacggcgaagcaatggacctggacaagccttccaatgtggctgatgaagctgagcctggaactgagaagaagaaaaagaagaagaagcacaagctggaggaggagccacaggagcaggagaagagcgtggcgcatgccaatggcgacgccgaggagaacggtactcccaagaagaagaagaagaagaaccgtgaagtctcggaggacgctgagcctaagacggccactgaagggaagaagaaaaagaagaagtccaagacggaggacagcgactgagtgatcggtttgcctacttgcatggctgatctttctgattagtgttgttggaagcagagttaaaaaaaacacctagattcctagttcctgaagacaagagcagtcctgaactatgaaattgccctcc

SEQ ID NO: 950 - DNA, 651 bp, Oryza sativa
  ref <308>: DATABASE ACCESSION NUMBER: AK059027
  ref <309>: DATABASE ENTRY DATE: 2001-12-06
gagagtccgagaatttactttagcggagattgagcactttgtggacccagaggacaaatcccacccaaagtttcgtgatgtttctgatctggaattttttatgtttccaagagaacaacaactgacaggaaaatcagccatgaaacttaacattggacaggctgtatctgaggggactgttaacaatgagacccttggctactttattggaagggtctatctcttcttgacgcagcttggaattgacaaagatcgtctacggttccgacagcacctgccaaatgaaatggctcattatgctgctgattgctgggatgcagagattgaatgctcttttgggtggattgagtgtgttgggattgctgataggtctgcatatgatctgcgtgctcactcggataaaagtggtgttgcacttgaagcacatgaaaagtttgcagagcctagagaagccaattttttcgattcagtacagtatatgcagctatgcatctgtctgaattttgagtcagtatgctcgtgtgtgcacggtccagattgatcgtcgatccatgaagcatctgtactgtcagtcagtgtcatgttcagtgtaccttcaaatttatttggaataaatcggcccatggaccgtctaccattgggctgttcgac

SEQ ID NO: 951 - DNA, 1618 bp, Oryza sativa
  ref <308>: DATABASE ACCESSION NUMBER: AK059028
  ref <309>: DATABASE ENTRY DATE: 2001-12-06
aaaaaaggcaatcctccaccacctcccatggcgccgccgctcgccgcgccgcgcttccacgccgccgcgctacccctccgcctccgcctccgcacccgcccccagaagctcccctgctggcgccgcgccgcccggcccaacgacgaggattactacttgatcgatgcgccggagtccatcggggacggcttctcgttcagtggggggaagtatacggatggcccgagcaagtccgatgagtggtttgctcaagggagaatggtaaaagctcatccagtatacgggaacaaagggaaggcaaaagatcccatctttgggctcacaatgggagctgaatcacaatcttcaaatgatgttttcaggtggttttgtgtggaggctgggagttcttcgaatcctcctgttctttttattcatggatttccatctcaggcatactcttatcgaaatgtgctacctgtagtatcagacaattatcatgccattgcttttgattggctcggttttgggttctcagataagcctcaacccgattatggttttgactatactcttgatgaatatacatcgtccttggagtctctgatcaatgctgttgctcctgataagctctccattgttgttcaagggtactttgctccaattgtaatcaaatatgctaatgaacatcaggacaagttgaaccacctgatattagttaacccaccgataacggataagcatgcgaagcttccgtccacccttgcatgtttcagcaatttcttgttgggtgagatattttcccaggatcctctcagagctagtgataaggccttgactagtagtggcccatacatgatgaaagaagaagatgcaatggtatacagaaggccataccttgtctctggttcttctggttttgcattgaacgcaatcagtagagctatgaaaaaggaccttaaggtttacattgaatccatgaggaatatattatcgagtgattcatggaaaacaaaaacgacagtatgttggggcttgagagatcgttggctgaactatgatggagttgaagatttttgtggcagtgcaaattacaaaattttagaactgccaatggcagggcaccatgtgcaggaggaccgtggtgaagagctaggcaagctagtcaaacgtattctaagcggatgactgcattcatgtggggacggactctagaacatgccaagaacagatcctccacataggggtcaaaatgtgccggtgcaatagggacatgcactattctttgcatgaaaacagaagctgaaccgccccattgaagaccaatctattccatggataagacactgccctaaagtgatggtgagtgtttctcagacaataatggataccagttcgtgttacatgttcactgatagggtaagaggttcaagcctggtatatatatagtgctgggccgaaatttttcgtcatggtctgattgcttaaaagcaaggtcaaggtgaccaagattccaagaagattatattagtactgatcaggaattcagttctgtcgtttggaatgcgcacttgcacaccgactacgcaacatataattaatctgctactgcgcctttcgtgtgcaaaaaaaaaaaaac

SEQ ID NO: 952 - DNA, 1481 bp, Oryza sativa
  ref <308>: DATABASE ACCESSION NUMBER: AK059029
  ref <309>: DATABASE ENTRY DATE: 2001-12-06
caactaaaacaaaggaatatggtgaagacttgctcccttctgtgttggatgcattgaatgagatagcttttcatccaaaattttcttcttctcgtgttgagaaagagagaagagcaattctttcagagctccagatgatgaacacaatcgagtatcgtgttgattgtcagttattgcaacatttgcactcagaaaacaaactgagcgaaagattccctattggacttgaagagcagatacataaatgggatcctgataagatccgcagatttcatgagcgttggtattaccctgctaatgctactttatatctggtaggagagatcgatgatattcccagagcaatgcgagaaatagaggctgtgtttgaacatacacttccagaaggtgaagcagcccctatgtcaactgcaagtccatttggtgctatggcaagcctttttgcaccaaagctacctggtggcttggctgcaagcctaactggtgaaagatcacctgctgcggataaaataaagcctgtgaaaagggaaagacaggcaattaggccacctgtagaacataagtggtctcttcctggagttgcccaggatgccaagcctccagcaatttttcaacatgaattgatccagagtttctcaatcaacatgttctgtaagatacctgttaaccaagttcagacatataaagacctgcgaagtgtcctgatgaagcggatatttttatctgctctgcattttcgaatcaatacaagatataagagctcaaatcctccttttacatccgtcgagctggatcatagtgactctggaagggaaggttgcactgtcactactcttacagtaacagctgaaccccagaattggaggagtgccatcaaagttgccgttcatgaggttaggagactcaaagagtttggtgtcacaatgggggaaatgacccgctacatggatgcactgataaaagatagcgagcaactggctatgatgattgatagtgttccctcagttgacaacttggacttcattatggagagtgatgcacttcgccatactgttatggatcaattgcaggggcatgaaagtttgcttgctgttgctgaaaccgtcacccttgaggaggtcaacactgttggtgcagaagttctggaatttatttcagattatggaaagcctgatgcaccgcttcctgctgctattgtggcctgtgtacccaaaaaggtccacatggatggagtaggtgaaactgattttgagatacatcctcgtattaatataaatgtgccgtaagcatgcatcatatatagattagctagccagctagctgccacaaaattaaatcatgaacatgtagttgtgtgtagtatgttattagcacaagaaatcatgtactaggtgtcatgtactgtttagtatatatgtgcatcttatgtatgcaaacatgaatgcatgcgtggaatattcaggatatggaagattgtcttc

SEQ ID NO: 953 - DNA, 753 bp, Oryza sativa
  ref <308>: DATABASE ACCESSION NUMBER: AK059030
  ref <309>: DATABASE ENTRY DATE: 2001-12-06
aagaggttagttcagaaaggaaagaaacctggtttcctccagttgctgggtacacagacagtcagtgctgtctggcatggtctttatcccggatatatcatattctttgttcaatcagcattgatgataaatggttcaaaagtcatatacagatggcaacaagcagtcagcaatccagtcttccacgctatcctggtttttgtaaatttttcatacaccttgatggtccttaactactcatgtattgggttccaggtactgagcttcaaggaaaccctagcatcctaccagagcgtatattatatcggcacaattgttcccattgtagttgtcttgctgggttatgttatcaagccagccaggccagtgaagccaaaggctcggaaggcagaatgagcaacaagttgacctggtcaagtggtcattacatataggagcgacgaagaacatttaatgacgataatgacgaactagtgtccagctattctactgtggaatttcgcaggagaatgtgatgactcacctcttaaagttctgaactcccttgtgattgatcaaacattaaaacgtggcactcccgttggatttttcttctatgttatgactactactacaactacataggatatcggccttgcgccttcggttgttgagttctcttctgaccgactgtcattcaaagcgatgtattttttatcaccttccctggcctggagccaaatggaggtgtgaatgggcatcatttcttggttc

SEQ ID NO: 954 - DNA, 1776 bp, Oryza sativa
  ref <308>: DATABASE ACCESSION NUMBER: AK059031
  ref <309>: DATABASE ENTRY DATE: 2001-12-06
aaaaaaaaaaaaaaatcccaaagcctgtctgccaactgccaagcgcatccttcccagcctcgctccccaccctatcgttcatcctgtccacccagagccattgccacacacacaccgaccggtgctgtcgtgcttcctctcctttcagacaaagcaaaaatttaatttccttccagtggagaacctcgaagtcaaagaacaacgtgttcaccatgcccagcgatggcagcttccgcatcgtcctcttcccgttcccggcgcagggccacttctccgccttcctctccctcgccgcccacctccacgacgcccagcccacggccgacatcaccatcgtctccaccccgcgcaacgtggaagacctccgccgccggtcgagctcccagacgcggtacctccggttccacgccctgccgttcgcgccagccgagcacggcctgcccggagacatcgagtcgaccgacgccgtgccgctcctccacttcatcacgctgttcgaggccaccgagtcgcgctcgctacaggacagcttcgacagcttcgtccgtgacttgatcaccgacgccggagcggacggtgccagggtctgcgtcatcgccgaccccttcctcgcgtggacgacagacgtcgcccgccggcgtggcgccgcgcacgccatcttcgtctcctgcggcgcgttcggcagcgtggtgttccactcgctgtggaaccacttgccgcacctgcgtgcgcccggtgacgacgcgttctgcctcccggaccacccggaggttactgtccaccggtcgcagcttccgccttacctactccacgccgacggcacggaccggtggtcggcccaccaccgccggcagacatcggccgggtacgacaccgacgcgattctcatcagcacgatggaggagttggagacgaccgggctgcgcatgctccggaaaacgatgggcgtcccggtctatcccatcggccctctagtgcgtcgccggacggagcactccgatcacatcggtgaccataacgacgatgacgtcaagcggtggctcgacacccgagaagagaggtcagtgctgtacatctcattcgggtctaataactcgctaaggcctgaccagatggttgacctcgccatggcactggagctcaccggcaggccgttcatttgggctatccgtccgccgttcgggtttgacatcgagaccaccaacggccgcgagttcagcgccgagtggttgccggaagggttcgaggagaggatgcgtgccaagaacattgggcttctcatccacgggtgggctccgcaggtgagcatcctcgcgcacgcgtccaccggcgcgttcctgagccactgcggctggaactctgtgctggagagcatggcgcacggcgtgccaatcatcgcgtggccgctcacggcggaccagttcttcaacgcccagatgctggaggagtggggcgcgtgcgtggaggtgtcccgcgggaactggccggactccccggcgctggagcgtgagagggtggtcgaggtcgtggagatggtgatggggattacggcgaaggcggacaagatacgacagagtgtgaagcagattcaggggatgattggtcgaactctggaggacggtggttcgtccaagacagcattggaggaattcttgaagctgcatggtcacattatgctcatgaaatgctgacgccgagagaaataattttctgttttagcaatttgcccaaccttgaaacgtggtgcctgaaataacctattatgtgttcttgaat

SEQ ID NO: 955 - DNA, 652 bp, Oryza sativa
  ref <308>: DATABASE ACCESSION NUMBER: AK059032
  ref <309>: DATABASE ENTRY DATE: 2001-12-06
agatagattttccccatcgaaatctcgtcgcttcccccgggttcgattcgagtcttctctctcgcagcacaaagatggacgcaaacagacgccaaagtggaatccagcaattgttggctgcagagcaaggggctcagcaaatagtaaatgctgctagggctgcaaaatcggcaaggcttaggcaagcaaaagaggaggctgagagggaaatagctgaataccgtgcccagatggaggctgaatttcagaggaaggttgcagagagtagcggtgactctggtgcaaatgtcaagcgtcttgagcaggagacagcggaaaaaatcgcacaactcaagcagcaggctgcaagtatctcccctgaagtgattcagatgcttctgaggcatgtcaccactgtgaagaactaagggttgatggcttgctgctaggcgatttgccatacatctgatggcaaacttgtactgtttattttttgagaggataacttcgtctcttctagctgtaattccgtgttccgaataacggaataaactgcttctgttcatcagcagccatgtttcgtactttgaaaacctcggttcctgtctggtaaatattatcctttcatgtatcatttgaataaaataatgggagattctttttgtttattctc

SEQ ID NO: 956 - DNA, 1276 bp, Oryza sativa
  ref <308>: DATABASE ACCESSION NUMBER: AK059033
  ref <309>: DATABASE ENTRY DATE: 2001-12-06
aggcattgcaagtgttcggtgatatgatttcagagggtgttgatcctaacgagtttgcactatcgattgttcttggagcttgtggatccattggtctggggcgtcaactgcactgctcagcaatcaagcacgatttaatcacagatatccgggtgtcgaatgctctactgtcaatgtatggtagaactggtcttgtcgaagaactggaggccatgctcaacaagattgaaaatcctgatcttgttagctggaccactgctatttctgcaaacttccaaaatggttttggtgagaaggccatagcattgctttgtcagatgcattcagaaggattcacaccaaatggctacgccttctccagtgtgctgagttcttgcgcagacgtggcatctctggatcaaggaatgcagttccattgcctggctctgaaactgggatgtgactccgaaatctgcaccggaaacgcactgatcaacatgtactccaagtgtggtcagatgggctctgcaaggcttgcatttgatgtcatgcatactcatgatgttacatcttggaactcgctgattcatggccacgcacagcacggtgatgcaaacaaggcactggaggtattcagcaagatgcgttccaatggcatcaagccagatgattcgacatttttgggagtcttaatgggttgcaatcactctggtatggtagaggaaggagagctgttcttcagactgatgatcgatcagtacagcttcacgccagcaccttctcactacgcttgcatgatcgacatgctgggccgaaacggcagattcgacgaggcactgcgcatgatcaatgacatgcccttcgagcctgatgccctgatatggaagacgctgctggcatcttgcaagctgcacaggaatctggacatagggaagcttgctgcagacaggctgatggagctttcagacagagactccgcgagctacgtgctgatgtcgaacatctacgccatgcacggagaatgggaggacgccaggaaggtgaggaggaggatggacgagaccggcgtcaagaaggacgccggctgcagctggattgagatcaacaacgaggtgcatacgtttgcttcaagagacatgtctcacccgaactctgattccatatatcagatgctaggagagcttgttgccgtgatgcaagattttgacgaacttgaaccgtttgatgtacatatatgctgatttagatgccactccagatagtatcaaagaaagtaaagtttctttcttttcggatc

SEQ ID NO: 957 - DNA, 1798 bp, Oryza sativa
  ref <308>: DATABASE ACCESSION NUMBER: AK059034
  ref <309>: DATABASE ENTRY DATE: 2001-12-06
actagtcgtcttcttccctggatccaaatcgaaaatttctctccccctgttcacaccacgcctcactcccatggcgaccgaggaggacgcgtcgaccatggcggcggccgaggcggaccccaagcccgccgccaccccgtcttacccggagatgatactggcggcgatcgaggcgctggacgacaggaacgggtcgaacaagacggcgatctcgcagcacatcgaggggaagtacgaggggctcctcccccccgcgcacccgtcgctcctcacagcgcacctcgcccgcatgaagcagaccggcgagctcgccttctccaagaacaactacttccgcggcgacgacccgtagctgcatgcacaagtgcaagtgagagtgacaaaaaagtgcagtagtgtgctgtctgctgtgcaatcgagcgagaggcaaacgatggtgaacttcgtggaggcgcagaagccgctgctgaagcggctgatgaggatggcggggctccggccggtggacgtcgagatcgagccgggcaccaccatgcacatctgggtgcccaagcaccatgtcagcaagaagaccggcacgatcaggccggtcgtcgagcacggcggcgtcgatggcgacggcgagaaggccggggcggcgaagaggaagaagagcgccgccgagtcgaggcccaacgtggtgctcgtccacggcttcgccgccgagggaatcgtcacgtggcagttcaacttcggcgtgctcgtgtcgcggtacaacctctacatccccgacctgctcttcttcggcaagtcggccacggccagcgccgaccggtcgccggagctccaggcgcggtgcgtggcggcggcgctcgcgcggctcggcgtggcgcggtgcgacgtggtcgggttcagctacggcggcatggtggcgttcaagctggcggagacgcggcccgacctggtgcggtcgctggccgtgtccgggtcggtggtggccatgacggacgcggtgaacagcgccaccatgacacgcctcggcgccacctcgtccgccgagctgctcatgccggagacgctcaagggcctcaagcagctgctttccatctccatgtacaagaagatgtggttcccggacaggttctacaaggactatctcaaggcgatgttcaacaacaggaaggagaggatggagctgcttcaaggcctcataaccagcaacatggatgccaagatccctactttccagcagaaaataatgctgatctggggcgaggaggacaagatcttcgacatagagctcgccaagaaaatgaaagagcagctgggcgacgggtgcttccttcacggcatccccaaggccggccatctgctgcacgtcgagcggccgtgcgcgtacaaccgccagctccagaggttcctctcgtacgtcaactcggaggagaaggaggcagccggtggtggcgccaactgaactttgatccgttccaaggcgttactgggctatacattggtggtttttgttgtataatactcctgcttctgctgttcttgatgtttgtttcttgaaagcaagtgccaagtggtgttgtgttggggttggcctagctgtatgtggtggtagtgagtaggactagtactacaaaagtaagtaggcctcgtgttgtctcgttcgttcagtcattcgtttggattctttgcaaactccgtgagatttatcgtatacgaacacctgtaatccgccatcacgtcataaggaaaaaaaatgtactacatcccgtaccacgttgctgtcgaataaaattcagagttccggttt

SEQ ID NO: 958 - DNA, 1058 bp, Oryza sativa
  ref <308>: DATABASE ACCESSION NUMBER: AK059035
  ref <309>: DATABASE ENTRY DATE: 2001-12-06
atgaaatgctgaaagaatatattatgaagagcaaaggagaaaataagagcgaagttggtccttctgaacgtcttgtagctggtggtttggctggtgcagtagcacaaacagcaatttatcccgtagatttagtgaaaacacgactgcagacttattcatgtgtggatggtaaagtacctagtcttggtgcattgtcaagggatatattgatgcacgagggtcctcgagcattctatagaggtctggttccatctttgcttggtattgtcccttatgccggaattgatcttgctgtatatgagacattgaaagacgtatccaagacatatatcctgaaggatagtgatcctggtcctctagtacaactgggctgtgggactgtatcaggagccttgggggcaacatgtgtttaccctttacaggttatcaggacaagactgcaagctcaacgagccaattcagaatctgcatatagaggtatgtctgatgtattctggagaacgctacagcatgagggtgtttctggattctacaaaggaatcctaccaaatcttcttaaagtggtgcctgcagcaagtattacctacctagtgtatgaagcaatgaagaaaaatctctcccttgattgaattacggagctgtttggcaaatcggccatcatttattgacatggctgactgtagagataatgacgatacatgattttactggttaagtagctacttttttgaagtgcaagacggtgccttcaggacagaatttgaagctatggtggcatctctcttaattttcatttcccagaaatgaagcgataaccatcagatcattgagacatctttgctggcgtactgtaaggcatcgtttgctccgagttagctggtcctcgtgaattcctgaaggcttattttgcccctgtcctggggtgagttttgttagtcaaactgtaaaacacaggaaaacactctttaacttaatttaccattccttgtgctcctgaaattaaagaggagcttgacctttactgacgacgaaattgccctgcagaaagggtgctggtt

SEQ ID NO: 959 - DNA, 1554 bp, Oryza sativa
  ref <308>: DATABASE ACCESSION NUMBER: AK059036
  ref <309>: DATABASE ENTRY DATE: 2001-12-06
acctacctaccgtctcctccattggactagctcctctctcccaattccactcctcgcttctcgcgcaattcttgcgggtttgtgttttttttttcttcttcttcttttggtttcttgatcgatggacagcgactacgttgccggccttctcatgagcgccgccgccgcggggctcgacctcggtgtgctcgacggcggcggtggcgctttcttggagacgctgtgcggcgggcccggcttcgcggagcgggcggcgaggttgtgcggcggcggagctgggctcttcgggctgcctgcggtggggaacgccgagcgcggcggctgctcgagggaaggctcgtcggtgtccgaccctgcgtgggcgcacgccaccggcggcggcggcgacaatgccaggaagaggaaagctccggcgagcgccgccgccgggaaggacaaggacgccgtcgtgggcggcggcagcagcccgtgcgaggttggagaggcgaaggcgccggactccaagaaatgcaaagcggaggtgaatcccaaggtggaagaagccgccagcgatggctcggtgggagacagagtgcagaagcaaggaaaggggaagaactcatccaagccggccgccgagccgcccaaggactacgtccatgtccgggcacggcgaggtcaggccactgacagccacagccttgcagagagggttagaagagagaagattagccagcggatgaaagtgcttcaggacctggtgcctggatgcaacaaggtggttggcaaggcactcatgcttgatgagatcataaactacgtgcaatcgttgcagcagcaggtcgagttcctgtccatgaagctcgcgaccgtgaatccgcagctcgactttggcaacctatctacactcttacagaaagatatgttccaatcttgtggcccttcggtgaattccgtatttcctttggaaagtgccggtacagcttttccattttgtgaccaagcagattttttccagtcatttggtctgggagccatggaaaaccaatgtagcctagatctggcaaacacagctctaccccacacagggagcacacagtatgcttttcagaagcagcaaagggatctctgggaggataatactttccagtataacgacgaacaaagccaggaggatgcggtttctgcaccgaatttcgatggtcagttgcaagcagcagatcacacagagatcgagttctagatgatcaatgataacagccaatgatttttgtacatagaaagcatgaaaccagttgcaaagtgaagctcctaagctaactgttcttcgaaatttaggcccgagggaactgattcatttttcatatgctggatgtacggctacttgattcttctcatatttgtgagacaaatatgatctacaaaatagtaggttatgtactagatatggtgcaaatattacaagcaccatctctcttccagtatgtacgagccggctggtaatagcctggtattgccatgatacagtgtactgttgattttgtcttgaaatgaaaaggtatgtgctatttcaac

SEQ ID NO: 960 - DNA, 657 bp, Oryza sativa
  ref <308>: DATABASE ACCESSION NUMBER: AK059037
  ref <309>: DATABASE ENTRY DATE: 2001-12-06
agtcgtcgtctccaaccaaccaaattcttgcacacgcgcagctcgagccatggccggagtgagcaccagcgtcgtcggcctcaagcccgccgcggcggtgccgcagtcggccgcctcgccggtgccgaagcgcgtgcacgtcgctgtgccgcccaaggaggagcagggcggtggcaggcgcgccgcgctgctgggtctcgccgccgtgttcgccgccaccgccgccgggcaggccaaggccggcgtgttcgacgagtacctcgagaagagcaaggccaacaaggagctgaacgacaagaagaggctggcgacgagcggcgccaacttcgcgagggcgtacaccgtcgagttcggcagctgccagttcccctacaacttcaccggctgccaggacctcgccaagcagaagaaagtcccattcatctcagatgatctcgagatcgagtgcgaggggaaggagaagtacaagtgcggatccaacgtcttctggaaatggtgatgatctgatgatgatcatcgatcgattggccagccatgaaaacattcctgtacctagaacctttgtgatatgacacaactgcatgcataattgaacgcttgtcgtgctcactgtgtatttgtatcatctgagtggagatttgtagcgaattttctctc

SEQ ID NO: 961 - DNA, 544 bp, Oryza sativa
  ref <308>: DATABASE ACCESSION NUMBER: AK059038
  ref <309>: DATABASE ENTRY DATE: 2001-12-06
actttgatactttaatgtttgatatgccctttctgtaagttgttcatgggtccttgcaaaagaaacaaatgctcattgctgtctagattagtttctagaaattcgatttggaccaggtatgtccaacagaatgagattcggattttcttttggcgtactatatatggctgcaagttcgggtgcgatcgtctgaataactgaatgtactgcaaattgcaaaactagctcattaacttggatcatttaccaatttgctaagtcctattcaactgtaagctgacgttgatctacacaccttattcagtataaaagcagcacaacattatcttaacaatgaagaatgagaggctttcaacccgggaaaaaaaaagaatgaggggctttcatatgtttcgagatgcatagtgcactattttctggtctaaaatggagctgattcatatgcttgtctatacttggagcaagcaattcagtccatgaatctcctttctatgtgtattgacaatcatgactccaacacagtatgcactaacctgttttagcc

SEQ ID NO: 962 - DNA, 1505 bp, Oryza sativa
  ref <308>: DATABASE ACCESSION NUMBER: AK059039
  ref <309>: DATABASE ENTRY DATE: 2001-12-06
tggaatgttacaatgccatccttacccacatgagtatgctgacccttccagacaatgtgctcattgtgcttttttcatgggtttatcaaggaaagaaggtgcaaaaatacaggagggtcaacagtttgatattcgtggaacagtagatgaatttaggcatgatatcggcatgtatgggtactggagacctgggatggagttggctgtatctcatgttcggaggaagcagattccatcttatgtgtttccagagggctacaagagacctcgtccttcgaggcatataaatcatccccagcagtctaataaaaatgatgttgaagatggcacagcgaatagatccccagatgggcagcccaagcgaaagcatgatacagctggggtttatgatagtgaacctggtagatctgttaagagggcctcaattagcccctcaattagcccagttcaccagaaaacttcatcgcctccatcaggcaatattgctgatgcttccggtgcaagtggtggaagtccggtttcacttgccaatggcaatctagaacaagcaaattgcttgaattcaccactggcatctgaaaaaagtctggactctgttacatcaggctccaagtgtgtgggagtggaagcggtttgtcctagtgatgctactaaagagcatgataactgtggttccaatatgaagaactgcaccactacaactgtagctgtatctttgaaacgtgtggcagaaaaggttgtgtcagagctcgttggaagtgaaagcttgggaggcaacaaaagtggggagctattggagagagccgaggacatgggaagtgccctggttgaaaatgtgcatttcggtggaaatggagtcgttcaaactggtcttcccgaagagttagagccaaacaatgggattgaagtggtttctaaagctcatgcaggtgtgaactcggatgcgccacagaaggcatcattgagggttagtctgacatcaactgcatgaggttggaaaacggtgtaaaaaggacaaaaagatagagagcatctgctggaggagtctatggtaagttgctcgacttacaaagtttccttttcgacacagatctgcaagcaaggggggctgttaagggaagatggcgataagatcatcatgtcaagcaatgataagggcagcaatcaggggagctttattacagggaagatcgtagaatcctgtgctgagaaccccctagatctacggcaagttttacagagctttgcttgtgctccataacgacatgtgtcgttttgtctttaaccgtggagcatctagcttctggcttcatcattgtatgggtgctgaattgaacttgtgtatggcatctctgggtcgacctgtttgcttctcagagatgcccttgcctctgctgtaggtctagattatagagatagctgctgtgctgctcatctttgtttctcaatgctcctgtgtactcggatcttcccttgtaatataagatatttgcagactggtcctt

SEQ ID NO: 963 - DNA, 1185 bp, Oryza sativa
  ref <308>: DATABASE ACCESSION NUMBER: AK059040
  ref <309>: DATABASE ENTRY DATE: 2001-12-06
cttccagaccttccccgatgcgtactccgtcaagcccaacactgacaccttcaacgccattatcaagtccttcgccgagtccggcaccacaaggtccttctactcggtgctcgatgaaatgtgccagaagggtgtgaagcccaacgccactacgtttactacggcgattgctggtttttacaaggaggagcggtttgatgatgtagggaaggtgattgagctcatgaagaagcacggttgtggtgagtcgctgccagtgttcaatgttagggtccaggggctgtgcaaacttggtcggagtggcgacgcaaaggcattgctgaatgagatggtgaagaaagggacaaagccgagctggctcacttataatcatttgattcatggattctgcaaggagggggatttggaggaagctaagcggctatacaaggagatggcaaagaaagggcttgttggggatagtagcttctattatatgcttatttattacctttgtaagggtggtgattttgatactgccgttggggtgtacaatgagatagcagccaggaattgggtgccgtgtttttcgaccatgaagatgcttgtgaatgggcttgctggaagctcaagggtcgatgaggcaaaaggtatcattgagaagatgaaggaaaaattcccagataaggctgaagggtggaaggaagtagaggatgctttgcctcaatagaatagcagatggacgaacttgcagaaatcaggaacttcaccaacatttgatcgattgacttgagcagagatttgttacatatgctagttccagctatggcgacaatattttccgtctgggatagttgaggcgtttgaaagtactgtcttaagtcacctgccgaatatgttctggacattattatctgaggaatatcgaattccattataccactggtgcgacagaatcgccagacctggagggataccatccctaacgagactggtaaggtgaggacaattacatccataagcagccagatcataggctactttgttacagctaccaggacagtgattaacatttgaaagcactagaaaagtcctcagtgaacaatttatttcgtggagaagacctcctgttgcagccaaactgtattttgccccctcatagcgtacattaacatcatagaatcagttcccaactttacttgcact

SEQ ID NO: 964 - DNA, 1313 bp, Oryza sativa
  ref <308>: DATABASE ACCESSION NUMBER: AK059041
  ref <309>: DATABASE ENTRY DATE: 2001-12-06
agccaaacttgctctactctttagcctctgccaagaagaagtagtactcctcttttctctgaagaaaccaaacttccaatcaacaacaccaaaaagtttcagacacagagagttcagcagcggcaaagcaatggcagacttctcaccaccaatgaccccaacatctcaagcttcttcctctacaaccacagccatggctcccaagctccacaacctgccaatgcagcagcagcagccattgtggaggatgcctcattggagagctcagtgtctgcagttcttgacacctctccatctgtggacaggaagaggaaggcagcagaagacagtgcacactccaaggatagctgcaaggatggcaagagcaggagagggaagaaggccagcaaagaagtggaggagaagagcaccactgaagatgagcctccaaaagggtacatccatgtgagggcaaggagaggacaggcaactgatagccacagccttgcagagagggtgaggagggagaggatcagtgagaggatgaggatgctgcaagcactggtccctggttgtgacaaggttactggaaaggctctcattttggatgagatcatcaactatgtacagtcgttgcagaaccaagttgagttcctatccatgaggattgcttcaatgagcccagtgttgtatggctttggaatggacagcgatggcctccatgaccaaaagattggaggcatgttccaagaagcccttgcaatgcctaatccagtactgaaccaatcaagcccagctccatctcaagctatcatggacacaacctcaaccacatcctactcactgcaaagccagcatggagccatctctttctctcaggacaatggcagttacctgatgcaagcagtgggggagccaaggcagcaggagatgctcaatcaattggtgttcaacaacatgtgctctttccagtaggggaagagtgacagagaaagcaagaaaaaaggaccccacattgacaataggaggaaataataatgctgcaagattggtaggagcatgcaatgcaccagataagtttgagatgttggatctagtccatccccttgtctggaggcagtctacaacattgtaagaggattttggagggaagaacagcaagcgagtagagtcttctacacatttttcagagactttgtaatattttgtagctccttatttggttaggttctgcccatgaagatttcctcaacggctgcactgccaccaccattgtactctacttcatgaaattattttgttaatataaaaagagagctattgctactgttcct

SEQ ID NO: 965 - DNA, 422 bp, Oryza sativa
  ref <308>: DATABASE ACCESSION NUMBER: AK059042
  ref <309>: DATABASE ENTRY DATE: 2001-12-06
gacgccttcgcgcccgcgctcgccaaggggttcatggacttcttcgagccggccaccctcttcatccagaggtggctgcccctcttctacgtcccttccctggtcgtcctgccgctcgccgtcagggacgtcccggctgcttccggcctcaagatcttcctcatcatttttggtggctggtttgcttcactcatggtggccggatacacagcactcaccgtgaggaagattgtccagacacagcttataccagctgagccgatgagcaagccgtctccgttcgcgacgctggaattctgggcctggggtgctgtctttgtcgcatcgtttgctgttgcgtatgttaaccccacagcgcttggcaccacggcaagaacatgtcttcctttcctcctcgcttcaactgtactgggatacatggt

SEQ ID NO: 966 - DNA, 1364 bp, Oryza sativa
  ref <308>: DATABASE ACCESSION NUMBER: AK059043
  ref <309>: DATABASE ENTRY DATE: 2001-12-06
tctttctttcattcctttcctcctgcgagtgcgagtgcgatccggggcaaggcaaatccgattccgagctcagaggcatcaggcgtcgagttcgtcgatcgatcgctgcagagaagcagagagagatcgagagagatgtgggtggagattctgtgcgggctgttggcgtacaagatcatccgccgcgtcttcttcgccgactccgacgaccccgcgcacctcgccgacctcgattccgcccactccgacctctgcttcgccctcgcctccaggttccgtctcccgccccctcccctaatcctcccccgatgccctaaatcccctatctccctccctccaggctcgagaagctctactccgcccgctgcttcgtcggcctccgcatccccgaccccgacgccggcgagcgccagcatgtcgacctcgtcctccttaccaacagggaggtcatggtagtggctatccacaacatttctggttttgttgaggtcgataaggatggcaactggacttgccccagtgataagaagaacaagcatggtgttatcccaaacccggtactgcaagtcaatagactggctgccaatcttcaatcgtacttggagaagaggggagcaaaactgcctgatggtcatataactggaaagattgtactgccaaatcccaactgcaggccttcctatgccatcactcttcaaccagaagttatcttgtacgatcaatggaaagatcttaaagcagattccaaaggtggactttcaacatggattaaaggtgcattcagtggaagcaaaggtgacatgcaagattcgttactccaaaatctacatttcattctcagcacgtcgcctatgtgggacaggttggaactcaaaggggacaggaatattcttggtgaattcattgaattcaaaggcaggcacgatgatattcaggccttgaaatgtctgaagagatcaaaagtttgccgattcatagtccagaaatcaactctgtttggaggttttggtcggtcaagagtgcaaatattgtattcaccacgagattatcgtgctgaaggaacttcatcctctgaatggaaagagatatcagtgaaacaatatacagaaattctttttcagccattgcactcgaaaaaagttaagaagttcaagctgtcaagtgttgcttctgtgacactgagtgcctagtgagttgaaattttatccacggggtacttcctgttgcagtagtatatagagtaccttcctggcttctgtatgtgctcctcagttaaagtttgtcttgttgtttctgtacaccaacctgtacttactttaagatgtcagttagcatgaaattagaaaaaaatgaatgatttgaat

SEQ ID NO: 967 - DNA, 843 bp, Oryza sativa
  ref <308>: DATABASE ACCESSION NUMBER: AK059044
  ref <309>: DATABASE ENTRY DATE: 2001-12-06
ttctgctatatgccagttgttcttgcaatctaattacatgacataggccagttgttacttgctatcttacagcacataattttgctcggtggctctgaaatgattaaacaacttatggttttcagaatcgatctataatcttatagagctaggattcttgtcttaggatcgtagtttgtttttatcatgtgcttatgttgcctaactgtgtgggctcatacttttattgggtgcttacactgtccgtttacctcattgcacatgtttgtctcccgttgtttcatacatagtatacagtatgaacctgtgaggttgcatactgtagttaggatgtgaacgtatatgatggtttttgtccccttttgatcaagcagagatggacgaacaccagagtggaaacttcaagatccaggatatcaaggactgtactgctgtgacctctgcagaagctgcacgacaatttttcactgctcagttggaagacatccgcatgaagaaaggaacccgcaaggagaaaggaacccgccagaagaatgatgcagctgctgcaaaggaagagcgagccatagaagtgggggcatcatcatcagtggaagctgtggctgcacaggtgcaagcagcggaagaaacaaaggccattcctcaaggactccttgcgcatgatgccaaggagtagtgacagttagttagtcgtagttactagtcatgtaatcctaactccagtcagttgcctgcacactgtgaacagctcgtttagtcacttgacacattcgggcagcaacagcttgctgtcagtttctggttatccacttcatgtactcgcagtctcacgggtaggccagg

SEQ ID NO: 968 - DNA, 1741 bp, Oryza sativa
  ref <308>: DATABASE ACCESSION NUMBER: AK059045
  ref <309>: DATABASE ENTRY DATE: 2001-12-06
ccacccccaagctcgcgctcaaccaaacacactacagctagcttatagctaagctgtgtgtgctagctcgatcggtagtaacaacgtcccaggcagccatgccggccatcgcggattgcgcggccgacccgccgctggcggacagctactacacgctgctccgcctcggcggggacgacgacgacgacgcgtgcacgaaggtgaccacgacgccgcagcccgtgtcggagtgcgagctcccgatgatcgacgtcggttgcctgacggcgccgaccggcgccgccgccgccgccgccgtggggcagcagcatcaagccgaggagagggcggcctgcgcggcggccatcgcggcggcggccgcggagtgggggttcttccaggtggtgaaccacggcgtcgcgcaggagctcctggaggcgatgcgccgggagcaggcgcggctgttccgcctcccgttcgaggccaagtccagcgccggcctcctcaacgactcctaccgctggggcaccccgaccgccacctcgctccgccagctctcctggtcggaggccttccacctcccgctcgccggcatctccggcaaatcctgcaactacggcgacctcacctccctcagggacgtgacgcgggaggtggcggacgcgatgtcgaggctggccagggcgctggcgcgcgtgctggcggagagcctcctgggccacgccgccggcgagcgattcccggaggggtgcgacgacgcgacgtgcttcctccggctgaaccgctacccgccgtgccccttcccaccggacgacgccttcggcctggtcccgcacaccgacagcgacttcctcaccgtgctctgccaggaccacgtcggcggcctgcagctcatgaagggctcccgctgggtcgccgtcaagcccatccccggcgccctcatcgtcaacatcggagacctttttcaggcgtggagcaacaacaggtacaagagcgtggagcacagggtgatgacgaacgcgacgacggagagatactccgtcgcctacttcctctgcccgtcgtacgactcgcccatcggcacgtgcagggagccttccccttacaaggcgttcaccttcggggagtacaggcgaagggtgcaggaagacgtcaagaagacggggaagaagactggcctcagtaatttcctcgtatgaggcgcacacaaattcagtggccggccagtttcagttccgttctgtgtatcatcagtaaatgtacaattattaatgactaagagtgcagtacattaattaattaattaattagtttattgtagcttagtttgacggtgtacaagtactggtaggagattgccggtatatatgtacgtaggaaataagataagggatccatgtacagtttatgtacggccttcgatcccttgtcctttggtttgaattatgatgtttcttaaaaaaaaaaaaaaaaaggccatggcctactggcatgctggatttggaggagacgatgaggcaagcaggctttgttaatgttcattctatactgacagatcccaggcataggacagtcactgctaccgtgcctttctgaaacatctgatctcccactgaaattttgttccatctcaattgtgattgtggatgtatactggtaaacaaaagagttgaaaaactgtacccttgttcataaaataggacgacggctgtaccaaccacaataattacattgagtcgtgagctatttgttcgagatattt

SEQ ID NO: 969 - DNA, 685 bp, Oryza sativa
  ref <308>: DATABASE ACCESSION NUMBER: AK059046
  ref <309>: DATABASE ENTRY DATE: 2001-12-06
gagggctcgaggcggcggctatctccctcctttcttctcttctctctcgtttcgaagccgacgcgtcgcggaggaggaggaggaagagggcaaagccgccgcggggatttctagggttagggtttcgaggttgagagggaaggagggagagaagagcgggtatcagccatggggatgaaatttctgaacaagaaggggtggcacacggggagccttcggaacatcgagcgcgtgtgggtggccgaggagaaggagaaggaggagcagcggaagatccaggagctgaagaagcagcaggacgaggagcgggagaaggccgccttccgcaagctccaggaggacgccggcctcaagccgaggcaagagagattggacttcctctacgagtcagggttggctgttggcaaggggagctccgagggattccaagcgctgcaaccatctgccccagcagctgctgccgccgcctcttcttctgcccaagcgagtgccggctcttccaaggcagctgctccaggtgcattatttgaggataagccccaatctgcaaatgatgcatggagaaaactccacactgatcctcttctactaataaggcagcgggagcaggatgccattgcaagaataaaaaataatccaatcaagatggctgagataaagaaatcagtggaagctgaggaaaagc

SEQ ID NO: 970 - DNA, 1417 bp, Oryza sativa
  ref <308>: DATABASE ACCESSION NUMBER: AK059047
  ref <309>: DATABASE ENTRY DATE: 2001-12-06
aaactaggccaccggatcaaactttagttgagagcaaaggaaaggcctctggttttcctgaaatgtggagggcaggatgcatggagcaatggatgccgacggtgtcaatggtcgccaccaatgttgtgatagccatcatgacagccttgatcaagcaagcactcaaccaggggatgaaccgcctggtcctcattactttccggcaaatggtggctactgtattccttggccccatagcctacttcaaggaaaggaagacaagaccaaagttcacaactgaaatctttgtctacatgttcttaagcggaatgcttgggccggtgcttcttcagtatacactgtttgtagggctggagtttacaacagcaacatttgctgcaactttcggcaatttgcttccggtggttactttcttgatttcactcgttttcaggtttgaagcacttaatgtaaagagcagatcagggagtgccaagatctcaggaacattggtttctctcagtggagcaatgatgctcaccttctacaagggctcagcactgacccatacaccatcatctagcagtagtccagcatccagcagtagccacagccaagctgaagaacatgacacggcccattgggtgctcggttccgtctcgttgctcgcgaacgtagttgggttcgcattgtggctgatgctgcagaggaaattcaccaggaagtacccagcaatctactctgctactgcattcatgtcattgttcagctgcttgcaagcaggagcacttgccttgtccatacaaaggagcagcatctcaatctgggctctcaaggggaaaatagagatagccacagttgtatattgtggtgtagtggcgtctggctttgggtacctgatgctcacatattgtgtggagaagagaggccctgttttcaccgctgccttcagccctctctcccagatcttcgtggccggcatcgatctcttcatcctccacgagccgctctatcttggcagtgtgttagggtcagtcctggtgattgtggggctctaccttgttctgtggggcaaaagggaggagaccgccgccgtcagcaaagatgccattgcttcgccggagaagccagtgcaagacgtagaacagcagcaagagaaagtgtgattgatattgattcctcttagctaggctgcatgctatctgcaaatgtgttgcaattaacttaacttgagtgtttatgcattcgtgatgatggagtatatatgtactaatcagaaatctgacaaggcaacgtacaattaatccaagctgtaatagctattggtgtactagtagagtattagtagactcacaggactgtacacatgaaggaacatatgtgctgaaatactgtaccattatgcttgagctagatgtgcaaaagaagtggttttttc

SEQ ID NO: 971 - DNA, 1174 bp, Oryza sativa
  ref <308>: DATABASE ACCESSION NUMBER: AK059048
  ref <309>: DATABASE ENTRY DATE: 2001-12-06
gagggtgctcggctgctacggcatcgagaacaagaacctgatcctgacgcggttcctgctgcactacctccgcgccgccacgcgcaggccggcgctgtgcagggagggcggcggcggactcgccggactcgccgacacggccgtgcacggcgtggcgctcgtcggcggcaccgcgttctcgtgccggggcctcttctgggtgctccggatcgtgtcggccgtggggctgagcaaggagtgcaggcacaaactggagaggctcatggggctgatgctggaccaggccacgctcgacgacctcctcgtctccggcgacgacggtggcgtgtacgacgtgaacctggtcatgcggctggtcagggtgttcgtcggctccgaggaggaggccgacttgccgtcgcagaggatgaggaaggttggaaggctggtcgacaagtacctcggtgagatctcgccggaccatggcctgagggtgtccaagttcctcgccgtcgccgagagcctgccggactcggctcgggaatgctacgacggcgtgtacagggcattggatatctaccttgagtctcacccgacgctgaccatcgaggagcggacgacgctatgccggtgcctcaactacgagaagctgacgctggaggcgtgcaaggacctggccaagaaccggaggatcccgccggggatcgccgtgcaggcgctagcctcgcagcagtccaagctccagatcagacccgccgccgccgcggcgaagggcaccggcggctgcaggcctgacccgtcgcagacgccgaggaagatcatcgtcagcggcagccgcgcccggagcgtggacctggacgccatggacgagaaggagctgctcaagctgaacctgcagaagatgcagaatcgggtggtggagctggagagagcgtgcaaggagatgcgagggcagatgtccaagatggccaagggcggcaggccgtcgtcgtcgttcggcgccgccgcctgccatcaaaccggcggtagaggcttgcctaggctgtgctaatgatggatcaagcagtaatacgtcttcttcttctttgaattcttctttttgttggtcaagatttgccaccacatcacataggggcatttaactacatagctcgccttaatttttcacctgtaaattaagttgatgatctactgc

SEQ ID NO: 972 - DNA, 430 bp, Oryza sativa
  ref <308>: DATABASE ACCESSION NUMBER: AK059049
  ref <309>: DATABASE ENTRY DATE: 2001-12-06
ctacagaactggttgatgtggacatagcaacccacatagacatatatgatgatggccctgacagaagcttacttgtagtggaaacagctgaccgaccaggtttgttggttgaccttgttaagatcattgatgacatcaacatcaccgtccaatctggagaatttgacactgagggcctactggctaaagcaaaattccatgtcagttataggggtaaaccattgatcaaagccttgcagcaggttcttgctaatagcttgcgctatttcttgaggaggccgacgacagaggagggcagttactaggcagataaatacaggaagccccccaccttcagatactttgtgatacatggatttgataccatcatcaaaattattcttgaaatatgcaaacaatttatcaaaagcttggaggtatacttgatctt

SEQ ID NO: 973 - DNA, 1728 bp, Oryza sativa
  ref <308>: DATABASE ACCESSION NUMBER: AK059050
  ref <309>: DATABASE ENTRY DATE: 2001-12-06
actatcccacatcaaatttttcggcaccgctgcatcgcgacgagatcaaatctacaggaaaccgcgcgagatcaaccggcttttcaactcttccgaaatgccggagcagccgtgcctagcgccgcgccaccgcggaatcgccggcgcggatgcgtgaatcctctcacctgcgaggctgcgactgcgacgctacacacactgacgtctcggtctcaaaaaaaagtagttgttacactcctcccggcattcgagtcccagacgaatccgacgccgagataagtgacgggggagatggagattggtcgtctcgtgcggaagcagacgcagccaggctgggcaccaaccacccgaggaggaggaagacgacgaccactcgctctcgcgctcgggcggctctcgtcccgtcgtccggtgcggtgccgctgcctcgccgccatgcagacttcgccgccgccgccgtccgtgcgcacggtctccatccccttctccgacctcaaggagagggatagggacctgagcgggaagatcgaggaagggctcgggcccaacgggctcgggatcatctccattgctgacgtgcctggttttcccgtgctaaggaaaacgttgctgcgcctggcaccaaaatttgcaaaccttcctgaagatgtgaagaaagaacttgaagacccagacagcaggtttaactttggatggagtcatgggaaagagaaacttgagtcagggaaactcgacacattcaaaggctccttttatgccaacccaattttggatgctccaaccactgatgatgtactcgtgagaaggtacccatcttattgccgaacaaatatatggccagccagtcatcttcctgagctcgaaatagcatttaaagctcttggaaagctgatgttggaagttggcttgatgttggctcatcattgtgatcgctatgtaatgcagcaaggagtgggaccatatgatggtgaaagccttgagcagacaattgccagctcaaggtgtcacaagggccgccttctgtattactacccccggcaatttagtaaacaagaggaaggtggttctgtttcatcgtggtgtggatggcatactgaccatggatctttaacaggacttacatgtgccttgtttacgaaaaattcaatggagatcccctgtcctgatagtgctgctggattgtatataaggactcgtgatgataaagttgttaaggttacatttgaggagaatgaattggcttaccaagttggagaaaccactgaaatactatcaagaggtcgtctatgtgcaactccacactgtgtgaaggcccccagcagtgaaaacgcctcgaatgttgatcgttcgaccttcgcgatgttcatgcaaccagattgggatgaaaagctcaagtttccaagtgaaattccgtatcatcaagagttgatcccaccgaatggaactcttacattcggggagtattcagaaagattggtgaacaagtattaccagggaaagacatgaaacactacaatacgcatgcaattttcaattgttgtttgtccgtttcgtactagcagtgaaatcgtcagtgcaacctggacaaacttaactgttaggttctctgcgtgtgttttgaactggagattcgagcaaccaatcatagaaaaaatgtgtctactgtaattgttttttccttacgataaaagcaacaacaccggtggcagcgtcaccttttcttggttc

SEQ ID NO: 974 - DNA, 1553 bp, Oryza sativa
  ref <308>: DATABASE ACCESSION NUMBER: AK059051
  ref <309>: DATABASE ENTRY DATE: 2001-12-06
gtcagaaggctcactccgtctccccctccggccgccgcaaggagaagcagcagcagcgatgcaggccgccgccgggcgcgcgcgccgcctcctcacgtcgccggcggcctccggtatcctctccgcgccgcgccccgggtgcgcggcgctcgccgggagcggcgcccttcttccccgtctcgatggtgtcccgtcctcgccgtcgccgtcaccggcccctccgctcctggctaggagcttctccgccacgtcctcgtctcgcctaccccgtaacttgctatcgccaagtatatcttctcaatggcggaatgagaaatcggtgtgctatcacatggctgcaactcactactcaacagaagcaagtgacattgatcaacctacagaggctgtagtggagctgtatcagaaaatgttgaaatctgttgaagccgagaccatgcctccgaatgcctggttgtggtcaatgataagtagctgttccaataaggaggacatcaaactacttattcagattttgcagaagctaagagtatttagactatcaaatcttcgcatcgacgcaaacttcaacgatcatctttgcatgaaagttgcagaggcttgtgctcgtgttggtgcccttgactatggtttgaaggttttatggaagcataatgtttatggaattacgcctaccattggttctgctcattatctactgaaacatgctaaagagaaaaatgacactaaactaatgggaagtataatgcaagtccttcagagaaattcgatgccattgcaaccaggcactgctgatatagtcttcagcatctgctataatgctgatagatgggatttactctcaaaatatgcgagaagattcgtgaagtctgaagtcaagctgcatggtgcttcatttgacatttggatggacttcgctgccaaagttggagactcccaatctatatggaacatcaatagcctgagaggcaagtcagtcaaacgctataatcttgcaacaggttttgcatgtgtaaaggggtttctgcttgagcgcaaaccagaaagcgccgctgccatgattaaattacttcacaagcattcacctgatgagaagaaacaattggtgacggatgagctccagaagcttgttgctgaatggccagcagaggtgataaaaaggcagaagaaagatgataggaaggcgctggaggaagctttgattacagatatccctcaaatgatcagttccatgtcaaagctgcgccttgatatttctgtgaatttggagaagcttacctctcaacctgaaacagcatgagaagtaacacaggtgcccagatggcctagcagctgaaattacatgagtacaggcaggcggacaatatcacagtccagccatttgtattcgactacattctatttgatgggtagcacactagcactagcctgcccgacaataacatgtatacaacacattccgttgtttaccttgccatgtgcttttccatgacagttttgtagaaaaccttggtgaaattgcacgcatgaaattcaggtatgcattctcggac

SEQ ID NO: 975 - DNA, 1443 bp, Oryza sativa
  ref <308>: DATABASE ACCESSION NUMBER: AK059052
  ref <309>: DATABASE ENTRY DATE: 2001-12-06
aaaatcttcgcctccgattttcttctcttctcttcttcttcttctttcccttctcttctccgccgccgacgaccgaataaggagagtagaggagagagagagagagacagagagatggctgcggcggcgcgtctcctcgcgcgtatctcgaggcagggcgtggcctcggccgcggcggcgaggcggcaggcggaagcggcggcgctgctcggcgcttcggcggggcggcacttggccccgccctgctcttcgatcaaggccttgcctctgctgaatcagccgaggctgtactcaacttcaacctttcaaaggtttgggttttcatcttctgctccccagcaagatgataaggcagcaaataaacagacagaggatggagttaataaaagcactcaatctgaagcttcaaatgaaaccaatagttctcctggaaccgagaatgcatctcaagcagatacagaagaccttgacctgtcaaaggaggacctgacaaagctagttctggagaaagaagaattgttgaaatctaaggatgaagaagttaaagacatgaaggataaagttttgcgcagctatgcagagatggagaacgtcattgcgagaacaaagcgtgaatcagataatgcaaagaagtatgcagtacagggcttctccaagagcttgttagatgttgcagacaatttatctagggcatcatctgttgtaaaggagagcttctcaaagatagatacatctaatgaatctgctgaagcagtgaagctactaaacaccctattagagggtgttgagatgaccgaaaagcaacttggggaggtcttcaagaagtttggagtggaaaagtttgatccacttaatgagaaatttgatccaaataagcatgctgcgcttttccaaattcctgatccttcaaaaccatcaggaactgttgcggctgttgtgaaggtgggctacatgctacatgatcgtgttctccgtcctgcggaagttggtgtcactgaaggtggtccaattgaagaggagccggaggagaaatctgacaagtcagattaagttagatatcgacttgtccttcagggatttttctaggcagccagacaagtgcttcgcacttgcatgaaaacattacggttctttggaacttcgaagggcatggcagacacagttttgcactaatgtatcaaccgatcaacaattttcccgttttagttggataagccgatccataggttacttgtttcaaggatatttgtaatacgaaatgccattttgctgtgatgagcgtcttctttttacctttctgtttgatataatttagtgcagactccgtccctttctattgatccaggcatatccagccatcactgtgtaataaaaaaaaagccatgtccatgtgtacgcctgaaatggcaatttgtagtcaaatttctctctccttacttgcat

SEQ ID NO: 976 - DNA, 532 bp, Oryza sativa
  ref <308>: DATABASE ACCESSION NUMBER: AK059053
  ref <309>: DATABASE ENTRY DATE: 2001-12-06
gaactttgaagctcatgttggtgactttggattggcaaaggtgatagacatgccatactcaaaatcaatgtctgcaattgctggttcatatggatatatagcacctgaatatgcatacaccatgaaggttactgaaaaaagtgacatatacagttacggcgtcgtactgctggagctgctaaccggacgtgcccctgtacaaccattagaactgggaggtgatctggtaacatgggtaaagaattacatcagggacaattctttgggtccagggattcttgataagaatctgaatttggaagacaaaacgtctgtcgatcatatgattgaggtcttgaaaattgcattgctatgtactagtatgtctccatatgacagaccaccgatgcggaatgttgtagttatgttaagtgagtctagagatagggccaggatgagctcttcatcctcgcctgcttctgatcattcttcaaagaaggataacttatgatgtatttatatatgttctagtcagggcaatgcccttttgctc

SEQ ID NO: 977 - DNA, 594 bp, Oryza sativa
  ref <308>: DATABASE ACCESSION NUMBER: AK059054
  ref <309>: DATABASE ENTRY DATE: 2001-12-06
ctgctgctggtaggacggttgaaacagtactgtatttagctggtttcagcaacgtcaagtcaaagattattggttcaaggaaccccctgaatgttatcaaagctctcttcatagcattaaacgccattgaaacgccaaaggatgttgagcagaagtttgggcggaccgtggttgagtcatacttattgtagtcatcaatttgtttgtcctgtggagctcgccatctggctgtggcgatggacgtccaaagaaagagctaattgcacatctaaccgtgtgatgtgtggtcttcatttgtttggatgttggtttctctacactttgccctgcaaccggcagtctgagatgtgagactgtaatttttgaggtgatcgatcaatcaatgctttagtgccaacggcgcagcacatagcagatggcaagagaagcaaacgtttgattgatgattcttgcataaggtggcctgcccctttggtatgagtcgttcgtttggatttgtaaccagaggctctgcctcacgcctactgttatggtggattggcaaaccggccacaatatgctgatttagagataataaagtccttgaacatgtgt

SEQ ID NO: 978 - DNA, 1418 bp, Oryza sativa
  ref <308>: DATABASE ACCESSION NUMBER: AK059055
  ref <309>: DATABASE ENTRY DATE: 2001-12-06
agaagcgccccgaggactccaagacctgcccctacttccaccagctcgacgccctctaccgcaacaaggcggctctcaactcctcctcctcctccgccgccgccgccgcaccggccctcccgccgccggagcacgcggagccggcggtgacagtcgccgcgccgatctcgcagacaccgccgccgccgccgccacagcccgtgacgacgaccaagaacggcaacggcaccagcagtacaaacggcgcgaacggcgaaggaggaggaggcggctccgggggcatgcaaatgcaggcgagcaacggcagcgtcgtcgccggcaacaagttcttcaccggcgcggcggcgaagaagccagaggacattatgaaggagatgatggagcagaggccgcagcagccggcggcggcgaacaacgccttcaaccgaacggacggcggcggtggcggcggcggcgtggacagcgacaacatggacgaggacgacgaggatgactacgacgacgatgacgacgacgacgacgacgacgtcgacggcaacaagatgcagtacgagatccagttccagcatcagcaccaccaccagcagccgccgcagcaccgccaccagcagagcgtcgtcagaccgaacgccgccgcctccgcggccgccggcggcaacccgcccggcaccgccgcccccgccacggcggcggccgcaacgacgaccaccggatctttcttggcaatggtccagtgatccatccatccatccggtgactctctctccttcctacacatgcatacctccatgcgcgtcaatggcttcttcttcttcttcctcctccatctcttgtaccatttgtatctacctacctgtcgcctcctccatggctcgtccatatctcaacaccatcaaaaagctcaaaaacctaaaacctcaagaattctcttcctcctccggcatatttctccattgattcctcatgcaagctagcagctatacatctccatgccaagaaagaaaaattcgcccatttcaagctgcatgcatgcccatcgatcgttcgtcgctggatgttcctagcaagaaaaagctagtagcatcgatccatttcttgattcgttcttgtgttaattacagtggtctctcccatctcgcgtctcctcttagctagtgttaaaagcaaaaaaaaaggaattggtggcgtggtaatttattgatttgttgtggtaaatttaataaggaccctccattcgtgagggttcacggagagggtttaaaacttggtgcggtgaaaaacggcacagaggagcggtaataacacctcgctctcgcggttaaaaaaaaaggaagacaagggtatatatgcaaaatgttgcggtggttgtggttgttacaaattattacacctcggtaaaaatttgtttggctatgtgt

SEQ ID NO: 979 - DNA, 1616 bp, Oryza sativa
  ref <308>: DATABASE ACCESSION NUMBER: AK059056
  ref <309>: DATABASE ENTRY DATE: 2001-12-06
atcacctgcatcgttccaagcgcagctcaatctttgcctcgtcaggttttgctcattggcgtctccatggataggctcctcgcctgcctccttggcttcctgttgatcgcttcagtaggaagccatgccgctcggactccggagcaatactggaaatcagctcttcccaactctcccatcccgagctcgctctctcagcttctcagcactgcaggcggaggcacgtcggtgaacgtcggcgggggcggcgtccatgtcgacgcggggcacggcaagcccggcggcacaaccgttgatgtaggcaagggtggcgtcggcgtgaacgtgaagcctggttacggcaagcccggcggcaccacggtcggcgtcgggaagggcggcgtgggagtcaacgtcaagcctggctatggcaagcccggaggcaccagcgtcggcgtcgggaaaggaggcgtgggcgtgaacgtgcagcctgggtacggcaagcccggcggcaccaccgtcggcgtcggtaagggcggcgtcggcgtgaacgtgcagccaggctacggcaagcccgggggcaccaccgtcggcgtcgggaagggcggcgtcggcgtcaacgtgaagccccggggcaagcctgtccacgtcagcgtcgcacctttcatctacaactacgccgcaacggagacgcagctgcacgacgaccccaacgtggcgctcttcttcttggagaaggacctccaccccgggaagacgatggccgtacatttcacggccaccaccgccggagagaagttcctccccaggagcgaggccgacgccatgccgttctcctccgagaaggtcccggagatcctcagccgcttctccgtgaagccgggctccgtcgaggcggcggagatggcgcagacgctgcgcgactgcgaggcgccgccggcgcagggcgagaggaaggcgtgcgccacgtcgctcgagtccatggtcgacttcgccacgtcgagcctcgggaccagccacgtgagggccgcgtcgaccgtggtcgggaaggaagggtcgccggagcaggagtacaccgtgacggcggtgaagcgcgcggcggccggcggcgaccaggaccagctcgtcgcctgccacgcggagccgtacgcgtacgccgtgttcgcgtgccacctgacgcgggcgacgcgggcgtacgcggtgtcgatggccggcagggacggcacgggcgtggaggccgtcgcggtgtgccacgccgacacggccgggtggaacccgaagcacgtcgcgttccaggtgctcaaggtgaagccaggcacggtgccggtctgccacttcctgccgcaggaccacgtcgtctggacacgcagcggctagctgatgatcggctgccaatcttggcgcctgatcgagttggttgcttatgctctagaatctagctaggctccatgcagatgctatactgtatggtgtcttactatcttacatatttgtatgcacgcaatttggttctttgttatttggatggtgttgccagcatcgccagcctgctagtagatgatacgggtgggcttgctgtttgatgtatagttttagtatgcgggtgcaataaacagacaagtatttacttatctaac

SEQ ID NO: 980 - DNA, 1232 bp, Oryza sativa
  ref <308>: DATABASE ACCESSION NUMBER: AK059057
  ref <309>: DATABASE ENTRY DATE: 2001-12-06
accgccctcacttccaccgccgccgccgccgccgccgtgtaccccctcccccgccgcttgacgcgcctcctcttcgtcgacccaatccctccgtcggcacttggccactagtccctgctctgccactgggttcagcatatggatttgccaggtccaagatggaagaagggcaaagatggcaaggactttgcgtccctagcagcagctaaccccatgtcagccattgtttctgagctcaaggcctcattcataagctcaaagcccgtggcaattttgtctggtccgggtggtagcgccgttcttggagttgggccagagcaagccgtgatcctaaaccgtgctgcctttggccatgccatcgaaaatgcaacagcacagaagcattggttccaactcagccccgaggaggtcttttacctatgccatgctctgaattgcatcagggttgactcactggacaataagcaaatgagtgaaattgaactgtgggattactttaggtctggatcggagtcatttccggagatgtacaaggcttacgcacatctgagattgaagaactgggtggtgagatcagggctgcagtatggtgcggattttgtagcttaccgtcaccatccagcgctcgtccactcggaatttgcagtggttgtagttccagaaggtgcagagtttggcaataggtgtggccgtctggaggtgtggtctgatctactatgtgcactccgggcttctggcagtgtagcaaagacattactggttctgacaattagcagcagcagtaaatgtgaactgagctccccagattgtttggaacagcttgttgttcacgagagaacgatcacaagatggatactgcagcaatgccgtgaacaacgatgtgaaccaagcagagatgaagtgaatagggaagaactgattattgaaaaggaaagtgtagtatttaatcactggggtgtgatactaggcttcactgttctatctggcttgcttgtgtacaggttgaaattcagacaatagagttaacatttctgtgcacctgtgttgttgaggtgttagcttggaatttgaaatcctgagttgtactcttttgtgagccttgcttctggtttctagtctagatatgacaaataattatagccacgcatctgacttggacagcagagaaacgtttgaattttgatctgtcttagatcttgaatacagccctggattggcattttcagtactgt

SEQ ID NO: 981 - DNA, 1513 bp, Oryza sativa
  ref <308>: DATABASE ACCESSION NUMBER: AK104037
  ref <309>: DATABASE ENTRY DATE: 2002-08-28
aagcagcagtagcaaagcagaagcagaggcagaggcagcacagcttgatcgttcttccatcgatcgatcggcagctagcgctcacagtactctcgatcgctcgctcgcgctggtccgttgattcgttgtcctagatagatagctaaaggggggccatggcatcgacgacagcgccgtcgaggaccaactctcgggtgaactactcgaacgagatccatgacctctccaccgtgcagagcgtctccgccgtccccagcgtctactaccccgagaaatccttcgccgacatcttccctcctaacctcctcaagaaggtgatatcggaggtggtggcgacgttcctgcttgtgttcgtgacgtgcggggcggcgtccatctacggcgaggacatgaagcgcatctcgcagctggggcagtcggtggtcggtggcctcatcgtcaccgtcatgatctacgccaccggccacatctccggcgcccacatgaacccggccgtcaccctctccttcgccttcttccggcatttcccctggattcaggtgccgttctactgggcggcgcagttcacgggggcgatgtgcgcggcgttcgtgctgcgggcggtgctgtacccgatcgaggtgttggggacgacgacgccgacggggccgcactggcacgccctcgtcatcgagatcgtcgtcaccttcaacatgatgttcgtcacctgcgccgttgccaccgactccagagcggtgggtgagttggcggggttagcagtcggttccgcggtttgcattacgtcgatcttcgcagggccggtgtcaggaggatcgatgaacccggcgaggacgctggcgccggcggtggccagcaacgtctacaccggcctctggatctacttcctcggccccgtcgtcggcaccctctccggcgcatgggtctacacctacatccgcttcgaggaggcccccgccgccgccggcggcgccgccccccagaagctctcctccttcaagctccgccgcttgcagagccagtccatggccgccgacgagttcgacaacgtctaatcgccctgacgccatggacccacaccgtactgctatactgtatacgtatatacatatgtatgtatgtactgcacgcgtacgtacgtacgcacgtgcacgagcgcgggaagccattgtttgtacgatcgacgactctaccaagtcgaaatgtaatgtgtacggtgtctgtgtacgtgtggtggtgctgtgtgtacgtgggcccgctctgcttgaagaagaagagagagcttgagctagctatacgtgtatacatgtaccgtgtactatacgtacgtgcgtatttgtcttttttttttcctctcttccctgcgcctacgtgcgtatgtacgtacgctttctctcgctggtataatcagctggcgatcgatagcggcaaaaatatgttatgtgttcgtgtcagtctctttggctttgtattaaaaatcaatctgagttaatgaaggagctgagctttgcttgtc

SEQ ID NO: 982 - DNA, 1249 bp, Oryza sativa
  ref <308>: DATABASE ACCESSION NUMBER: AK104038
  ref <309>: DATABASE ENTRY DATE: 2002-08-28
ctcgcagcctcgcgtctcgactcccttttcaaccctcctcccctccagtctccttccctctcttctcgtctcctctcccaccaccaccgcgccacctaccctcgccgcagcggcagccgcggttttaatgaaaagtagcacttgttaaagctactagttttgttagaaaatctaacatggggtcaggaaacctgatgatgaagaaggtggtgaggcccagctcttttgatttcgacatacagcttgataaaagttggacagaggatgttacttgcccaatctgtcttgattaccctcacaatgctgtcctgctaagatgtacatcttatgagaaaggttgcaggccatttgtctgtgatacagatcaaacccgctcaaactgtcttgagaggtttaaaggtgcatatgagctccctgccaatatgaaagtttcaaccattgcggtggctcctcttgatagtatccatattgtggctcctaatgtgaacaaccgcccaagctgcccattgtgtagaggagatgtcattggatggattgttatcggtgaggctcgtctacatcttaaccagaagaaaagatgctgtgaagaggattgttgttcattcgttggcgacttcaatgaacttcagaagcacacacaacaaaagcatccagactcacgcccttcggaaattgatcctgctaggcaagttgattgggagaacttccagcaatcttctgatattgttgatgtgctgagcacgattcatgcacaagttcctaatggaattgttctgggagattatgtcattgagtatggggatgatgaaactggagaagaatatgaagttttcaggcgggtcagaaggcactggtggtcttttatgtttttcaggggattctctagatcttcaagaagacgaagaagagcaagggcaagggaaagaagaggcagtggaaggaggaacagcaatcaggcacatctcgaaagctttaacctcgaggttcccacacaatctgttgacttgagagaaatcagatttgatgaaattgatggtgaatacatagtcacaggggccatacctagtattgcaacacctggaagaatggctagtttccattacaggtctgtagaaacagtctactgttaatcttccttagttattggagctatatctatcatttttgtaagaacaaagaacacatgctagtccaatgaaaaaatattcaggttgtagagaatatggaatacaaacataccgcacttttg

SEQ ID NO: 983 - DNA, 468 bp, Oryza sativa
  ref <308>: DATABASE ACCESSION NUMBER: AK059058
  ref <309>: DATABASE ENTRY DATE: 2001-12-06
gaagcaaccaaacccttcgcgagatcagaagcgaaaccctagcggcgaatccccacacgacgcgccggagcggggagaggggccatggcggcggcggcggcggcggtggagaaggtcaaggcgctctgggactcgcaggtcaacgacgaggaggcttgggcgttcaactacaagctgatgaaggctggtggtctgtttgttgcatccatcttcgtgatgcgcaactttggtgacctgatggccatctaaagaggagctgatgcgacagtaacgtggatccaccagagctgtgtgtcttgttagctgttagttttcacttttatgtcagcaacgcaaccagacttgttcttaggatcatgaattacaaactgctcactcgagaattgagatagttttcatgatataatggaagccagagtgctactggttttgtgaatcagcaggcgaatctgcgaaaactcaattggg

SEQ ID NO: 984 - DNA, 1631 bp, Oryza sativa
  ref <308>: DATABASE ACCESSION NUMBER: AK059059
  ref <309>: DATABASE ENTRY DATE: 2001-12-06
caagcaggacgacgcccctgacccagtgatcaacacttgcaatggattttactgcgactacttcagcccaaacaagaattacaagccgtccatgtggactgaggcctggaccggctggtttacatcgttcggaggtggggtgccgcatcggccagtggaggatctggcttttgccgtggcgaggttcatacagaagggtggctctttcgtgaactattacatgtaccatggaggaaccaattttggccggacagctggtggtcccttcattgcaaccagctatgattatgatgctccgattgacgaatttggtctgcttaggcaaccgaaatggggtcacttgagagaccttcacagggccatcaagcaggctgagcctgtgctggtttctgccgatccgacaatagagtctattggcagctatgagaaggcatatgtcttcaaggcaaagaatggagcatgcgcggcgttcctgtcgaactaccacatgaacactgcagtcaaagtcaggttcaatgggcagcagtacaaccttcctgcttggtccatcagcattctgccggactgcaaaactgccgtcttcaacactgcaacggtgaaggagccaacattgatgccaaagatgaacccagtggttcgattcgcttggcagtcatatagcgaggacacaaactcgctgagcgacagcgcgttcacgaaggatggccttgttgagcagctgagcatgacatgggacaagtcagactacctgtggtacaccacatacgtcaacattggtacaaatgacttgaggtctggtcagtctcctcagctcactgtctactccgctgggcactcgatgcaggtgttcgtgaacgggaaatcatatggatctgtttatggtggttacgacaacccgaagctgacatacaatggacgtgtcaagatgtggcagggcagcaacaagatctccatcctaagttcagcagttggcctccctaatgttggcaaccattttgagaactggaatgtcggagtgctcggaccggtgaccctctccagcctaaatgggggcacaaaagacctcagccatcagaaatggacctatcaggtcggcctgaaaggcgaaacgctgggtctccacaccgtcaccggaagctccgcagtcgaatggggtggccctggcggctaccagccactgacttggcacaaggctttcttcaacgcgccggccgggaacgacccagtggcgctcgacatgggcagcatggggaagggccagctctgggtgaacggccaccacgtcggccggtactggtcgtacaaggcctccggtggctgcggcggctgcagctacgccgggacgtaccacgaggacaagtgccggtccaactgcggcgacctgtcccaaagatggtaccatgtgccgagatcatggctgaagccgggcggcaacctgctggtggtgctggaggagtacggcggcgacctcgccggcgtcagcctggcgacgagaaccacatgaacgaattgcagcgagagatcatcaccaccatttgatacagtcgtcgacggccgcgtgaacagcttcctcctgtagcacgcagaattcgtcgatggtatttacacacacagacgaacaccttacaagt

SEQ ID NO: 985 - DNA, 678 bp, Oryza sativa
  ref <308>: DATABASE ACCESSION NUMBER: AK059060
  ref <309>: DATABASE ENTRY DATE: 2001-12-06
aaaaacagagttattgaagtgaaagatcagactattcaggactatcaaggagattacaattattaccttgaaaggaatcttgaggccagagagagggaacttgcacgtgaggaagagctcgaggagaaagcccccaaagtaaaggccaagtcaaaaatgtcaaaggcagagaaaattgccagaaagaagcagaagatgcaggcattccagcaaagcaagcaaaaatcgaaaccgctgaaaaacgcgaagaggtggaagtgagaatcctgattcatggtatcatccacggtgccatacacctcatttgcgacaccagtgacaaggcaggcgcatggcctgctgtaatgctattatactccatatatcactagcaactggtgtacatacatcagaaaggaagtaatcctagcagtagcatcataggaggaccaaatgctgtaactaaagcaggaaatgatacatgaccttgtacataatgcaggcagtttctgatggaggcatgctttattttgtatcaagtagcaataccaattcatgttcttccagctttcacccatacggaggaaccacacattgtaaaaagttactgcagctgggcaattatatcatggtgtaaaacctatactgattggttatactgaagataaaggaagcagatcaaaatgctctgtttttgtc

SEQ ID NO: 986 - DNA, 1052 bp, Oryza sativa
  ref <308>: DATABASE ACCESSION NUMBER: AK059061
  ref <309>: DATABASE ENTRY DATE: 2001-12-06
cttgtggtggtggtcttcgatggcagattcctcgaacaaacaacggttacgattacaagaacagtatcgccaacggttgtttcttcaacctaggtgcccgacttgctcgatacacgggcaacaagacctatgccgactgggctgagaagacatgggactggatggagggcgttggtttcctcgaccccacctcttataagatttacgatggtggtcacgttggaaagaactgtaccgatatcaacaaggcccaattctcttacaactctggtgttttcctccagggcgctgcttttatgtacaaccacaccgatggcgagcaaaagtgggagcaacgtctcgataagctggttgatgctaccatctcaaacttcttccccaaggatatcgctgttgaaatcgcctgcgagaaccacgacacttgcaccactgatatgtactccttcaagggctacgtccaccgctggatgtcacaggcgacccatcttgcgcctttcatccgacccaagattctccctgtcctcgaaaagtccgcccaagctgccattgcccaatgcactggcggagacactggacgtgtgtgtggtttcaagtgggccagcggcaagtatgatggcaagaccggggctggtcagcagatgaacgtcctcgcagccgtgtcgtctcttctcatggagaacacccctcctcctgtcacagcgaagaagggaggtacctccaagggtaaccccaatgctggtaacgtcggagatggcaagattgacaagacttacggacctcttactactgctgacaaggctggtgctggtatcctgaccttcctggttctgtcttttgcctgcggcatgtttggctggatgagtctgggcaaataaaatgggatcttgcttgataatataatgatgccgaacgaagcagtccggtagcacatttgtgcttgtttgcagcaatttgaaggaatggtatttccgggcgttggatggagtatacttgacacaagcagtcaggaggctgtgctatctatttctctctaattttacaatgttcacagt

SEQ ID NO: 987 - DNA, 1638 bp, Oryza sativa
  ref <308>: DATABASE ACCESSION NUMBER: AK059062
  ref <309>: DATABASE ENTRY DATE: 2001-12-06
acaacaacacaaactacctaccgctgcgacacacgcagccgagctaagcgctaccaccctcccatccatggcggcctccacctccgccacctccttctccactcccaccaagcccgcctcctcctcctcctcctcctcaagtcccaactccgtctgcttcgccagggcgtcggggaggtgcaggatggcgtcggtggtggtgagggcggaggcggtggacgcgaccatcagcccgacggtgagcgcgctgcggccgtccaagaccatggccatcaccgaccaggccacggcgctgcggcaggctggcgtcccggtcatcggcctcgccgccggggagcccgacttcgacacgccgcacgtgattgctgaggctgggatgaatgcaattaaggatggttatacaaggtacactcctaatgctgggactttggagctgagaaaggctatctgcaataaactccaagaggaaaatgggatatcctacagtccagatcaggtgctggtgagcaatggagctaagcaatgcattacgcaagccgtacttgccgtttgctcacctggtgatgaggttttgataccagcaccatactgggtcagttatcctgagatggctacattggctggtgcaactccagtgatccttcctacaagcatatcagagaatttcttgctaaggccagagctgcttgcttcaaagatcaacgagaaatcgaggcttttgattctctgctctccttctaatccaactggatcagtatatccaaaggagctgcttgaagaaatagctgacatagtcaagaagtatcctaggcttcttgttttgtctgatgagatttatgagcatatcatctatcagccagcaaaacacacaagctttgcttcattgcctggaatgtgggatagaacattaactgtaaatggtttttctaaggcttttgcaatgacgggctggcgacttggataccttgcagccccaaaacattttgttgcagcctgtggaaagatccaaagccagtttacttcaggtgctagtagcatatcacagaaggcagggctcgctgctttgaaccttggctacgctggtggtgaagcagtctcaactatggtcaaagcattccaggaacgtcgtgattaccttgtaaaaagtttcaaggaactgccaggtgtgaagatatcagagcctcagggtgccttttatttgttcatcgacttcagctcctactatggatctgaagtagagggttttggcactatcaaggactctgagtccctctgcatgttcctcttggagaaagcacaggttgcacttgtcccgggcgatgcatttggggacgacaaatgcatccgcatgtcatatgctgcagcactatctacgcttcaaactgctatggagaaaatcaaagaagctgttgcgctgatcaaaccccgtgttgctgctaagtgaaaatgtgaggttatacaatggcagtggggagtgaccaaaggcgccttcaactgccacttcggtaccatttgaaatacaaacgatgtgtcattgtctgacaagtaagaatttttgttgtttgattgtgtctgctgtgataaagaacttgaatgtaactccgggaaaatggataatacttcttgatttctttttct

SEQ ID NO: 988 - DNA, 833 bp, Oryza sativa
  ref <308>: DATABASE ACCESSION NUMBER: AK059063
  ref <309>: DATABASE ENTRY DATE: 2001-12-06
aaaaatgagggacttgttcttctggctgatgaggtgtaccaagagaacatctatgttgacaacaagaaatttaactctttcaagaagatagcgagatccatgggatacagcgtcagtgaacttatgttccaatatcactggccagatccttgccagcctcgtcatgaatccaccaaaggctggagatgcatcatatgcttcatacaaggcagagaaagatggaatcccccaatcattagctcgccgtgcaaaggcattggagaatgctttcaacagtcttgagggaattacatgcaacaaaactgaaggagcaatgtacctcttccctcagcttagtctgccacaaaaggcaattgacgctgctaaagctgctaacaaagcacctgatgctttctatgcccttcgtctcctcgaggcaaccggaattgttgttgtccctggatctggatttggccaagttcctggcacatggcacatcagatgcacaatcctgccacaggaggagaagatccccgcgatcatctcccgcttcaaggcattccatgagggcttcatggcagcgtaccgcgactgaattgccattcaccattgaacagatggggagttctatacaagcctgatggattttccccaggccttctttttttttgtccccatgatagcatcatcgtgtagaccaaaacaaaataaatcaaagccagacatgcttttttttagtgtgctaatcacagagggtgctgaaaaactgatgccttcgatggcaaattgaggagaaatttacctgccatttcgttgttgtgcctgttactgtataaatgttaagattttggtgc

SEQ ID NO: 989 - DNA, 1422 bp, Oryza sativa
  ref <308>: DATABASE ACCESSION NUMBER: AK104039
  ref <309>: DATABASE ENTRY DATE: 2002-08-28
aaccaaaagcgttcatcaagaagtcaagcagagcaaagttcagaagcaagcaagagagaggcagaagcgttgagaaaggccgaggcgagatggtcaaccaagccgcgatgccgctgctgacaccgtacaagcaggctggcggcaagatcgatctctcccaccgggtggtgctctcgccgatgacgcggtgccgatcctacggcaacgtgccgcagccgcacgcggcgctgtactacacgcagcgcgccaccagcggcggcctcctcatcacggaggccaccggcgtctccgacaccgcgcagggctacccggagacacccggcgtctggacgcgggagcacgtcgaggcgtggaagcccatcgtcgacgccgtccaccgcaagggcgccctcttcatctgccagctctggcacgtcgggagagtctccaccaacgactaccagccaaatgggcaggcaccgatctcaagctccgacatacagatcacaccggacggttcagggatcgtgtactccaagcctcgccggctgcgggtcgacgagatccctcagatcgtcgacgacttcaggctcgccgcgcggaacgccatcgaggccgggttcgacggcgtggagatccacggcgccaacggctacctcctcgagcagttcatgaaggacagctccaacgaccgcaccgacgagtacggcggcagcctcgagaaccggtgccgcttcgccgtcgaggtgatcgacgccgtcgtcggcgagatcggcgcccaccgcgtcggcatcaggctgtcgccgttcctggacttcatggactgcgtcgactccgacccggaggctctcggctcgtacatggtggagcagctcaacaagcacgagggtttcctctactgccacatggtggagcctcgcatggccatcgtcgacggccgccggcagattcagcacggcctgctgccattcaggaaagctttcaagggcacgttcatcgccgccggtgggtatgaccgggaggaaggcaacaaggtgatcgaaaatggctacactgatcttgtctcctttggaaggcttttcttggcgaaccctgacttgcctaagaggttcgagcttgatgcgccattgaacaagtatgatcgcaacaccttctacactcaagacccaattgttggatacacggactaccctttcctcgatgaggatcagaacaactcggttgctgatgcttagattttgtgctattttagttgttggttctatatatccacaataataatgtgcacgattcatgtaaacagtgttagtatatgcctgcgtgcaagatgtcattttcttctctcttttttgatggtttatgtctgcaactaattcattttgatatttgattagttatgcatccaaatatattgggattaataaacgcagatgtattcacacc

SEQ ID NO: 990 - DNA, 1631 bp, Oryza sativa
  ref <308>: DATABASE ACCESSION NUMBER: AK104040
  ref <309>: DATABASE ENTRY DATE: 2002-08-28
acatggagcggtgctatgacttgctagagcccaaggcaagagagatcatggtgctggatgacaaagatggcaacttacagctaaagggcttggcctgggtgcctgtgcgatctctggaggaattccacgagatatactctataggagtgcagaggagaaaagttgcccacacaggcctgaacgatgtttcaagtaggagccatgctgtgctatcgatcaggattactactgatgttgttaaagggaagcttaacctcatcgacttggctggtaatgaggacaaccggagaacttgcaatgaggggatccggctacaagagagcgccaagatcaaccagtcgctgtttgcgttgtctaatgtcatatcggctctcaacaagaaagagccacggataccatacagagagagtaaattgacccgcatactgcaagattctcttggaggcaatagccatgctgtcatgatagcatgccttaatcccgtggaataccaggaggcagtccacacagtaagcttggctgctcgttcgcgccatgttacgaaccacatgagttcagcaagcaagcaagagactcctaaagataaggttgacatggaagccaaattgcgagcttggttggaatccaaggggaaaacgaagagcatacaaagaatggatggacttctctccccaaatgcaatcaagactcctctatccatgagccataagaagcaatcagcatctggcagggtttctggtagaggtaaagcaatggatcaagatggtggtaaaatcaagaaggtgctttttgactcagcagcccgtattccggctgaaaacttccacagagagggcacacaagatatagtaaatacaacaaagaaagtggtgctcccttcattaactccatgcaaagaggacaaaactggatcatctcttaggaaggcactttcccccatttcttcaaacatggatcctcaaaagcaacggacagctgatgatagcaattgcttgatgttgttggagctgagaactccaatgggatcatgcaacatagtagggaaggtcacaggtgctacaccccttgataaatttattgcacttggctctaacctgaaggaatctcttattcagcaataccttgatttcttaaatgttgcaaacaaggaagaactacagaagttgaaaggcattggtgaaaggagggcagagtacattcttgagcttcgagaagattcgcccagaccatttaaatctctttcagatttgggaaatattggtctatcatcaaaacagatacaagatattttgtgcaagacagcgactggaatcttcaaatgatcaccggaatggaaatgccaccgaactctaccactttgaagatgctggctcatattaacggtcagattgttgtgggctattgacttgtgattatcagccaggtctgccgctgaatcaagttagctccctcctgtattgccgaatttaagcaatctgtagtttgtgtaccatccatgattccttgggtgtaattgtagctgtagtcatctgatgtactactagagtatggagcaatggttgctcctctctgttgtagattttctccgagaaaccgccgtttaatttgagctgacttgcacgagcagcagg

SEQ ID NO: 991 - DNA, 337 bp, Oryza sativa
  ref <308>: DATABASE ACCESSION NUMBER: AK059064
  ref <309>: DATABASE ENTRY DATE: 2001-12-06
aattctcacacaacaacaacaacaacaaacataaagagcaggggaaaagagaggtaatgtagtagtagtggtatgatgataaagtatgatgcaaacatagtaggaagcagtatgcaggagagagatactgacaggtcagagacaggaggagaagactctgctaacaaaacgatgcagcgcaagcatattgttttattttactgcccttttacccttttgtagctttgttttcttgtgcttttgtcatcgctgagctttgtttgccgctcagcttcttttgagcttttctttctactgacatgattctgcaagtgccatgatagcttagcccatgtac

SEQ ID NO: 992 - DNA, 1565 bp, Oryza sativa
  ref <308>: DATABASE ACCESSION NUMBER: AK059065
  ref <309>: DATABASE ENTRY DATE: 2001-12-06
tcaagaacagtgtgggtctgactgaagggaaactgctttttgggggcacaggcaacttatccggaaagattgtttggggagcacttgatgatgttgtgatgggaggtgttagtgaaagcacattccaaatccaaccaacaggaagtgaaactgatggaccaaccggattgttcaaaggtactgtctctacttcaaataacggtggcttcactagtataaggacaaagaattttacagtgcctgaggatctgtcagcatatgacggtattgaactacgtgttaagggtgacgggaggcggtataaacttattgtgcgcactagctttgaatgggatactgtcggctacattgcaagctttgacacgactaagggggaatggcaaagtgttaaattacctttctcttcactgaatcctgtattccgtgcccgcactatgcctgatgctgcaccctttgatgcaagcaatgttacttccttacagctcatgtttagcaagtttgagtatgacggaaagctgaacccaacatttacagaaggttcatttgagctccccttttcaagtattagagcatacataaacgagccaatcactccaaggtttgtccatgttagttctgcaggagttacaagacctgagagaccaggcctggatttaagtaaacaacctcctgctgttcgcatgaacaaagagctgggctccattctaacttacaagttgaagggtgaggatttaatccgggaaagtggcattccatatactattgtgcggccatgtgctctaacagaggaaccagctggagctgacctcatatttgaccagggagataatatcacaggaaagatatcaagggaagaaattgctttcatttgtgttgcagctctggcaagtccaaatgcagtagagaaaacctttgaggtcaagagcactgttccattcagtgaacctttcgtggttgatccttcaaatcctcctccagagaaagactatgatgtgtatttcaaagagctcaaagctggcataacaggtaaagaggcactagaaggaacacctgctcaggtctgaagaacatgttaaatgcagaacgcccaactgctttgacaaatcttgacatggtgcttcttgaacatgaacagaattacataaatatgcaagtctgattcataaaccaccaatagttgcagtacctgagcatatgtgccacacttaatctttgcagtcatgtggtttccaaaataccaaatgggaagtactttgtgaagtatgtgaaggaacagttgtttcttttttttatgtaaagtagtatatcctctggagtttgtgttatatttaatctgctgtatctgtatgagaagatatgcatacatcttcagaagacatatggatgtcgatcaagagctcaaaggttatggagcattggagctctttctgtagcagattctgtatattatgttgcttttattttcactgaattgtgtgctgtagatagcgtcattggaatctagatcgaccattttgtaaaatcaaatacattgtcatacagagagaagagaagtttacagttcc

SEQ ID NO: 993 - DNA, 1535 bp, Oryza sativa
  ref <308>: DATABASE ACCESSION NUMBER: AK059066
  ref <309>: DATABASE ENTRY DATE: 2001-12-06
gaaaacgagcacaaggcagatcaagtgacgccatgcattccaacatttgacttgagtggagctgcatcaactaagggatcagaaggtggaattactctgttgccagatgcaaaattgtcagtgtttacagccgtgcagcttaactctaagctggatggagagcacaaccttagcggtggtagagacactgggaacatttttgataacagatctgtggatgacagttaccatgagcaggagcttctcaatgacctttctgctccaaaatctctagtagaaccttgcagtgcctgtatggattcatgcaatgggcaggcgattctagaagatatgcctggacccaaatctcctgaagattaccaggatgacagcgtttcaggatcagtaggtgacatgtttgaaccttcaccaactgaaagagccgaacaggaaactacgctggtgtctcctgcagaaatgttggtatttaaattcgggcagcataataaccctaacctggtgagcgttggaggacacaacgatagctgtgatgaagacactgctgacatgtttagtactgaacctgtggcgagtaataatcaacatgagcaggagcttccaaatgacgtatctgctcccgtatctctcaaggaatctgcaatttgtcaggaagacatcagtgttcataccgaatcttgccctggaaagtcgcttccagttccagaagatatatctgcacctaaatctcctgaagagcgtgccattcatcaggatgacagcgttccaagatcagcagttttgtgccaaactagcgggcgaaggcgcatagatgaaatcagcaccaagcttctgagcttcaaaatttccagcactgttaaaccaagccacattgctatgaacgcccctagcacgaagcaagtcgacaacctgagtgaatctgcaattgcccttctcaggaacagggagaacacgcttgccatcaaaacagaccggcctgtgaagccgaaccctgatcgctctgtcgcgaagaactcatcaaggcgaccgctgcagccgattggcagaaggcctgagggccactgaggcagcaaccgatggtacattgctgttcttggtaagcatttaggttcaacgtcgagttgaagaataggagcatatatatatctgacaacagataggaaatgtaacacgatatggtgtttgtttccactgtgtgtgctactctgctgtgcagtgacgaagtggccgtgtgtgttttggctgttttattgttccaagaaggaactgactcagaaatcatccgcatgatgatctttttccttctttctagactcaatcattgacgtggtgttgggtttttcttatgtactctaattcaagtatttcgaacagaatggtatttatggattgtggctgtgtggtgcaagcattcctttgtttgttactctgagagtaaccatgtctatgtcgcactctatatcttggtgcacctttcaggttgcaagaataatgtacgctatctcgagttacctgactcctgactgctgcaattgcat

SEQ ID NO: 994 - DNA, 639 bp, Oryza sativa
  ref <308>: DATABASE ACCESSION NUMBER: AK059067
  ref <309>: DATABASE ENTRY DATE: 2001-12-06
gaggaggcagctcccccccaaaaaccctagctcaggcttcggcaccgcctctccccccctcgccttcctccccccaccaggcgcctccaagatgaagctcgtcaggttcttgatgaagctgaacaacgagacggtaacgatcgagctcaagaacggcaccaccgtccatggcaccatcactggtgttgatatcagcatgaacacgcacctgaaaactgtgaaactcacattgaaagggaaaaatcctgttacctttgatcacctcagtgtgaggggaaacaacattcgctattacactcttcctgacagcttaaacctggagacattgctggttgaggatacaccgagggtcaaggctaagaagccaactgcagggaagcctttggggcgtgggcgcggccgtggtcgtgggcgcggtcgtggcaggggacgctgagcttcactccagttccctatcttggaaacttttgcatccgcgcaaatgtaatctctgctctcgtgttagcttgtacggagtagtgttctgattatggcaaagacgttgatgtaagcactcggcacctctttatcgatgtggattttttcccggttggtatttgaccagatgttcttgttcaagaatatgctacgttacattgt

SEQ ID NO: 995 - DNA, 603 bp, Oryza sativa
  ref <308>: DATABASE ACCESSION NUMBER: AK059068
  ref <309>: DATABASE ENTRY DATE: 2001-12-06
agagctgagagccaaccaccacgctgctgctccgccgctctttctcccgtggtgaacgaaagaaggtggttggaggggggcatccgagcatggaggggctgacgtccagcgagatcgccggcttcggggtgggagccctgctggtgtgcgccaccatcgccgcccagagagtcgacggcttcatcgcctcctcgcagagaacgtcattgggcatgtgcaagaagtgcggtgatcttcgtattgtggcttgctcacaatgcaaaggagtaggttctgttaggaaaggaggactattcacatttggcatgctagatgatatttatgaatcacttggagctgaaacaaagacaagtaacttggttccttgcacaaattgccgttctaaaggccgccttttgtgtccagagtgctccaaggttaggtgattcagttctggtgatgtacagagatacaattttctatcaccacacatgtaggtgttgtttcagaactgtggtttaagatatactatatcatcttcatcaaagaattatggcatgtactgaactaaggatgcttattccattttcttttacaatttgattgaaagaattaagccatatt

SEQ ID NO: 996 - DNA, 1385 bp, Oryza sativa
  ref <308>: DATABASE ACCESSION NUMBER: AK059069
  ref <309>: DATABASE ENTRY DATE: 2001-12-06
tttcacgtgatgtgttgacgttatccatagctcccaaagacgttcatgagaatcagatacagtttgctcttgagcgtggtgtgcctgcaatggcagcagcatttgcgacacaccgattactatatcccagtcaagcatttgacttaatccattgttcacgctgccgaataaattggacccacgatgatggaatcctgcttctggaggttaatagaatgctcagagccggcggttattttgcttgggcagcacagcctgtttataagcatgaagaggctcagcaagaagcatggaaagagatggaagacttcactgcaagactctgttgggagcttgtgaagaaagagggatatattgctatgtggaggaaaccattaaataactcatgctacatgaaccgtgaccctggggtcaaacctgcactttgtgatcctgatgataatccagatgatgtctggtatgtcaatctgaaagcatgtatcagccggcttcctgaaaacggtgatgggctgactccctttccatggcctgcacgtttaatggagccaccaaaaaggcttgaaggtgttgaaatggatgcacactcatcaaagaaggagcttttcaaagcagaaaccaaattttgggatgacattgttgaaggttatattcgtgtttttaagtggagaaagttcaaactccggaatgtattggacatgagggctggatttggagggtttgcagctgcattgattaatcgtaaacttgattgctgggtgatgaatgttgttcctgttagtgagccaaacacactgcctgtaatctatgaccggggacttcttggagtggctcatgactggtgtgaaccatttgatacatatccaaggacatatgatctgctccatgcgtttagcctattctcgaaggaacagaaaagatgtaacatctcaagtatcttgctggagatggatcgaatactcagaccaggcggtagggcttacattcgtgacctaaaacaagttgtacaggatgtcaaagagataacaaccgccatgggatggcgatccatcatgcgtgacaccgcagaaggcccgtatgctagcaggaaggttttgatgtgcgacaagccgatggtgcgttagccgatcaggctggtccagagcaatgatgcgagccctggttttgttttccggagccttttgaactgactaccacagctactacggactggagattgacatctgtttcaatacatagggataggtgaatgccaaagttgtaactaatcaatttgattcgtcattcgtttgtacaacgactgatgtagcccctaacgattggcttgtttttgttgtatcatccacacaacagtaattatgaataggagttaggaaggtttttgagtg

SEQ ID NO: 997 - DNA, 514 bp, Oryza sativa
  ref <308>: DATABASE ACCESSION NUMBER: AK059070
  ref <309>: DATABASE ENTRY DATE: 2001-12-06
gctttgacacagaggtggaactggcatacttcaaccatggaggcatcctcccatacgtcatccgcaacctggcgcagaactaggagaaaatgcacaccatttcaagttttcaaccatgacaacaacattgcaggctcctctccttcccctcccctctgttgtgatcagcctgcaccgacatcgagagttcgcctgggacaatcagcctccctttgttcaccatataaataaaaaaaaaccgaaaataaagccgcaggagacaaggagccacacctggagatcttggtgtgaggaacaaacaattttgcctgctgcgtttagttgtgatgttgaaccctactagcttgtgttgatgaaccctactagcttgtgttcagagaaaaggacctttttattcatggattgagttagtttggtcgggtgccctgttgataggcagggcgaggtcacgaggtgtacatggtatggtgcgacttgcgtacatctagagttcttactgcttttctaccttttc

SEQ ID NO: 998 - DNA, 685 bp, Oryza sativa
  ref <308>: DATABASE ACCESSION NUMBER: AK059071
  ref <309>: DATABASE ENTRY DATE: 2001-12-06
agcttggcaacagaatggggatgggcaaacacaattgagaatggtgtctcattagaaaaacttcttgacacaatgattgaggaaagcgactcaaggttgccccctggatatatcagacttgatgagattgctagccgtgcaaaagtaaactctccaccacttggcaccctcataaactcgctgcgaaaggaagggtatgctgcttgtagatcacatataggcgccaatgcaatcaagaccaactgtcccactgagtgttgcttagacgtcgcgcaggagatccggaatttgcgataacagcaacctatggcctatgtggttgacgaagcagacaagatcgttgcagttgaagagcacacaagtatatttgggatgagcagcccatcaaggtttcctgtgagcatttgcttcccaaaactagtggagagctctcacacaagaagtaatctgaaataggttcacccatctatcctgcactacacaggcagcaatttttgctttgttactttgcaagtgggaggcagcaatgtcagctgtgttgttgaggcattttagcactattagttgtttctctttgtttttctgtttgttaagaggttagtagcatcactcttggaaactcgagggtgcttaccatgtacaaacattgttcctgatcttcaattttgcaccagatatatcttat

SEQ ID NO: 999 - DNA, 1476 bp, Oryza sativa
  ref <308>: DATABASE ACCESSION NUMBER: AK059072
  ref <309>: DATABASE ENTRY DATE: 2001-12-06
agattgtcaggtttgagttggtgcaggagacactgcattaccttgttccagctgtggccaaggaactcattaactgctatggcattctgtgcatacatcagaggagaggaccagtagccccaaatccaccatttcttgatgttttctgcaaaaggagaactcagtacaatgctcttgttactactggaacaatatatgagttacttggcatacctctagatatcaagaaaccaccgagaaccagaagaataagctgagcaaatgacccaaacgtgtctgcaacaaccatctctcttcctagtgcagcgagaagccggaagagaccggacgccatctggctgatcagtaccagcagcacataatggcggaagaatctctctatgtttggatcgaagcccatgacatagtatgtcatgcaaatccacacagcacattctaagaatgatattgggattttgagcacccatgtaggtaatgcatacgcccatgatggatagaaaagcaggtccctctgcttatagaatatcggcagctttgcaatgctcatggcgagctccgcaaatccattgaacaaatgtgtgactaatccaaggaacatagcacccaggaagatcgcaccatcttctacactgcgtcgatgcatctttgtacgcaggaagaccgtcattccgatgcttccaaggattatgagctggtacagatgtacctttcgtcagattttatttatggtcccgaagtagagagaaaaaaaattcaagatgcgagatacatacctggagaattttgaagatgtaaacaaatgaattcctcttcatcagcagccactccctcgagaagcatgccttgggaagattactctgctggatcactcacttcttgcaagaagtctgcaacacctttcctctccggacatttgaagcccattgcctcaaagaactcgaggatgttttctcgaggtccctggtatacgatttggccctcggagaggagaacaatgtcatcaaagaggtcatacgtctcaggtgcaggctgaagcaacgcgatgagcgcggttcctcctaagatgtggacagattgcctgagggagttgacgatctggtatgttgtggagctgtccaaaccggtggagatctcatccatgaacagagcctttgctggaccgacaagcatctcacctacgtaaattcagtggattgagaggtcagatttttttcactatgatcgaagaacactgtcatgcctagttctttgttgactgcagattgcacataccagttgtgacacgtttcttttgtcctcctgagatacctctgatcatagcgtctccaaccattgtatcagcgcagatttccagacccagaatctgcaatagcaacttaattagttctagtcatgtatatttcttctttttttctctattttcctgtagtgtgttgtactcactttgagaatgtaatctgtgaccacgctttcctg

SEQ ID NO: 1000 - DNA, 697 bp, Oryza sativa
  ref <308>: DATABASE ACCESSION NUMBER: AK059073
  ref <309>: DATABASE ENTRY DATE: 2001-12-06
aaaactcgtcttggaacccactgctttgcctataaatatgtagctatagcttctctgctttccgtcgcttaacacagttaacaccaacgcagtggtgctctctcttcagttagtggagcttcagagaaatggctttggctggtaggctacttgtcctcttcgccattgctctccttgccatctccatagccgagcacaaggcgctagccaagggatcaaccagtgagcatgatgataacgtttaccaagtaagcaagggaggacagggcagcctgaagagctatcagtgctcgccgcagtgcgcgtaccggtgcagccagacgcagtacaagaagccgtgcctcttcttctgcaacaagtgctgcaacgcctgcctctgcgtgccgtcgggcctctacggcaacaagggcgagtgcccctgctacaacaactggaagaccaagcgcggcggccccaagtgcccgtgaaaaaaccttcagtggacgctcgaattctttggtcatttcagtacccaaactctgctcgcacgatgccgattgattctagcatggccgtcggggcagaggcagctgtggcttcctatacattacatacacacggttgtaaaaatgtacatctgggctatccattgctgtacgcctgaacggttccagaggggtgatgcaaatcatgcagatgcagctgtatcgctaccacg

SEQ ID NO: 1001 - DNA, 1530 bp, Oryza sativa
  ref <308>: DATABASE ACCESSION NUMBER: AK104041
  ref <309>: DATABASE ENTRY DATE: 2002-08-28
accagcagcagcagcttcacgcctctcctactgcacattgcacctcgagtccagaggctgagagagctcacggggagaagcaaaccaaaagcccaaaggacttttctaccatggcgtggcaactcctcgccggcgtgctgctgctgcagctcgcggcgagcgcggcggggcagcagcagtgcctgtccgcgacgttccagaacgggcagacgttcctgaagtgcaacccgctgccggtgctcggcgccagcctgcactggacgcaccacgccgagaacggcacggcggacgtcgcgttccgcgccccgcagcagagcagcggctgggtcgcctgggggatcaacacccgcggcaccaccatgcccggcagcagcgtgttcatcgcctcgcaggacggcagcggctccgtgtccgtcctcatgaccgtgctggagaacaccagcccgagcctgaccaacggcagcctcagcttcgacgtgctgtccccgcccaccgccgactacaccaacggcgtgtacaccatcttcgccaccatcgcgctgcccaacaactccacgacgcagaacaccgtgtggcaggccgggccagggagcaccgggaacgtcggccagcacgcgacgtccggccccaacgtgcagagcatgctgaggctcgacttcagctccggccagagcaccggtaccgcctccaactccaggctgcaccgccgtaacatccatggcatcctgaacgcggtgagctggggcatcctgatcccgatgggcgccatgatcgcgcgctacctccgcgtgttcgaggccgccgacccggcatggttctacctccacatcacctgccagctctccggctacatcctcggcgtcgccggctgggccctcggcctcaagctcggcagcgagtccaagggcatcacctacagcgcccaccgcaacatcggcatcgccatcttctgcctcgccacgctccaggtgttcgcgctgctgctgaggcccgacaagaagaacaagtacaggttctactggaacatctaccaccactccgtcggctactccgccatcgtcctcgccgccgtcaacatcttcaagggcctcgacatcctcaagccggccagcggctggaagaggagctacattgccatcctcgccacgctcgccggcgtcgcgctcctgctcgaggccatcacctgggtcatcgtcctccggcggaagaagagcgacaagtcgtcgtcgccgtacggcgccaccaacggcaacgggcgcgcgtagtttgatcagcatctgatcgacgtgtgccttgcgctacggcctacgggtgtgtagttttgctgcgatgtgtgtgtgtatttgtcttctgctagctgtgtatcttccattttttgttactgcttctgtagactacgtagaggttcagagattatttcttttcctttttttttttacattttcaggtctcacgatgacacatttgtatacattttttttcaccttgatgtatgattacctttatttatgcatacgtttgattacgatt

SEQ ID NO: 1002 - DNA, 1739 bp, Oryza sativa
  ref <308>: DATABASE ACCESSION NUMBER: AK104042
  ref <309>: DATABASE ENTRY DATE: 2002-08-28
cttcgactccattccctcccgcttctcgcgcaacgctatcccgccgccgccgcgtgtctccccaatcccaatcactagcctcctccgtcgaccgtccgccttcccctgagggcggcctgcgtctgcgtggctgcgccgtgccgccgtcgcgcccccgcagcttcttgcgtcttgctgcgcgccgtgccacccgccggcgcctgcgcctgcgccttcctttaccgggctaccaccctgcgccgtctctgactccccggccggcggtcgccctgcccgctgctcctgcacggcgtggctgcaccctagcccctgcccataactccattgtaacaccgcccccagctcgattgccgcctgacacaaggcagacagagtaggaacacccaacaagaaattcctggagctgccattgcggcgctgccttccatggagaccgagggctggcctgccctccagcctctgctgtgcctcgcctggatcgccactacactccccatcattgtcgccgcgctgccaatccccgcagctgctggtggtcacctccttcgccggctgctctcggccttctcctcccgcggcaagaccgtgaggccctcccccgcctcatcctctggttcctcctcttctaaggcgaagttcactgttccacaaaaatacttcatgcatttttatgtggtcggagtgctggcaacaacaattttgcttctggcaatatggttctatgcatatatgaaaatgacaccattattgcctgagtcatcaagttattccacaattgccagccatcttgtaggctcaaattcattctcttttggtcgtgttcactcgcgcaccatgggacacaagtatcatgtctggcgaacagtatttgtacttctattgatggaaattcaagtgctgagacgactatatgagactgaacatgtgttccactacagcccttctgctcggatgcatattgtaggatatttgacgggtctattctattatgtagctgcaccattatctcttgctagctcttgtatccctgaagcagcagagtatcttcaaggtcaagtagctgagttcatagtaaagggtcgtgcgagaatgccagatcttgtaattgattcatcatctctactacagcctcttctgaagttggggtggacccagtggataggtgctgttatattcatttggggttccctccatcagatccgttgccatgcaattcttggaacgttgcgtgagcacaaagattctgatgaatatgtaattccttgtggtgactggtttaatcgagtctcttgccctcattaccttgctgaactagtaatatattttggcatgttggttgctagtggtggagaagacattccagtgtggttcctgttcgtatttgtgatcacaaacctgtcatttgcagcagtagaaactcacaagtggtatcttcaaaagtttgaagactatcctcgctctcgctatgccatcattccatttgtatgctagtgtctacgaaatggctacattatgcaaagcttatgtatttgcacacaattacgacatgtaacttagcttgatgtaaatgtgataacaatcatactacgtaccaccgtagaggctggaagtgttgtattgtataacgtagccacgcagaatgtacctgtgacacttcatgctgtgtgttatgctacacacttggatatttatcaacattcttaagcatcgggaataaagttcttgcagaattggattgg

SEQ ID NO: 1003 - DNA, 668 bp, Oryza sativa
  ref <308>: DATABASE ACCESSION NUMBER: AK059074
  ref <309>: DATABASE ENTRY DATE: 2001-12-06
catattttatattcacaggtcacatggagggggataactctcaggcatatggtctcttgttcctgggcatccttgccttccttcctggtttttatgagactcgagttgcttactattcctcgagaggggcaccaggatacacctttgcatctattccagattattaaccttccattgtctcaccaagggacagtgacgatagaacatggacaaaaacttgaatcttcaatcaggatgcaggaatcaaatgagctcttattttattaccactaaactgttaacatctaaatgaagtcagctgctgactgctgtgttcacctgatggcattgctcaccaggtgtcacttatctgtgctttgcagacaaagtaaactcgtggtcatactcgtctgttgctacatactccagatgtagatggctgtttgtcaccaggagtagatggctgttttaaagttaccgcatatttttgttccacaattccattgtattttgtgttgatgtcattaaggttttattttggctgcagaaatagtataaccatactttcatctatatattcaagttcttatagcagctgatggcaatgtgttttttgtactgcttttctccatcatgatatttgtacggataaattccttctgtgctactgaaagtaaatctattccgac

SEQ ID NO: 1004 - DNA, 2055 bp, Oryza sativa
  ref <308>: DATABASE ACCESSION NUMBER: AK059075
  ref <309>: DATABASE ENTRY DATE: 2001-12-06
agccactccccgcgcagcagctcagccgtcgctaccaccacctcaagctcccgcctcgcgtgcagctagctgagagcgagcgctcgccatggagaacggcgccggcgccggggacgacgagtacacgcgcgacggctccgtcgacctccgcggcaaccccgtcctccgctccaagcgcggcggctggaaggcctgctccttcatcgtcgtgtacgagctgttcgagaggatggcgtactacgggatcgcgtcgaacctggtgatctacctgacggagaagctgcaccagggcaccgtggaggcggccaacaacgtcaccaactggtccggcaccgtcttcatcacgccgctcatcggcgccgtcgtcgccgacgcctggctcggccgctactggaccttcgtcgccggctccgccgtctacctcatgggcatgctgctgctcacactggccgtctccgtgccagcactgaagccgccgccgtgcgacggcggcggcggcgccgcctgcccgcgcgcgtcggcgctgcagctgggcgtctacttcggcgggctgtacaccatcgcgctcggccacggcggcacgaagccgaacatctccaccatcggcgccgaccagttcgacgacttccacccgccggagaagctgcataagctctccttcttcaactggtggatgttcaccatcttcctcggcatcctcttctccaccaccgtcctcgtctacctccaggacaacgtcagctggaccgtcggctacggcatccccaccctgggcctcatggtctccgtcgccgtcttcctctccggtacgccgctgtaccgccacaaggtgccccagggtagccccctcgccacgatggggagggtcgtcgccgccgccgtgtggaagtggcgcgtcccgctccccgccgactccaaggagctccacgagctcgagctcgagcactgcaccacccgccgcgggttccgcatggacgcgacggtgtccatggcgttcctgaacaaggcggcggtgaagccgggcgaaggaggaggaggatcggtggcgcggctgcccgggtggacgctgtgcacggtgacgcaggtggaggagacgaagcagatcgtgaagctggtgccgctgctcgccacaatggtggtgccgtgcacgctggtggcgcaggcgggcacgctgttcgtcaagcagggcgtgacgctggaccgccgcatcgggaagttccacgtgccgccggcgagcctcggcgcgttcgtgacggcgacgatgctcatctgcatcgtgctctacgaccggttcctcgtccccgccgtgcgccggcggaccaagaacccgagggggatcacgctgctgcagcggatcagcctggggatgctgctccagatcgtgacgatggtggtgacgtcggtggtggagagccagaggctggggtacgcgaggaggcacgggctggtcgccaccggcgggcagctgccggtgacgatcttcatcctgctgccgcagttcgtgctgctgggcgtcgccgacgcgttcctggtggtggggcagatcgagttcttctacgaccaggcgccggagagcatgaagagcctcgggacggcgatgtcgctgacggcgtacggcgccgggaacctgctgagcagcgccatcctcgcggccgtcgagcgggtcaccggcggcggcaaggggaggacgccgtgggtgaccaacaacctcaacgcctcgcgcctcgactactactacgcgttcctcgccaccctcgccgccgcgaacctgctggcgttcgtcgtgctcagctgcaagtactcgtaccgcgtcgagtccacggagaccatcgacgtcgacgtcgccatggacaacgtcgcgcagggcggcggcgtggtgacggtcaaatcagaggcagccccaatggcatgacagcacttccggaattgtatcctgtctattcccgtctggattctgaagttgcaatgtaatgaagaaacggtgatgatacatattagcactttaaaaatgttaaatgaaaattttatttactcgttctgtaaaggaacggtaat

SEQ ID NO: 1005 - DNA, 392 bp, Oryza sativa
  ref <308>: DATABASE ACCESSION NUMBER: AK059076
  ref <309>: DATABASE ENTRY DATE: 2001-12-06
aaaaaaaaaaatgatctttgaaaccgctttctcaaagagctggagagtttatccatgtaaattagcaaccatgaagtataaggagaaaactgggatttcagtagggcacggacatggttgttaaaagcagaacccagctgcctttgtaatgtacacatttctcatcgcggctcttcttttccttgtgtattattattttacacttggctgatgttattcttgacaatactgggtccttcgaggcagagatgtttgatgtgatcgggtgccactttgggacccccttgttcttttgttgggtttgtatcgagttaggtcagttgatttctttcatatgtaccatactgtgattaccatacgaacttctagattgtattaaggatgtcttgatc

SEQ ID NO: 1006 - DNA, 834 bp, Oryza sativa
  ref <308>: DATABASE ACCESSION NUMBER: AK059077
  ref <309>: DATABASE ENTRY DATE: 2001-12-06
agtttaacaaaaatacctttggccttgcagccggtggtgcacttcaggtctctccactgcaacctgggacctcggccaggacgctgctacctatggtggcattccagaatctctctcctggagcgccaagctcactgctgcaggttgcggtgaagaataatcagcaacctgtgtggtactccaatgacaaaatccctatgcatgccttctttggtgaagatggcaaaatggaacgaacaagttttcttgaggcctggaaatctttacctgatgacaacgaattttcgaaagagttcccctcttctgtcgtcagcagcatagatgcgaccgttgagcaccttgcagcatcaaatgtgttctttatcgccaagaggaaaaactcaaacaaggatgttctgtacatgtctgcaaagattccgcgtggaatccccttcctgatagagcttactgctgcagtcggtgttcctggcgtgaagtgtgcggtcaaaactccaaacaaggagatggtggctctcttcttcgaagccatggagtctcttctcaagtgatacaaaattgaaggatcattgttccttccaaattgatcagttcatgagctattgtaggtttggatgcggcgttgtttcacaggagctggtgtgaattgtatttgttgttctttgtattagattactgtatttaaactgctagtttcctggtttcaaagttttttcacgacgaacactcgacatggccattttgtctgcgtaatttgtatatctcggacctgaacctcttttcatgccatagcatatgaaatataagtagcttgcaaactcgtaattgatgaggtac

SEQ ID NO: 1007 - DNA, 1276 bp, Oryza sativa
  ref <308>: DATABASE ACCESSION NUMBER: AK059078
  ref <309>: DATABASE ENTRY DATE: 2001-12-06
tgaatctgaatcttacgatgaatctaatggtcatgatgctgaaatgatggacaagaaatctagtgatacaaggtcgagtgacccccctagaacatttgattataatgtgatatcagataacacagttgagagtccaagaaaagagggtactgacatcaagagatttgaggaatcaaacgagagtgaactgaacataactgtcagaaataggaatgtcatattgaatagctgtcaagatcatggaccaagcatttccaggacatatcatcaggatgaaatgagtcaaatggaagaagttccagagataaatggcccttccgtgtcaatcaagaatttacaacagatgtcctcttctctacttgagatgcttgatgatccagaggaatccaccagagagcttgcacttactctattggttgaaattcttgaaaagcaacgaaaggcaatggagaactgtatcgatactcttatagttaaattgctgcatgcaaccaaagatgctgccttgaaggttgtaaatcaagcccatatctgtttgacaacggtggttactcaatttgatccgctgacatgcctaagagcaattgcttctcagttggccaaccaggatgaaaaagttcttattgtcagcatcaacagtttgagcaagcttgttattcgattatcacaggacaatcttatggcacatttgtcgatatttcttcctgcactcctggacgccttcgaaaaccatagtccatatgtccgcaaggctgtggtgttgtgcttggtggatacgtacctgaagctcgggccagcgttcttgccgtatttggagaggctggacagcgcccagctgcagctggtaaccacgtacgccagcaggctgtcccagacgagctttattgctgtggacgcttgatgcaggcaacccagcagcaacagcagcagcagcagaagacgcaatgcttgtttcaacgataactctccaccgttggttagccttagccttctctttctttttatttatggccatgtgtgcacaataagggcagcagctcagctctctccccctttctccaaatttatgagcatagtagaatagatctctatactgtaaatcataattacctgtttttactacccagaaatgagatacatgcatgtaggcagtgcagattgtacaaccaatggaagaatagtagtactagcattttcatcctgtttgctacagcttatgtgatctaaaggaaaggaagaaaaaaatataatgggtgtgcagttcataggctgtgag

SEQ ID NO: 1008 - DNA, 664 bp, Oryza sativa
  ref <308>: DATABASE ACCESSION NUMBER: AK059079
  ref <309>: DATABASE ENTRY DATE: 2001-12-06
atgatcgcaaatcagggctgccacctcggggtgaccatgacaggattagccgggagagaactcacagtgatgagaatggtagagaaggtggtaaagaaggtgatagggaccgagggattcgtaagcacgaggactaccaccgttacaataaatctggtgaacggagctctagtagatacgatgatcgtggctacagcaagcacgagagcaggggcaaatatagggatggcaatgatgattacagacgacaaccgggaggtggcagtcgatatggcagggataagtatgaaggtgaacggcgctacagagaagatgatggccatggaaggagtgaccgtcacaagagagatgaaagtgataacaggaaaagaagcccagatactggtaagcatagaagagaagacggtggtcaccgtgagacaagcaagcacagggaaaggaggcagagagatgatagataggtcactgcatcaccgtcagttttgtcttgcctgtttctcatcatacattgaattttgtcattcttaatccaaagatagcaccagaacactaaacatgtagcttagaatctgcgtgtagacattatgagagctccactggctacagattgttgtaacttgtagaccttttcttttctatacatgctcatggacgttgttctttt

SEQ ID NO: 1009 - DNA, 315 bp, Oryza sativa
  ref <308>: DATABASE ACCESSION NUMBER: AK059080
  ref <309>: DATABASE ENTRY DATE: 2001-12-06
gattctggaaaaactaccgcgcagaagaagaggagggcaagcagtgacacagatgatgacgatgatgacttcattgtttctaagacgaagaccaaaatgcaaaagatgaatagctaggggtatcatccttggcataattgctgaatcagggtaaccttaggaaaagatgagagattttccctttccatgtactgacatgcatgagcatctggatactgaagtgaaggaatgcactgcttagaagttccacctgttgcttagttctggaatgacaatggttttcctgaccagaatgaagggaaaatgtttcaaatt

SEQ ID NO: 1010 - DNA, 886 bp, Oryza sativa
  ref <308>: DATABASE ACCESSION NUMBER: AK059081
  ref <309>: DATABASE ENTRY DATE: 2001-12-06
aaccgaaaccggaaagaaaccctagacctccgtctccggcgaccctcccctcacctcctcgccgcggctccccccgcctgacctccgcgcgccccccgtcgactcccccccgcgaatccggatcccgcgcgcgcgaggaaggagggggggaggaggagcgggagatggggtcgtcgtcgaaggtggtgcggccggaggaggtgctggattcgctcaccaacgacggcaccatcgacgcgctccgcatgaagatcatcgcccagctcaaggccaacgaggatatgaagaaaaatactatgatgatggtggagcaaagcagggttctaaacactcctggagctgagaagaagaccaagagggagttgtttgatgcccttcggcaggaattggaaaatccagtccttgagaaagcttcaagggaagtctgggatctgatacttgagaatggtggactggggaaagagattactgacactattgagagtgtcttctgccgcctcagcgggatcgacatgatgccacctccaccttcaacatctattccttctcaccaagagagagaaagaaacatggctgcagatggggggtgagaagagcaaggagattgataccccggaaaaaccatcgtcatcatcaaggaagagaccctattctgataccactacaaaaggggcaggtgctgtaccaaatggcggtgctacaagccagcatgatgggtctgaggatagcagccagaagtgatgcttgtcgatgctgcagaattttttccttccaacaggctgaataagccattgtgtttttatggtttaattacaaaaatccttcatatccgtgtagttcacaatgtacaatagagtaaaatgtgtttatgattgctgtttatgct

SEQ ID NO: 1011 - DNA, 1562 bp, Oryza sativa
  ref <308>: DATABASE ACCESSION NUMBER: AK059082
  ref <309>: DATABASE ENTRY DATE: 2001-12-06
atcactgtttttacacttgatttttccgggtcaggtctatcaggtggagattatgtaagccttggttggcatgagaaagaggacctaaaatgtgtggtgtcatacctacggaccactaagcaagtttcctgtataggcctttgggggcgatcgatgggtgctgttacaagcctactctatggagcagaagattcctcgattgctggaatggtattggatagtgctttcactaacttatatggcttgatgatggagcttgtggatgtctacaaaatccgggttcctaaattcacggttaagatggctgttcagtatatgagaaagatcattcagaagagagctaagtttgacataatggatcttaatgttttacagttcgctcccaagacgtttattcctgcattgtttggtcatgcttcaaatgacatgttcattcagcctcaccactgtgatcgtattcaccaggcgtatgggggggataaaagtataataaaatttgagggtgatcacaactccccaagacctcaatcatattatgattcagtttcaatgttcttctataatactttgcatcctcctcaattgcctgtgaaatgctccaataatctaggtgctttcaaagttggcacggtgaccaatgagagtttcatttttgagatcattagtggtctacgaggagctggaaccaattcatgcagttcatcaatagatgcatcgaaatttccaaatgctacaacaccagtagttgaattgctgtcagagagtgtgaatcagctgtccattaagaatgacagtgacttggattttcttttagacgagaatcgcaccctctcagaaattgatggtgatagtgctgggtcacgcttgcaggacaaatcaagtgggcacaatgaggaatcctgctcatgtacaagctctaacagagaaagttggggtagatgttcctctttagggggagctagtgacgactcattccctggcgatattagtgataagcaagagaatatgactgtaaaggctctggcaacaccgctaagacagaaagacagcaaatcgacaaccccaaaaacaaaggagaagaagaagtcactatggaagaagcttaaccgtgagagggcaggggtgggtgatagtctatcgcaacgtttgaagatgtgcctcagtcattcttctcgtcacaagagagtcaaatcatctgggatagtgtaacaacttattagccttgacaaagtccatctcaacgaatcactgacactgatcagttccgtgaacaccgaatcgccttgatttgattcagacttacctgctggcactaccagtgccagattgtaacttgtaacactggtgagtacatactcgattgccatggctcgtgtcaagcttcgcaggagcccatgagattgagcgacacgcccttgtatttgctgtctcctgtaattgcgatctctggctcgctgtttattttccttttaccacttgaatgctgtaaattacaatgctgtagtgcaagagtgcgactgcagcttgttggtgagatgaaagggatgtcgtgcgtcgttttt

SEQ ID NO: 1012 - DNA, 1617 bp, Oryza sativa
  ref <308>: DATABASE ACCESSION NUMBER: AK059083
  ref <309>: DATABASE ENTRY DATE: 2001-12-06
tttgcagcagctgggggtgaagccaggttcccggattggaatatatggatcaaactgccctcagtggatagtagcaatgcaggcttgcaatggttacagcttaatctgtgtcccactctacgatacgttaggtgcaggagctgttgacttcattattgaccatgctgaaatcgatgttatctttgttcaggacaagaaaataaaagaaatactgtccgcaaattgcaagtctgctaagagagtgaaaggactggtggcatttacttcgggaacaagcgaagaaatcacaagtgctgatcagattgggatgaagttgtactcgtggaaagatttcttaaaaatgggaaaggaaaatccagcccaaccttgtgctccaaaaccaaatgatacatgcaccatcatgtacacaagtgggacaagtggagagcccaaaggtgtcatgcttagccatgagagtcatgccatatatgtgaaaggtgtggacctcttcatggagcagtttgacgataagatgacaacagatgatgtgtttctttcctttctaccgcttgctcacatccttgaccgcatgatcgaggagtttttctttcacaaaggagcctcagttggctattatcatggggatttgaatgccttgagagatgatctcatggagctaaagccaactctactagttggggtgcctcgagtgtatgaaaaaatttatgaaggtatcttgaaggccttatcagaactcagaccactcagaagattaattttcaatgctctgtataaccgcaaactggcaaacatgaaagcaggctgcacgcacaaaactgcttcaccttttgcagatatgttggctttccgcaaggtcaaagcaaggcttggtggtcgtcttcgcctattaatctcgggtggggctccattaagtaatgagatcgaagagttcttgagagtaaccagctgcgcatactttatccaaggctatggtttaacagaaacactgggacctagcacggtctgttaccctgatgacatgtccctggttggaactgttggcgtggctgctacctatacggaattgcgattggaagaagtgcctgagatgggttacaatccacttggtactccttcccgtggtgaaatatgcgtccgaggaaacttcttcaccggatactataaaaatcctgagctcacgaatgaggtcatggctgatggatggtttcacacaggtgacattggagagatgaactcagatggaatcctgaaggtaattgaccgaaagaaaaatatattcaagttgtcacaaggggagtatgttgcagttgaatacctggagaaagtatatgttttccctccaaccgttgaagatgtctgggtatatggggacagcttcagatcaatgttagtggcagtagttaatccacatgaagagaacaccatgaagtgggcagaatcaaatggctgcaagggttcttttgctgaaatatgcaagtctgaaggccttaaagagcatatcctgaaagagctgcaatctgttgcagcaaagaacaagctacggggatttgagtatgtcaaaggtgtaatattggaccctattccttttgaccttgaaagggatttggtgactacaac

SEQ ID NO: 1013 - DNA, 594 bp, Oryza sativa
  ref <308>: DATABASE ACCESSION NUMBER: AK059084
  ref <309>: DATABASE ENTRY DATE: 2001-12-06
aaaagcgaagcagtccccaccccgaccgcgtccacctcctctcttctcccacgcgcgcctcgcctcgtctcctctcgagatctcgccatggacgccatcgactccgtggtggatcccctccgcgagttcgccaaggacagcgtccgcctcgtcaagcgctgccacaagcccgaccgcaaggagttctccaaggtggcgttgcggacggcgatcgggttcgtcgtcatgggattcgtcggcttcttcgtcaagctaatcttcatccccatcaacaacatcatcgtcgggtccggctaggttggatgctaaagaaagactagcatggggatatagtggagtactcatcaaggagaaaacagaagattattgaggatagtgctgtgttctaaagtaggcgtccaaagttcattgacccgtttcaagaaactgttgctaaaagatggtttatattctgttccctttttgtggagaaatcatcgtactgaattagactttgcaattagcatgcaatgaaatgttcatgtttttgccgtatccctgtgttccacataccaatagcactgtcgtgatatcaaccagtatcgttaggcttct

SEQ ID NO: 1014 - DNA, 821 bp, Oryza sativa
  ref <308>: DATABASE ACCESSION NUMBER: AK059085
  ref <309>: DATABASE ENTRY DATE: 2001-12-06
gttgttctacgccttcaaaagttcttggaatcaccagctgcaacttgttggcgagctcttgtgggtgcagttcgctctacgacctttttgtctgcttttgttacattcttccaggctgccatctgtttgcatcgtaaagttgcaaccaaagaccacaagtttgtgtactggtttgctggtctgatgtctggtctttctattcttttggaaaagaaagccagaagagctgagctagctctctatgtacttccccgcgcaggggattctttgtggtatatattaatcaaccgccatctgctcccaaatattaaaaacgctgaggtggctcttttctgcatgtgcatggggggaatcatgtatttcctggagtatgagccagataccatggctccattcctcagaggactcatcagacggttcctggcaagcaaaataagcaacccgagcccaccgccaaatcccaatgcctcctactcctaccttcagaagctgaacgtgctggagcaaccaagaacacagcagggcccagagaatggcctgacatcatcagagaagtacaacctggaagcaattcccggactttgagtagagacgtcgcattcgtggcagtttgagctttctttgcttgtacactttgaaaaccaacaaatcctaaccgtaaagcatccaatatgtcaggatttagcatccttttgcacggctggtgtggtgttaatatctatacacaaggagtatatatagtgttctattgtgtcccttgcagaagaaaaggttaaatagagcgcaccaatttgttgggtgcggaatgattagaagttctt

SEQ ID NO: 1015 - DNA, 1122 bp, Oryza sativa
  ref <308>: DATABASE ACCESSION NUMBER: AK059086
  ref <309>: DATABASE ENTRY DATE: 2001-12-06
attagcagaagggttccagcaaggattctcttctctcccaccgacaatctctgaggagctgttcaggttggagctggctgatggtgacaactgttcaaggtcaatttgtgcggagatgaaaagagtgcagaaagcaaccatcaactttgacaataccctgagccccgcacacacactgctccaaattaactgtgctgatcaaaaggggctcctttatgatattttgagaacaatgaaggactgcagcattcaggtaacatatggccgattctggtcagacaagaaaggttttcgagaggtggatctttttatcaagcaagcggatggaaagaagattattgatcctgagaaacaggatgttctcagctcacgcctgaggtcagaggtgctccatcctctcagggtgatgattgtcaaccggggtcccgatgtagaactccttgttgctaaccctgttgagctatccgggaagggacgaccacgtgtattctacgatgctacatttgctctgaaagcgcttgggatctgcattttctctgctgaaattgggaggcaggcagcatcagagcgtcaatgggaggtctacagattcctcctggatgatagcagtgagttcccattgtcaaacagccttgtcaataggaaccgtattgtcgacagggtaaggaaaacgctgctgggctgttacaactgagacttggtttctatctccaccaatccaaagctcaaagacaactgatacagtcagtatccaaactgttccagttaattaccaggcgaacgctcagactaggactactccaggtttgtcactgccggtgataaacttgctgccataactggctggtatcactgcctacaattgccagttttctgttcatgtcatcatgtcattgaaggatatgttacgggtttgtgaccaactcatcgtgttcagtggtgatggaagaaagtatctttatgaaggtcgcctgcttgtcatcttcagaaagagctggcaatatgtgtaacaaaggagcggatgacatacccagaatatgttatttggagttacatactctgagcactgttgtaaatggtttctgaaaatgacaaatgagcataattgcatctccgtctccc

SEQ ID NO: 1016 - DNA, 1472 bp, Oryza sativa
  ref <308>: DATABASE ACCESSION NUMBER: AK059087
  ref <309>: DATABASE ENTRY DATE: 2001-12-06
gaatcgctcgccgactcgcgttttgtttgtcacttgtcactagtcacctagcagcttcggcatgggctgctgcggcggcatgtcgtcgacgtcgagggcgccgagggggatccgggaggagacgctgctccgcgtcccgggcgcgtcggtgcacctgctcgacggcgccgagggccccgtcgagctcgcccggggggacctcgccgtcgtgcggatcgccaaggacggggtggccgtggccaccgtggcgcgcgtcggccgcggcctcgggtggccgatcacgagggacgagcccgtggtgaggctcgaccggctgcactacctgttcacgctcccggacagcacgggcggcggcggcggcggcggcggcggcgcgttgttcctcaactacggcgtctccttcgccgcgcccgacgacgcgctgctggcttcgctcgacgcgttcctcaaggccaacgcctgcttctccacgccttcttcgcccgcgccgtcgaggagctccgccaccaccaccaccaggccggcgccgacgacgacggcgacggcggacgggtactggaacgacttcgcgccgaggatggacagctacaacaacgtgctcgccaaggcgatcgccgccggcaccggccagctcgtgcggggcatcttcatgtgcagcgaggcgtacgccacccaggttcaacgcggagccgacctgattcgtcctcaagctaccggcagcgtgaccaaacgatccggcggcgcaggtggtggcggagcaagccgtactaccggccaaccggacgcgaagcgcggaggagtcaacaagagcctcaagagggtcaggaagctgtcggagatgacggagaagatgagccagtcgttgctcgacacggtcatcgcggtgacggggtccatggccgcgccgctgcttcgttcgaagcaagggaaggccttcctcgccaccgtcccaggggaggtcatcctggcctcgcttgatgctatcaataaagttatggacgcggtggaggctgctgagaggaggtcactcgctgccacatccaatgttgtctctggtgcagtgtcaagaaggtatggagagagcgcaggggaggcgacggaggatgcgttcgcgacggccggccacgccgtggggacggcctggaacctcttcaagatacggaaggccgtcacgccgtcgtcctccctcccagggaacatggtgaagagcgccgtcaggaacagaaaatgacggcccgcccgtcttgcaactgcagagaacagcggcgtgtgctacaagccacctcgagtgtgtcgcgtaggctgatcatgtactgccaagttaaactctcctgcctcttgcatgttcagttgttcactacctgatgaagtaatcagggcataccaacattacaccttaagtactatacaaaatgtctcagtaacctgtgttgagctgctaaagatattcccatttgtgagtgcttgctacc

SEQ ID NO: 1017 - DNA, 1691 bp, Oryza sativa
  ref <308>: DATABASE ACCESSION NUMBER: AK059088
  ref <309>: DATABASE ENTRY DATE: 2001-12-06
acgtgagccttcaattatgtcgcccggaggccggagctctgcctcgcgtccatggcgtcgtccctacctacgtactgtagcgcagttgtaactgcgtatgcgagtcgtgatattttaccggagtcgggacgaacgctcgtcgcgcgctgcgcgcacgcacctaccccagatttgccctcggcatttacgccctcacctacaatctcaagcgagcccgattaatgccctctttatagtcccaccattgccgagctcatcccaatgcagaaaccatccagcgtgtagtgtgtagcgtgtagtgtgtcgtcacgatgtcgcgcgccatggcggcctccaggcgggtctcggtgttcgtcgccgcgttggtctgctgctcactcgtgcggctctcccggtgcggcggcggcggcggcgggcagagggcgcagaactacacctcgatgttcagcttcggcgactcgctgacggacaccggcaacctcgtcgtgtccagcccgctctccttcagcatcgtcggcaagtacccctacggcatgacatacttccaccgccccaccggccgctgctccgacggccgcctcgtcgtcgacttcctcgcgcaagcgttcgggctgccgctgctgcagccgtacctgtcgcgcggcgaggacgtcacgcggggcgtcaacttcgccgtcggcggcgcgacggccatggatccgccgttcttcgaggagatcggcgcgtccgacaagctctggaccaacctgtcgctcagcgtccagctcggctggttcgagcagctcaagccctcactctgcagctcacccaaagattgcaaggagttcttcagcaagtcactcttcctcgtcggggagattgggggaaacgactacaactacgccttcttcaagggcaagagcttggacgacgccaaatcctacgtccccaccgtcgccggcgccgtcgccgacgccaccgaaaggctgatcaaggcaggggcggtgcacctggtggtgcccgggaacctgccgatcggctgctcgtcagcgtacctgacgctgcacccgagcagcaacaggagcgactacgactccaccggctgcctcaagacgtacaacgacttcgcccagcaccacaacgccgtgctccaggacaagctccggctgcttcgccggagctacccggaggccaggatcatgtacgccgactactacggcgccgccatgtccttcgcccagaaccccaagcagttcgggttcaggcacggggcgctgaggacgtgctgcggcggcggagggccgtacaacttcaacccgaaggcgagctgcggcgtgcggggctccagcgtgtgcacggacccgtcggcgtacgccaactgggacggcgtccacctgacggaggccggctaccacgccatcgccaacagcatcctcaatggcccttacaccagcccaaggctgctctgaccatcccccgttctctcgacctggtgttagctgctgctgctgctgctgcactctgcaatgtaaactgatctgtaatgtagtgatatgagctagtggtggttttgagttttgacagtgtgtgggctttggctacttgagtctccaggcacagtacagtatgtctgtcgagtgtcatcagctttgggcgtgactgtgtccgtgctacttttgactttgcaagtactgaattatagtactcagcac

SEQ ID NO: 1018 - DNA, 1743 bp, Oryza sativa
  ref <308>: DATABASE ACCESSION NUMBER: AK059089
  ref <309>: DATABASE ENTRY DATE: 2001-12-06
actcacacaagttgcatcgatcgatccttggcgatcgatcgagctagctgctgcgaaaatggcggcctcctccttcctcgttgagtgcctgtcatggcttgtcgtcgtcctcttctccctgtacatcttccagcttctccgcgacgcccgccgccgcctccccccgggtccctggccgccgaagccgctcgtcggcgacctcctcgacctcggcgaggacggcaagcagcaccgcacgttcctccgcctcgccggccgctacggcggcctcatgtgcctccgcttcggcatggtgccccacgtgatcgtctccaccccggacgccctgcgcgcggtgttcgccgccgccggcgccggcggcggcggcggcggggaaggcaagaaggtggatggcatcgcgggcctcccgagcctcgacgtgctcagcgccatgggccaccgcgcgcacaccatcttcgcgctcccgagccaggacggcaagtggcgcgcgctccgcaagtccgccgccgccgagatgctcgcgccgcggcggatctcgtccgcggcggccggcgcgcagctgcagaccaagatcgtggaggcgctccgccgcgaggtgtccgggcacgcggcgcggggcgccgccgtggtgttcaggcacgcggtgctcgactccatcctgagcctcctcctcggcgtgctctactccaccgacctggagcgcgaggagcgcgccatgttcagggacctcattgaggagatcgtcgggatgctggggacggcgaacgtctccgacgtgttcccgccggtggccgcgctcgacctccagggcctccgccgcaggatgaccgacctcctcaccatcatgtaccgccacttcgacgaccaggtcgccctgcggcggcgcagccgggacgccggcgaggcgcgcaagaacgacgtgctcgacaccgtcctcgacaaggaggagagcgagtggaagcaggagggctccctgctaagccatgacgtcatgcgagttctcctctccgatttatacggcgctggagcaagcacgacagcagcgctaatcgagtggggaatggtggatctaatccagaacccagaggtgatgaccaaggtaagggaagagcttaccaatgttctcggggacaagctggtgatggacgaatccgacattgcccgcctcccctaccttcaagctgtcgtcaaggagacccttcgtctccgaacggtggtacccttggtaccccgcaaggctgaggtcgacatcgaggtgaacggctataggatccccaaggggaccaacgtgatcctcaacgcgtgggcgatcaaccggagtgccgacgcgtggtcggagccggacaagttcataccagagaggttcctcggtggcgagactaggggatatctgggccaagacttcgaaatgatccccttcggcctcggccggcgcatctgccccgggatgccgcttgctcagaagctcatacccctcatcatcggcacgctactccatcggttcgagtgggagcttccggcggatgcaaaggagggtgggatagacatgacggagaagtgtggggtggtgttatctctagttaaccccctcaaagccatacccaaggaaatatgagttatattcggttaatttcatccagtaatccattgtttgtaagtgtcatagtacatgagatctttagggactagggaacctatcatactgaaataaatttaaataagcctgataactctttgtatccc

SEQ ID NO: 1019 - DNA, 751 bp, Oryza sativa
  ref <308>: DATABASE ACCESSION NUMBER: AK059090
  ref <309>: DATABASE ENTRY DATE: 2001-12-06
ccccacctgccctcctcgcgaaaaccctaaccctcctcctcctccgccgccgccgctctcccaagatccctcccgtcgtcgtcgctgtcggcccctcgggtctttctagcgcaggagacatggcggaagagactccagttgaggccccacctgccccggttcttggagagccgatggacctgatgactgctctgcagcttgtgatgaagaagtcaagcgctcatgatgggctcgtgaaggggctccgtgaggcggccaaggccattgagaagcatgccgctcagctttgcgtgcttgctgaggactgtgaccagcctgattatgtcaagttggtcaaggcactctgcgctgagcacaatgttcacctcgttaccgtgcctagtgctaaaactcttggcgagtgggcagggctttgcaagattgattctgagggcaaggcgaggaaggtcgtaggctgctcctgcgtcgttgtcaaggacttcggtgaagagtcagagggcctcaacatagtccaggactatgtcaagtcccactagatatagcgttcccgatatccagaacttgtgcttgacattgtgtactttcctttatattttgcttggttctgtggcttgctaggagataagaaaatttttgtggtgtgagccaaggggatatgagcaatttggacctctgaactttatgtttactgtgctggatcagctgtttatttatctgaaatcatcatgagctgaggatctgtttgcccctt

SEQ ID NO: 1020 - DNA, 1225 bp, Oryza sativa
  ref <308>: DATABASE ACCESSION NUMBER: AK059091
  ref <309>: DATABASE ENTRY DATE: 2001-12-06
aagaaaatgtacttgatgaagaggagaatgaaggagttgataaagtctcaaaatccgccaaattttgtgatggctggcttgcaagtttgcagtatactgcagaaatgcatcttacgatgtcctccgaaagtttgcaagagatctttggcacatattcagcgattgaagcactcaagaaatttgcaaggctagaatgtcctgaagatgatctcgacagcccctgtgaaaaacatgaaagatagattttctcagtttgagagattttgacagaaaaccatatgtttgtgcctgagctaaaacctgtactttgaagaggaaaaagatataactgaaactggcacaaactgtatagttctgaaaattgatccatccaaggtgcaaggcatgtacctgggtagaaacacgaggggatacacctaggtgttgatcaaatgctgccctgtagagggaaagcaaatgcagttccttgcgaacaacttcctcctcaagggctgctatctcccaaactaagtctgcaatagactgcaggaaccacaagataagaagatgaatggctagctcttggtgtttctgcacaacaaatggttgtttccatgaacacctctgatgctgcgtcttccatggattcctagaccttcagtcaccaagaacctaccaccaatcaagagcaagaaagtattgcaatcctattcagttctccatagctagctgaagagaaggagaagaataatccaattaccgaaactaatgaacttaccaggctgatatatcatgagctgttgctatgcagtgtagctagcaatgggcagaacagaagaagaaggccatgattcagcttggtctggatgatgagaaatcttcactctctctcccaactccaatcccccagcttctacagaactcagcaaagggtctgaagaacagaaggaaatgcaaattctccttggtactagagtagagacaagaataatgaagaacagcagaaatgatgggcaggagatgtcctggactcctggttgccagtactacttctccaacctatgctgatagataataatggccaggaagctgatatttaagactggatgagaagagtaggattaatagcaagaagaggtggtgacccacaaggccaaagaagcaaaggaaagcaaatgaaacctgcatgaagatatggtcaggaaaaggatgaccaaagaaagcagagtttaaaaggaagcaaagc

SEQ ID NO: 1021 - DNA, 1051 bp, Oryza sativa
  ref <308>: DATABASE ACCESSION NUMBER: AK059092
  ref <309>: DATABASE ENTRY DATE: 2001-12-06
taaaattaaatctggtccttacaaggggtaccgtggccgtgttaaagaggtgactggcgtgcttgtgcgtgtggagcttgattcgttaatgaagattgtgacagttaaaagagatgatattgctgatacacctactgttgcaacaccattccgtgaacctcgttatccgttgggtggtgaaactccaatgcacccatctcgaacaccgcttcatccttaccagacaccaatgcgggaccctggagcaaccccaatacacgatggcatgcggactcctatgcgtcgtggctgggctcctatgagtcctccgagggataactgggaagaaggaaatcctgctacttggggaagcagtccagcttaccagccaggaactccaccagctcggccatatgaagcacccacacctggatcagggtgggcaaatacgccaggagttagctataatgacgctccaactcccagggagagcaactacggaaatgctccaagcccatatgtgccttccactcctgtaggtcaaccaatgacaccgaattctgcctcgtaccttcctggtacacctggtggtcaaccgatgactccaggcaatgttggaatggacataatgtcgcctataataggtggtgaaggtgaaggtaactggctgttgccagatgttttggttaatgtgttgagggcaggcgatgatggtcctggtgtggtgagggaagttcttgcggatggatcttgtcgcgtcgcccttgggtcatcaggtaatggtgagatcgtgacggttcttccaaccgagctcgaggttattcggccaaagaagagcgacaagatcaagataatgaacggcaatttccgtggatactctggaaagctcataggtatagatggttccgacggcattgtgaagcttgatgacacatacgaagtcaagatcttagatatggtgattttggccaaactggcgagttgagatggatgtatattttgtacgagtccatcgtatagccaaatgtttgtaacagataccctttgtagtcaataaaacgttttgttattt

SEQ ID NO: 1022 - DNA, 1302 bp, Oryza sativa
  ref <308>: DATABASE ACCESSION NUMBER: AK059093
  ref <309>: DATABASE ENTRY DATE: 2001-12-06
gttatatgctgacaagcaagatgtgctggtccctgatatattttgggactacacaagtgcaaaggttctgacaatggagtggattgagggtgtaaagttaaaccagcaagcagctattgaaaaacaaggtttgaaggttctggatttggtgaacattggtattcagtgcagcttaaggcaactattggagtacggttactttcatgctgatcctcatcctggtaacatattggcaacacctgaagggaagcttgcctttcttgattttggtatgatgagtgagaccccagaggatgcaagagtagccatcataggccatgttgttcacatggtcaatagggactatgaagcgatggctcgtgattattatgctctcgattttttggaacctgatgtagatgtctccccaattgtccctgctcttaagagtttctttgatgatgctctgaactcaacagtaagtgagctaaacttcaaaaccatagttgatggcttaggcgctgttctctaccagtacccatttaatgtaccggcatactacgcattgatactgcgatcgctcactgtactggaaggtttagcactctatgctgatcccaattttaaggtgctcgctgcctcgtacccttactttgcgaaaaggctactcactgatcccaatccatatctcagagatgctttaattgagctactattcaaggatggaaaattcagatggaataggcttgaaaatcttcttgttcaagggagccaagatagagagtttgcagcaaaagatgctttgcaaccagttctaaagcttctacttggtcctgatggggaggaattgcgagtcctagttgtgaaagaagcggttcgtgtcacagaagccatcacttttggaacgctgattgattcgtataatgcagctccagaatttcttaaaccattaatatccagtggtaatccagccggaccgttcaagataagcgacactgaaagggaacaaatgattgagctgcgggacagggttttcagaatatggggccttctgagatcctcggatggctttgacccaaccatcttgcaaccaattgtgcaggtgctacaagagccagaggcccgcgttcttggctcccgggttgcaggaggtgttacgcagcgcctcgcggcccgcctgttgcagcagctgctgagaactccacctgctccaggatctccttagcagataagacatgtaaattcacacggtactttccacaggaaagagaaaaggaaatgtaattcggaaatcaagtataaagttgatttcttcattcatgc

SEQ ID NO: 1023 - DNA, 1041 bp, Oryza sativa
  ref <308>: DATABASE ACCESSION NUMBER: AK059094
  ref <309>: DATABASE ENTRY DATE: 2001-12-06
tttaaaagctaagcaagcaacagccagactcgaagatgaaatgaatgaagctgaggatgaaaaggcgcaagtgaccataaagttcaagaaaaacataaaatggactattcattatgaatcaacaggtttaaattttgaggttcactacgctttgcaagagcaacctcatattctgttagcccagattgctcagagaacagctaggtctgtttttgtcaaggcctgtaagaatattgatcgatgtgaagtgaataaaccaaagaagatagataataatacgataaatactcccatcactctacaaacagcaggggtgaactttgaagtattccataagttagtggactatctcgatatcaatgaggtcagatccaatgatatacacgctatgttgaacacatatggggtagaggctgcaagggcaaccatcattggggaagtgaagggcgtattcggtgcttatggtatccatgttgacatgaggcatctgaacttgattgcggatttcatgaccttcgacggcggttaccgaccgatgagcaggctagggatgggccagttcagcacctcgccatttggtaagatgacttttgagacggcaaccaagtttattgtggaagcagcttctcatggagagtctgacacactggacggcccttcggcaagcgtctgtctggggaaacctgttaaggtggggacgggttcctttggcttgctgcagaatttttccctggagcaacctgttgcgatgtaagcatacatgtagcatcatcagcctgtttgctttactggattagtccaattttgatggaggctgccatagagcagtaggaatgtgttacatatacggtactttttgctagcaagtgcagcaagttatgtcagttctcagttgtgtttgtgtagcaggaaacgaacatgtgaacactgatactccctttggtagtagtatggacattagtctctgtgtagactgtgtggagtatcaggctggcagcagcagtagcagcatgatcttggtttctttgccattttagatgc

SEQ ID NO: 1024 - DNA, 1312 bp, Oryza sativa
  ref <308>: DATABASE ACCESSION NUMBER: AK059095
  ref <309>: DATABASE ENTRY DATE: 2001-12-06
acagacccaggatctcttctttttccatcaacttagtccaggaagctgcttcttccttccacatggtgctataatatacaacaaattgatggattttttgcgacagcaatacagagatagaggatatcaagaggttttgagcccaaatatttacaatatgcaactctgggaaacctctggacatgctgcaaactacaaggagaatatgtttgtttttgagattgagaaacaggaatttggtctcaagccaatgaattgtcctggccattgcctaatgtttgagcacagggttcgttcatacagagaattgcctctccggatggctgattttggagtccttcacaggaatgagcttagtggtgcacttacaggtttgacacgtgttagaagattccagcaggatgatgcccatatttttttgcagagaaagccaaatcaaggacgaagttaaggctgttttggacttcatcaattatgtttacgagatatttggatttaaatatgaattggagctatcaacgagaccagaaaagtacttaggtgatattgaaacctggaacaaagcagagcaacagctgacagaagccttaaatgagtttggaaagccatggcagatcaatgaaggtgatggtgccttctatggtccaaaaattgatattggtgtgtttgatgccctcaagaggaaatttcagtgtgcaactctacagctcgattttcagctgcccctacgcttcaagctgacttactctgcagaggatgaagccaaacttgagaggcctgtgatgattcacagggcaatcctaggttctgttgaaaggatgtttgctattcttttggagcattacaatggtaaatggcccttgtggttgagtcctcgccaagccattgtttgctccatatctccaattcagtggaatacgctaaacaggtccgtgctaggatacatgaagctggttttcatgtagccatcgatgagacagacaggacaatacagaagaaggtacgggaggctcaattagcccaattcaactacattcttgtcgttggtgcacaagaagcagagactggacaggtcagcgtcagggtaagggacaaagctgaactagccacagtgagcattgatgacatcatcacacgttttaaggaggaagtagcagcttacaaatgattttgatttcacacccttttgctaagaatttactccaaatttgtgattttgatggtgtagcgggcagtgtaatcttgctattttatttcttgacaaaagtacatctgattgtcttttcttaataacgaaagtgtgctattcttc

SEQ ID NO: 1025 - DNA, 576 bp, Oryza sativa
  ref <308>: DATABASE ACCESSION NUMBER: AK059096
  ref <309>: DATABASE ENTRY DATE: 2001-12-06
gtccctctcacttcgcttctcttgtcccctcccccatctctgcgatccaaaggcggcggcggcggcgagctcggtggcatggcgatgcggctggcggcggcggcggcgttcgtgcgacgcctcgtgccggcgcgaaatccggtgatctcggcggaggcggaggcggtgacctgcgggcgcggggacaagaagaccaagcgcgggaagcggttcaagggctcctacggcaacgcgcggccgaagcgggagaagaagatcgagcgcatcaaggaccgcgtcgaggtgccccgctccaccccgtggccgctccccttcaagctcatctgagccaaagcccagcgcgagctcccccccgtcggttcgtgaggctacctagggttttcctttccctttttcgatttggtactcttgtccaactcttgcgcctgcgcccacgcttgcgtgggcacgcatcgtttttttagttcctcatattgggctgtgtcagatatgtattgtcgaatcaagctgccatatcgcaacattgtagaatgcagtccatatggacgaaaatatcatcaccgtgtttgtttgtcc

SEQ ID NO: 1026 - DNA, 1421 bp, Oryza sativa
  ref <308>: DATABASE ACCESSION NUMBER: AK059097
  ref <309>: DATABASE ENTRY DATE: 2001-12-06
ccaaacacgccgcaaagcgaagaagcgatcgcacgttcgcacgcagacgcagccgcggcggatcaatggcgatgctgacggccaagctcacctccccccccgccgccaccacctggctccccggcggcggccgccgatccgcgccgccccgccgtgctacggtgatccgcgccgccgccgtctcctacgccgacgagctcgtctccaccgcgaaatctgttgcttccccagggcgtggtatcctggcaattgatgagtcgaatgccacatgcggaaagagattagcatccattggtttggacaacacagaagttaaccgccaggcttacaggcagcttttactgaccactgctggtcttggtgaatatatttctggtgctatcctttttgaggaaactctttatcagtcaaccactgatggtaagaagtttgttgactgcttgaaggatcagaatatcatgcccggtatcaaggtcgacaagggcttggttccattgcctgggtccaacaatgaatcttggtgccaaggcctagatggtttggcttcaaggtgtgctgagtactacaagcagggggcacgcttcgctaagtggcggactgttgttagcatcccttgtggtccctcagcattagcagtcaaggaagcggcatggggacttgctcgatatgctgccattgctcaggacaatggcttagtgccaattgttgagccagagatccttcttgatggtgaccatgcgatcgagagaactcttgaagtggcagagaaagtgtggtctgaggtattcttctacctggcccaaaacaatgttctttttgagggtatcctgctgaaacccagcatggtgacccctggagctgaacacaagcagaaggccactccagaagccattgcgaagcacacccttacaatgctgaggaggagagtgccgcctgctgtccctggaatcatgttcctttctggtgggcaatctgaggtggaggcaaccctgaacctgaacgcgatgaaccaagaaccaaacccatggcatgtgtccttctcatacgcccgggctctccagaactcggtgctgaagacatggcaggggcgccccgagaacgtggaggcagcgcagaaggcactgctggtccgtgccaaggcgaactcgctggctcagctcggtcgctacaccggcgagggcgagagcgatgaggccaagaagggaatgttccagaagggctacacttactgatgcggcagaagagacttccgtgatatacaacatgccatttcgtgtcactgttttttgaacaccggagtgaataatcaccagagtatgtttggtgccaccgattgttgttagcttcgttagcacgggagaaaccttagagagctgtatctgactctgaaacacactattttgatagcacgcttttactgt

SEQ ID NO: 1027 - DNA, 531 bp, Oryza sativa
  ref <308>: DATABASE ACCESSION NUMBER: AK059098
  ref <309>: DATABASE ENTRY DATE: 2001-12-06
atctaaaccaaaaaaatccccaaatctcaaatcctcctccgtctccaagctctcgtcgtcgtcgtcagacatgtcgggccgtggcaagggaggcaaggggctgggcaagggaggcgcgaagaggcacaggaaggtgctgcgcgacaacatccaggggatcacgaagcccgcgatccggaggctggcgaggaggggcggcgtgaagcgcatctccgggctgatctacgaggagacccgcggcgtgctcaagatcttcctcgagaacgtcatccgcgacgccgtcacctacaccgagcacgcccgccgcaagaccgtcaccgccatggacgtcgtctacgcgctcaagcgccagggccgcaccctctacggcttcggcggctgattccttccttccttccttcctggtggcgtgcgggtggtggtggtggtgtaggagctagggtttcgatgggattcggggggaatttctgctttgtgttggcttctgtgtagcgactcttctgtttaaatgaattcgatgaatctgaactg

SEQ ID NO: 1028 - DNA, 1256 bp, Oryza sativa
  ref <308>: DATABASE ACCESSION NUMBER: AK059099
  ref <309>: DATABASE ENTRY DATE: 2001-12-06
acctcacactcccaccaccgtcacgtcgcccctctgctctctgcactgctgcggcgaggagctagctcgagccggccggaagccatggccacggcggagcagcggcagatcgagcacgtccacctccccgtgcgggggctcaccctccacgtcgcgcaagccggcaaaggggagctcgggacggtggtgttcctgcacgggttcccggagatatggtactcgtggcgccaccagatgctcgccgtcgccgccgcagggtaccgcgccgtcgcgccggactggcgtgggtacgggctctccgaccagccgccggagccggaggcggcggtgtacgacgacctcatcgaggatctcctcgccatcctcgacgccctcgccgtgcccaaggcattccttgttggaaaggattttggggcaatgccagcttacgactttgctctccgtcacccaaaccgcacatgtggtgtgatgtgtctgggcatccccttaggcactgctggtttgtcctttgacacattgccagaaggattctacattttacgttgggcgcaaccaggaagagcagaagctgactttggcaagtatgatgtaaagagagttgtgcgcaccatctacatactattctctaggagcgagatccccatagctaaggaaaatcaagagatcatggatcttgcagacttatcgacaccccttcccgagtggtttagtgaggaggatcttgatgtctactcatccctctatgagaattctggttttagatatccgctacagatgccatataggtctctgcaccagagaaaaccaattggagatgcaaaattccaagtcccagtgtttattgtcatgggagaaaaagattatgtctttaagttccctggtatcgagtctgctatgaaagacggaactatggagaagcatgcaccaaacataaagatcacctacatccctgaaggagggcattttgtgcaggagcagttccgtgactatgtgaatgagctccttcttggcttcttgaaagatcatcctgtggttatataaatgctattgtagcctcagttgtgcttcacccgtagttcaagttggcttagaaaacgttgtgctatatcatggtatgaatttgtcaacaaactaaggatcagctatggctagtttgttactttcagtaatgcctatttgagcttgttgtatctaggttgtcctgctggtgttactagcaatgtaaagactaaacccattgctatacttctaccatg

SEQ ID NO: 1029 - DNA, 2030 bp, Oryza sativa
  ref <308>: DATABASE ACCESSION NUMBER: AK104043
  ref <309>: DATABASE ENTRY DATE: 2002-08-28
cgaatggctgatgctctggttattgcccatgctggtggttctgctctatgggaaagcacaagaaaccagtatcttaagaatactgtatcaccctatctaaaggttgtttctgctatggttggcaatgatttgatgagttttgtgagtacatggccattgaatgcttggaaggaaacacttgcgctactgtgcacatttgccaggaaagaggaatggaatgttctatgcgatacccttgcatctagactgttgggagttggagatacactagctgcgactctctgttatatttgtgctggaaatatcgacaaagctgtggaaatatggtctcgcgacttgaagtctgaagatggtgggaagacttatgttgatcttctccaggatttgatggagaagaccattactcttgcccttgctacagggcataagagctttagcgcgtcactgtctaagcttgtggaaaactatgcagaactcttggccagtcaaggccttcttaaaactgcaatggaatacttaaaattgttgggatcagatgaacattcacacgagctggcaatattgagagaccggattgcattttctacagaagagaatcatgctgccagtacttcagttcatgcgggcagtattaacagttccgcgtaccctacaattcaaccgagctatagcaccccagacccttctcagaacctttaccaggggacttcacaatatgctgtgccaagtaaccagtatcaagattaccagcaacaatctaatacagcatatggaacatacaacagtacatattctcaacaaccaacccagatgtttgttccatcaaacaccactccagtgatctcccagccaaatgcaactccagcaccagttccacaacaaccagtgaaggcatttactcctaccaacttgccaggtctaaaaaatcctgagcaataccagcaaccaactttgggctcccagctttatgcgggtgctaatccaccatatacttctggacaatcgactccatatcaaggtgtacctcccaccacataccatcagcctagaccacctacacaattccaaacagttcccacagcacctccagctgtttctagtgccactgtaccaggaacgaccccaagtcagatgttccctggtccagttgctaataacccgacttccaggtttatgccatcaaacaatccaggttttgttcaaaggccaggtttgagtcctgtacagccctcaagtccaacacaggcacaaggacaaccgcagcctgttgttgcacctcctgcacctcccgcaactgtgcagacagctgacacatcgaaggtgtctgctgagctgaaaccagttattgctacattgactagactatttgatgaaacatctaaagctatgggtggatcacaagttaaaaaacgtgaaatcgaagacaactcaagaaagatcggaacactatttgcaaaactcaattctggggatatatctccaaacgtttcatcaaaactcattcagctttgcagtgcacttgatagcggtgattttgccactgcgatgcaccttcaggtacttctgacaacgagcgactgggacgagtgcaacttctggcttgccgcattgaagcgtatgatcaagacgaggcagaatttcagaatgtaaacgagtgccgcgttttgcagctagttctgtatacacacaccttttcgacttcttacaaaagttgttagtgttagcaacttatgagggtttgtctgcacagtagtgctatcttgcttcttgtgttccctcctgccaattatactgaagcttgtcgcttaaaagtggtctgttgtctgggcgattactttttgatagttcttcgacattcctttgtgaggatcagttcttgggtgatggtggttggatttcacgaggattacttgtaagtgggcatctagttgttatagctggcccattttgttttaccttataagttagattttacctgtttggacattggaagtactctcgataattaatacaaggatattggcttgttt

SEQ ID NO: 1030 - DNA, 1601 bp, Oryza sativa
  ref <308>: DATABASE ACCESSION NUMBER: AK059100
  ref <309>: DATABASE ENTRY DATE: 2001-12-06
ttgttaccaccgagttactgttcttggaagcagctctagtaatggcggtggtggttggcatgtcaacctccggcctgcggtgcatgctcccgttgttaccgggggtcccctgctgattaacctctctgattgtcgttgcgcgcgtgcgtacgtaggcgagacgggcactgaaggcgttgcgagggttggtgaagctgcaggccctcgtccgcggcaacatcgtgcggcggcaggcggcggagacgctccggtgcatgcacgctctcgtccgagtccagaggcgggcgcgcgcgtgtcgcgctatccgctcccagcatgtctcggcccatcccgtaagtaaaaattctgtatgattcctgtattttcacctgtagatacttcagattaaaaaaaatgttatgtcacaattctgtatttttcaattttaatgtcgttgacgtcttctcatgatggttcttggtggtggttgggcattgcaggggccaccgacgccggagaagtacgaccaggcgactcacgagggcgtgcctaagcacggccgttctggttctctgaaggtattgctccgtttgtttgttcagatttttatgtgtagtacattgcgacagccttggagattaatggcatggcgatttgtgttgcaggggagctcgtcgaagacgccgggaagtgagagactgacccgggagaggtcagaatcttgcgggaggaactggcttgacaagtgggtggaggaacggtatttggatgacgagaagaacgccaagattctcgaggtggacaccggcaagcctgggcggcacgcctcacggaggcgcagcggcagccatcaccaccactcgtcatgctcgtccatgacatccgagcagaagagccggagctacgcgaccatgccggagtctccgtccaaggactccacgaccgcgcagcagtccgtgcccagcccgccgtcggtgggcatggccgaggcgctcagcccgctgctcatggccgtcgacatcgccgagctctgcgacagcccgcagttcttctcggcgacgtcgcggccggggagctcgcggagcagggcgttcacgccgaccaagagcgagtgctcgcgcagcctgttcggcggctactccgactacccgaactacatggcgaacaccgagtcgttccgcgccaaggcacgctcccagagcgcgccgaagcagaggccgcagtacgagaagtccagctccctccggaaggcgtcggcgcacgcgttcggacccggatcgtgcgcgccggtggcacagaggacaacggcctccttgcatagcaagttcaccaacaaggcctaccctggatcgggcaggttggatcggctaggcatgcccgtcaagtactgatcatatgccggattctcgcgatcaaccgggacaagtgaatgaaagcgacaagtgtgtcaaactgtgtttagcaaggaccgagtgaatttagcaattggtcgttgttaggcttgagctttttatgggtgctgttaccgtcacagattttctttcttgtttttaactagttatgaagtgtaagttgctggtagctgtttggtgaagtatctatgcgtccttaaccttcctgac

SEQ ID NO: 1031 - DNA, 644 bp, Oryza sativa
  ref <308>: DATABASE ACCESSION NUMBER: AK059101
  ref <309>: DATABASE ENTRY DATE: 2001-12-06
aactacacggggacgccgccgaacaacaccaacgtgaagaccgggaccaagctgctggtgctgcggtacaacacgtcggtggagctggtgatgcaggacaccagcatcctgggcatcgagagccacccgctgcacctgcacggcttcaacttcttcgtgatcggccaagggttcggcaactacgacgccgtgaacgacccggccaagttcaacctcgtcgaccccgtcgagcgcaacaccgtcggcgtgccggccggcggatgggtggccatccgtttcctcgctgacaacccaggtgtatggttcatgcactgtcatttggaggcgcacacgacgtggggcctgaggatggcatggctagtgttggatgggagccatccgaaccagaagctgcttcctccgccgtccgatctgcccaaatgctagtcgggaccttaccacagatgccgttgattcttctttcctcatttcatttgttcgccaatttgcgattgctttctcctgaaggagattttagtgtgttagcccgttcttagctaacttttgtgacattattttgttcttttttcttttatttgtgtacaactatacaatgacactgttttgatgcttctttgaataaaaaaatgggcattaattgcatg

SEQ ID NO: 1032 - DNA, 1212 bp, Oryza sativa
  ref <308>: DATABASE ACCESSION NUMBER: AK059102
  ref <309>: DATABASE ENTRY DATE: 2001-12-06
cgtcgtcggccgtttcggaggctaccaacgcgctgccgaggacggagcccgtggtttcggccgagtggctgcacgccaacctcaaggaccccgatgtgaaggtacttgatgcctcttggtatatgcctgccgaacaaaggaatcctcttcaggagtaccaggtggctcatattcctggggcgctattctttgatgttgatggaatatcagacagaacatcaagcttgccgcacatgctgccatctgaaaaggcattttctgctgctgtatcttcgcttggaatatacaacaaagatgggatagtagtttatgatggaaagggactatttagcgctgctcgtgtttggtggatgcttcgtgttttcggacatgataaagtttgggtgttggatggtggtttgccccaatggcgtgcttctgggtatgatgttgaatcaagtgcctctagtgatgccatcttaaaagccagtgctgctcgtgaagcaattgagaaagtttatcaggggcagttggttggtccctccacatttgaagcaaagttgcagcctcatcttatttggaatcttgaccaggtaaaagagaacattgatgccaagacacatcaacttatagatgctcgaggaaagcctagatttgatggtgcagttccagagccacggaaaggaataagaagtgggcatgtgcctgggagcaaatgtgttcctttccctcagttgcttgacagttcgcaaaagctattacctccagaagagctccgtaaacgatttgaacaagaaggtatatcgcttgatcaacccctggtgtcctcatgtggtactggtgtgacagcatgtatattagctctgggcctccaccgccttggcaaaaccgacgttcctgtatatgatggatcatggactgaatggggagcccatcctgacactccagttgccactgctgcttaattagtaccagttacaatctattggagaactcttgattatacttcccccgtaccgtgaatggtccaatggaaggaagaaagcaaaggagattggagaggtcggctgggcgtaggttggggggaagggacgccattagaccggccttttcgttgtaaatggttttgaaaatagacatacactgtgaattattatgagctgttgatctacctttctgaagtcccttttatatgatggcttggggcaataataaatgagaacactaattatt

SEQ ID NO: 1033 - DNA, 1448 bp, Oryza sativa
  ref <308>: DATABASE ACCESSION NUMBER: AK059103
  ref <309>: DATABASE ENTRY DATE: 2001-12-06
tgaaggcagaattgaggaccatttatggtcagctatgccaagatgacatgcctatggtccgaagggcagctgcatcaaatcttggaaagtttgcagccacagttgaacagaactatctaaagacagaagtcatgtcgatatttgatgatctaacccaagatgatcaagattccgtacgcttgttggcagttgaaggctgtgctgctcttgggaaattgttggaaccacaagattgtgtagcacatatccttccagttattgtcaatttctcccaggacaaatcatggcgagttcgttatatggttgccaatcaattgtatgagctctgcgaggcagttggtcctgaacattctagggagcagttggtgccggcatatgttcgtctccttcgtgacaatgaggcggaagtgcggatagcggctgcagggaaagttactaagttctgtaggattttaagtcctcagcttgcaattcagcatattcttccttgtgtcaaggaattgtcatcagattcatctcagcatgttcgttcagctttggcttcagttattatgggaatggccccggtcttgggaaaggaggctacaatcgaacaacttcttcctattttcctttctttgctcaaggatgaatttcctgatgttcggctcaatataatcagcaagctcgatcaagttaatcaggttattggaattgatttgctgtcacaatcactgttaccggcgatcgtagaacttgcagaggataggcactggagggttcggcttgcaataattgagtacattcctttattggctagtcaattaggcgttggatttttcgatgacaagctgggggcactttgcatgcaatggttggaagataaggtcttctcaatcagagatgctgctgcaaacaacttgaagcgcctagctgaggagtttggtccagaatgggcgatgcagcatataatccctcaggtgctggagaagataaacaacccgcattatctctaccgcatgaccatcctgcaagctatttcattgctggcccctgtcatgggtgccgaaatcacttgtcaacagctgctccctgttgtggttaattcctcaaaggacagagtgccaaacatcaaattcaatgttgcgaaggttctgcaggcacttataccgatccttgatcaatctgttgtggagaagaacgtgaaaccatgcctcgttgaactcagtgaggaccctgatgtggatgtaagatactatgcaaaccaggcccttcaggcatgcgatcaaatcatgatgtcaagctaactgtcttcctgtccagtatttagaacttgattctcttagtccaaattttggaatatttgtaatttgcactttagtttgaagagttcctttctagccccagtaacagaccaaacacttcccaagatgataatgtatggctccgacccctcgttctctgtgttt

SEQ ID NO: 1034 - DNA, 678 bp, Oryza sativa
  ref <308>: DATABASE ACCESSION NUMBER: AK059104
  ref <309>: DATABASE ENTRY DATE: 2001-12-06
ggacgggacgaactgcagatcgagtcgcatcgcgggcgagagagagagagagagagagagagagagagagagagagagaagacccggacgcggcggcgcacggcggcagccggagaagagcggggcgtggcggcaggcagcagctcgcgggcgtctcctccagtcttgctaacctcgccgcatggggatcggccacgtgctcggcgtcctcggcggcgccctcctcgcccacgccgcctacgccaccatccagtatcgcgccgtgctgaagatcacggaggaggagttctcgagtccgcctatggatgtgatgatgcaattgctcctggggttggccttatgcatgtgggcaggtcttgctgttccagcgaagttcctttcagtgctccctcactctgaggagaataggattgtttcactcccggctaacctggacttcatgatcttcaaccaccgcggaagggcgctaccttcagacccagacttgaagctgaagacatgattgaacatttacagtttctgttatttaccacagtaggatgatccatccagttattttttttgtgtcactcattgttgagggggagaaacatttccaagaacttaacgtctactatgtgtaactcaagtttttgtgtcacctgaattctatatctgtataccactcaatcttgtgcc

SEQ ID NO: 1035 - DNA, 1485 bp, Oryza sativa
  ref <308>: DATABASE ACCESSION NUMBER: AK059105
  ref <309>: DATABASE ENTRY DATE: 2001-12-06
tatctttacggcaatgttggaagtggaaagacaatgctgatggacatgttctatggggccacagaaggtcttatcaagcacaggaggagattccactttcacgaggctatgcttgaaatacatgatcatatgcatgatgtatggaagagacgtgatgaggacaagtctattgagtcgagtgctttcagttggatatcaagcctcccttttgatgggaaaattaaggagtggctaattggggaagagaagtacaaacaaaatacacaacaaaaccatatccttttagctgtcgctgacaaatttcttgttgatagacaagcaaataagagtggagcaagcattctatgctttgacgagatacagacaatcgatgtatttgccgttgtagctctgtctggtattctcagcagattgttaagcacaggaactgtgcttgtttcgaccagtaataaagcacctgaagatctgaatcaggatgggatgcagcgggaaattttccttgacttattgtctaagttggacgagaactgcaacaaaattcttgttggaaccgaaacagattatcgccgcctaattccaactgacggcttaactcagattcactacttttggcctctcacttctgacattcggagtatgtatgaggctatgtggcacgatataactagacaaacaggaggaaacattatttctgtcaccattccagtaatgtttgggaggtatcttgagattcctaaaagttgcaatggagtggcaaggtttgacttcgagtatctgtgtggccgcccagttggagctgcagactatatagcaatagccaggaactaccatacaattttcatatcggatattccagctatgagtatgaagattcgtgacaaagcaagaagatttatcacccttattgatgagctctacaatcatcactgccgtcttgtatgtctagctgcctcatccattgatgatctttttcaaggaactgatgaaggacctctttttgacttggagagttttcagttcgaaggtgaagctgaaggggcaaagcttaggagggatgttttagcagaaggtaatgttggtgcagcgccttctcctacaggcctagtggcaattttgtctggccaagaagagatgtttgcattccgtagggcgatatcccgtctcatagaaatgcagacctcactgtatctggagcgcgtcgagcgtgtgcactcatccctccaacagcagagttcggttcttacaaagagcagcactgtttcgcagtctgctccgtccgtttgacagacgagacccttatagtaccattatttcatttcttatcgtggaaaaaattgtcgaaagcactaataagattggagaacctacttgccgtctgtacaatgcactgaaccgtacaaaacataagtgattcgagcaattgcgtcgcacatattcttatgacttcctaattcctatccaattatgctcaaggtttttttgttg

SEQ ID NO: 1036 - DNA, 779 bp, Oryza sativa
  ref <308>: DATABASE ACCESSION NUMBER: AK059106
  ref <309>: DATABASE ENTRY DATE: 2001-12-06
ggaagcactgacagccctccggaaaagagccaagacaaccaaaactagtgttccgaccccctttgaaatcataatgaaagggttggaaggaacctctggcaagcagctggtaaaggagatatgcccaacatgtggagatcatgaccccaaggaagatacatggttaatgtttccaggatcagatatctttgctcgtgttccatttcatgtggcccacactgttctagacaaagatcaagaacgactagactatgacaccaagaagctacagagctttgtgaaggagaaatcgtttgtgatatcagagaaaggtgcccttgcagacagaatcagccccggcatcgtgaaatccctcgtcagccttacagataaacccaagtaggcacaagagagaaggtatcagagcatgtctgtctgctccactcggcaagaaagctgtgcatccactgaaacgaagcatccgttgggctcacctgtaacctgttgtgctatcgactgcgatgttgttttttgcttggaacatgtggccctgtttttccgtgctgtcattctgtgacattagctaggctgctgttgattagtttttaggcaacctctaatcctatattgttatgaattgtatgactaggttaggctatatgacagtacttcatttcaggcgcagttttcatagggaagtctgcttctgcatgtgctagtcgttgatctgaaaattcaggtcttacaaaagtttgaccagatgataatacccggggttttttttaaacctttgacaccgc

SEQ ID NO: 1037 - DNA, 925 bp, Oryza sativa
  ref <308>: DATABASE ACCESSION NUMBER: AK059107
  ref <309>: DATABASE ENTRY DATE: 2001-12-06
agccggagatgaaactaaagacaaaccatcgaaaggacccaagcagcatcttcaaatgataggagtccagttattaaaggatctagaaaagacatctgtttcatcaaagaagtcaaaaagggtacctgagattgatgatgatgaagattggtttcctgaagacccaattgaagcttttaaggttatgcgtgagacaaggttgttcgatgtgtcagatatgtatactactgcagatgcttggggatggacatgggaaagagagataaagaataagatgccacgcaagtggtcacaagaatgggaggttgagttggctatcaagataatgcataaggtgatagatcttggtggtaccccaacgattggagattgtgccattatattgcgggctgcaatgagagtgccgctcccgtctgcatttatgacaatattgcaaacaacgcatagccttggctacaaatttggaagccctctgtacgacgaggcgatcttgctgtgccttgatctggaggagatcgacgcggccattgcggtggtagcagaaatggagacaaatggaatcaaggtacccgacgagaccttggacaaggtgctcgcagctaaacaatctggtggaaactctgcgctccaaccgccacctgcagaggagtaatctgattggaacaagaagcccctttgtagccatgatctagcacaccacatagaatcatcagctccatgccatggatcatttgtcttgagctcgccagatcaacctttggcagtgatgtgagatcactgctctgatgataatctgtcaaggtggagaaagatgatcttatgctttgcccttgttggccttccactccacactcgatgtatttacagacaaccaattttgatactcctagatgaaatggaattgaaactgcttggaagttggaac

SEQ ID NO: 1038 - DNA, 1147 bp, Oryza sativa
  ref <308>: DATABASE ACCESSION NUMBER: AK059108
  ref <309>: DATABASE ENTRY DATE: 2001-12-06
agtcgtcgacccccgcgtcccccttcctctgctgggttcgcccgcacgcccgcccgcaccgccgcacgccgccggtcgcccctcctccccgccgacgctgagcaccgccggtccccgtcccgctaggcagcggcgccgccgtcctccgaccgagcccctcgccggttcctgctcctattgctcaagccattaggttgcatcgaaacagtatgagctctcatgattttgcaagaagggttccgaagaggcggcggactaacaagttgctttcgcaacttcttccggacctgaactcactcccagctgaaggagctgatgatgggggatcaccttccagtagtgtgctcgtctcacacgcccagacttctgctgtagctgtggctggaacctcgcagtatttggtgccagcagttgttgcggggccgcacattggaatgagtagttgtcccattatcgtggatgatatcaatgatgatgttgtgatttattctgcaagctcgttccctcaagtgaggcagcaggctccaaggacagaacctgttgtgaccatagaagatgattctgaaactacccctggacaagcaggggatgcagttgatgagcatgtggatatactactatctctgactctgggcaggtatcctaggcatggtcatcagagatcctccaacatcagcaccagccctgtgatacatataattgacacacctagcaatgcactccctgaacccgagaaggccgttccgaaggaaccaactttcaattgccctgtctgcatgaacgagctggtcgaaccgtcatcgaccatctgcggtcacattttttgcaagcagtgtatcaaggcctcaatccaggctcagaagaagtgccctacctgccggaggaagctgaccatgaacaacttccaccgcgtgtatctcccttctgcggagtaagccggtttccaccattctggaaatcagcgtccctcctcccaccctgactctcgccacattggcgttctgatgattgtatctgaaaatgtttgacaggcttgctagcataccgttttgctggagcagttttaacaggtgttgtactgttgttggatccgttaaaagaatacgattgtatgtcctgtggaaatgatccatgctattaaaggtct

SEQ ID NO: 1039 - DNA, 1389 bp, Oryza sativa
  ref <308>: DATABASE ACCESSION NUMBER: AK059109
  ref <309>: DATABASE ENTRY DATE: 2001-12-06
caaaaaatcctaattttgtacggccatcacatcgcttgaatgaggtccaaggatgggttaaaagtggattaagggacttctctatttcccgtgcatctgtagagtggggtattccggtgccaaatgacaccaaacagacaatatacgtgtggtttgatgcattattagggtacatttcagcattactagatgatggggagaaggcaagtttacaacaagcagttgaacgtggttggcctgcctccctacacttgataggaaaggacatattgcggtttcatgcagtatattggccagcaatgttaatgtcagcaggaataagtgttcctgatgcagtttttggtcatggatttttgacaaaggatggcatgaagatgggaaaatcattaggcaacacacttgaaccaaaggatctggtaaacagatttggagtagactctgttaggtacttcttcttgcgggaagtggaatttggcaatgacggggactattcagaggaacgctttatcaatatagtcaatgcgcatcttgccaacaccattggaaacctcctcaatcgcacacttgggctgctaaagaagaattgtaaatccacattagcttttgactcgattgctgccgcagatggaatttcattaaaggataatgttgaaaacttggtggacaaggcaaaggatcagtttgaaaatcttttgctgtcatcagcatgtgaaactcttatggagattggtaacttaggaaacttgtacattgatgagcaagcaccatggtcttgtttcaagcaagggggtgagagtgctgaaaaggcagcgaaggatcttgttattattttggagactatgagaataattgcaattgcactatcaccgatcaccccaagcctttctttgaggatttatacacagcttggtttcacagaagaccaatttagaacattgagatggaaggataccaaatggggaggtctaaaggcaggtcaggtaatgatggagccaaagccagtttttgcaaggatagaaacagagacggacgagaaagatcaatcaagttcgaaggcaacaaaaggcgggaagaagaaggcaagaagtcaaggacttgtggaagcatgagtcaagtttgtgatggtgtacatagcataaaactacctgcgaccttgtcgcttggtgacaaagaaggcctgaagctttcttggggcgaattggtttctgcaattttgttctaacactggctttccaattccaagtagtacatactgatactgatagctgagttaattccccactcccgcaatgttttattccagtgaacgcagctattgcttctgtttgttattggaataatggagcatcctgagctcatccatctttatcgaatttagattaaatcttt

SEQ ID NO: 1040 - DNA, 305 bp, Oryza sativa
  ref <308>: DATABASE ACCESSION NUMBER: AK059110
  ref <309>: DATABASE ENTRY DATE: 2001-12-06
tagtgacgcgcatgaatggattaacgagattcccactgtccctgtctactatccagcgaaaccacagccaagggaacgggcttggcggaatcagcggggaaagaagaccctgttgagcttgactctagtccgactttgtgaaatgacttgagaggtgtagcttgtcgctcgtcagttcaggcatcttttgtgccaattgacgatcttattcttcaagagttggaaatcatcgaacaaattggaaatttctattcgaatcatcaatcagttatcatataagaataagttgcattttgcaccagcac

SEQ ID NO: 1041 - DNA, 1648 bp, Oryza sativa
  ref <308>: DATABASE ACCESSION NUMBER: AK059111
  ref <309>: DATABASE ENTRY DATE: 2001-12-06
aaaaccccacgcgaaacaaaacctccccacgccgcgagatctcgcagcaatggcggcgccgcgccaccaccacctcgccctcgccgtcgccctcgccctcctcgtcgtcaccgccgcggcggcggacgaggggggaccgcgggggaggcgggtgctggtgctcgtggacgacctggcggtgcggtcgtcgcactcggccttcttcgcgtcgctccaggggcgagggttcgatctcgacttccgcctcgccgacgaccccaagctctcactccaccgctacggccagtacctctacgacggcctcgtcctcttcgccccctccaccccgcgttttggaggatcagtggaccaaaattcaattctggaattcatcgatgctggtcatgatatgatcctggcagcagactcttcggcctctgatcttatccgaggcattgcaacagagtgtggggttgattttgatgaggatccagaggcaatggttattgatcacattaattatgctgccactgatgctgaaggtgatcatactttgattgctggtgatgacctcatccagtcagatgtgatactggggtcaaagaaaattgaggcccctgtattatttcggggtattggacatgcggttaatccatctaacagcttggtcctgaaagtcttatccgcctctccgtcagcatactcagcaaacccaaagtctaagttggcttcccctccatctctcacagggtcggctatatcactggtttctgttatgcaggcaagaaacaatgctcgggtcttgatatctggatcactcgatctgtttagcaacaggttcctaaaatctggtgttcagaaggccggtagcaagataaggcatgagaaagctggaaatgaacaatttgtgacagaaacaagcaaatgggtcttccatgagaggggccatctaaaggcagtgaatgtcaagcataacaaggttggggagacaaatgagcctggcatgtaccgcatcaatgatgacttggaatactctgttgagatctacgaatggtctgggaccagctggaagccgtatgttgctgatgatgttcaagttcagttttacatgatgagcccttatgttctgaagacactgtcgactgacaagaagggtgtattttcaacatccttcaaagttccagatgtttatggagttttccagttcaaagttgagtaccagaggcttggatatactggtctctctctttctaagcagattccagtgcgcccttacaggcataatgagtatgaaagattcataacttcggcatatccgtactatgctgcgtcgttttcaacaatgggagccttcttcatcttctcatttgtgtacctgtaccacaaatagataactcatgagagagcacgagttacctgaggctgatgtgtgctagatccatgcactgattgtgctgtaaacccagtgttgggggttccaagttcatagaaccatatttttgtagcgcaatctagagcacctttgacgaccactatcattgataacaagaaattgtactcctgctgctagaatcttccaaccatcccccttttctttcaatcttgcctgatgaagagctgttgaaactttcatagtcaatagaatcataacaacataagcaattcggtg

SEQ ID NO: 1042 - DNA, 640 bp, Oryza sativa
  ref <308>: DATABASE ACCESSION NUMBER: AK059112
  ref <309>: DATABASE ENTRY DATE: 2001-12-06
taacagagaggttagaggatgcacagaggcaactagaaacttcaaacaaggaacaagaagcattgattgacatcttctcagaagaaagaggtcgacgagacctagaagaggaaaatctgcgagggaagctaaaggatgcttcttctaccatacaagatttgctggagcaattaaacgctgcccgaaaaggtcgcaagttttgagaaaaaatagctattttgctaccaaaaattcactaaccggaagacctctagttttcagttacactgacgtgaaggattccagccattctagcttgtgtagggagaggctgtaggctattcccctatgtttagtgttgataggtagttccatcatctcacttccagatcacttccagcattgtgtacaggcaaggaatgccaataaaggctactgttagtgatcggtatgtgagtttgtaggtaaaaacactcgctaggccttttaatacttaattagtcatttcgttcgttgtgttcaatgttacacgtggttgtgtcaaatcagtctcgattttttgtgcctgggcttttcatcctctttatctcgagtctgacagtgaaacagtgttaatcaacggccgtatgggaggtaaaaggcatggcttgagccttgaggt

SEQ ID NO: 1043 - DNA, 994 bp, Oryza sativa
  ref <308>: DATABASE ACCESSION NUMBER: AK059113
  ref <309>: DATABASE ENTRY DATE: 2001-12-06
atctagggtttgcggagccaagcatcttctttgcgtttgctttccttcttcacggctcgttacagaagagggagttgggcactttgaaccaaagatggaattggaagaccataggctacatgttggttttctgcgttccggtgttcttcgtgcaggctcttctcgtgtttgttgggccaacatttgttaaggatgagaacaatacacatggaaggaaaaagattgctaaatacttcatccggacatccatgccagttggggacacaaatatttgcacctatccattgtttggcaccattttcctgggacttatagacgccatcctgatgagctatgtctcctatgttggatctcgggttttgtccttggtcatcaacaaggcactgcgaaggagggtttccttgctgatgttatcggtgcttttcttccttcctatcagggtgcttctacttgggttttctgtcctgccccaaccaggagatgtagcatttgaagtgatcatcttcttgtcattcttgatgatgatatcctgcacaaccgttggtgttctcttgctggtgtactatcctgtagcagattcattggctctccgagagataggtcagagggaaataacagagatggttccttatgatgattactactatgaaggtgcatcgcttgtagccaaccagagctttcgagaaattgaacggaactcagatacttcaacgaagcgtggttccatatctttccgcactatgatcagggaagaccaacttcagcaggatggtgttgatgaaattggattctcctctcgtagtggtgctcatattggatcaccctcaccttcaggttcatccccaagtgctgcaatgcccatgctccctctcaaggaagtacctagatactaagaagtattcacctgttccttttgcccttctactatgttctcccttttcttcttcctctttcttcctcttactaccttaatgataacagttttgtggcaatc

SEQ ID NO: 1044 - DNA, 1590 bp, Oryza sativa
  ref <308>: DATABASE ACCESSION NUMBER: AK059114
  ref <309>: DATABASE ENTRY DATE: 2001-12-06
ctccttttttttttttcgcagtctcttcatccgtctcgcatccattcccccgcctcccgccatttcaacccgcccccaattccaaaaccctcgcctcctccaacaacgcgcccccaaaccctaaccctaggagagggcgcggcggcggcggcggcggggggcgagatgccgaaggctacggcggcggaggaggaggagttccgggcggaggtggaggagcggctgatcaacgaggagtacaagatctggaagaagaacaccccgttcctgtacgacctcgtcatcacccatgccctggagtggccgtccctcaccgtgcagtggctccccgaccgcgctgagcccgctgggaaggaccactccgtccagaagatggtgctcggcacccacacctccgacaacgagcccaactacctcatgctcgcccaggtccagctccccctcgacgacgccgaggccgacgcgcgccactacgacgacgaccacgccgagatcgggggcttcggcgccgcctccggcaaggtgcaaatagttcaacagataaatcatgatggagaggttaatcgagctcggtatatgccccagaattcatttataattgctaccaagacagtcagtgcagaagtatatgtctttgattatagcaagcacccatcaaagcctccattggatggtgcatgcaatcctgacttacggctgaagggacataactctgaaggatatggactgtcttggagtatatttaaggagggccatttgttgagtggatctgatgatgctcaaatttgcttatgggacatcaaagcaaatagtaaaaacaaaacccttgacgctcttcagatttttaagtatcatgatggtgtcgttgaagatgttgcctggcatttgaggcatgaatacttgtttggctcagttggtgatgatcacaatttgctaatttgggatttacgttctcctgtgtctactaagcctgtacagtctgtggcggcacaccagggtgaggtgaattgtctggctttcaaccccttcaatgaatgggttgttgcaactggttcaactgacaagaccgtgaaactatttgatcttcggaagattgatgcttccctacacacctttgattgccacaaggaggaagtatttcaagttggatggagcccaaagaatgagactatacttgcatcttgttgtcttggcagaaggttaatggtctgggatttaagcaggattgaccaggaacagacaccggaggatgcggaagatggtcctccggagctcctgttcattcatggaggccatacaagcaagatctccgacttctcctggaacccgtgcgaggactgggtgattgctagcgtcgctgaggacaacatccttcagatatggcaaatggcagagaacatctaccatgacgaggatgatgtgccgactgatgacccggccaaggctccctgaaaacctccggtaggaaaaccaaaaatgaacaaaataaaaccttaactgtgtgactttaggtaccctcctttgttgtaagttgttggcctggttggcagtttacaaacagaatgtcagtcgtaatacataccagttagc

SEQ ID NO: 1045 - DNA, 655 bp, Oryza sativa
  ref <308>: DATABASE ACCESSION NUMBER: AK059115
  ref <309>: DATABASE ENTRY DATE: 2001-12-06
aaggacatggccaagcccaagcaaccgcctcctcatgctcctcctccgccgccgcccccgcctccggtggagggcaagcccaagcctcctcctcatgcgccgccgccgccgcctccggaggccaagaagagcttcatgcgccgcatgttccccttcctcctcgccgccaacgtcttcgtcggagcttatatgcttatgaggacctaccaaaaggactcgggaaagaaagataccgagaatgatcctacttcttctacgccgacctcatctcccgcggctgctgagaagcctgcagaaccaattgttgcacccataaaggtgctcacaccaatctcccaagacgatcagcgccagctgtacaaatggatgctggaggagaagcgcaagatcaagccacgcgatgctgcggagaagaagaagattaacggggagaaggcccttctcaaagagttcatacgagcaggatcccttccaagcctataagatcgccaattaactattatttggatctgtagtgctcttgtgtttgatgattgactgggaacggtgcgagtttgattgtatttacaagtccagcactgtaatcagatttccaaatgatagttgtggaaagaccctgttgagcttgatctcctgaattgaattggcttctttc

SEQ ID NO: 1046 - DNA, 1075 bp, Oryza sativa
  ref <308>: DATABASE ACCESSION NUMBER: AK059116
  ref <309>: DATABASE ENTRY DATE: 2001-12-06
atcgtctccgacgccgacgaactcccactcactagtagcacttacttgtagctattgatctagagcacttaagacatggagaggcaaggcttggatcttggcctgagcctcgggctaggcttgacgacggcggcgacatggccggctgctgggttctgtctgaactccggcatggcggagcaggaagtgatcaggcgtgatgatgtggttgcggcgacggcggcggaggatgagaggttcgcgtgctcacccggcagcccggtgtcgagcggcagcgggaagcgaggcagcggcagcggcagcggcgacgaggtcgacgacgccggctgcgacgtcggcggcggcggcgcgcgcaagaagctgcggttgtccaaggaccaggccgccgtcctcgaggagtgcttcaagacgcaccacaccctcactccgaagcagaaggtggcgctggcgaagagcttgaacctgcggccgcggcaggtggaggtgtggttccagaaccgccgcgcgaggacgaagctgaagcagacggaggtggactgcgagcacctcaagcggtggtgcgaccagctcgccgacgacaaccgccgcctccacaaggagctcgccgagctcagggcgctcaaggccacgcccacaccgcccgccgccgcgccgccattgaccaccctcacaatgtgcctctcctgcaagcgcgtcgccaatgccggcgtgccctcgccggcggcggcgatattccccggccacccccagttcttgtgcggattcagagatcacgccggagcagcgtcgtcgtcgtacggcggcgcatcatctggactcgcgaaggcggtcagggcggcgaggtagatcgatcgatgcgcgcgccgccatgatcgacatgaccaagctagcgatctctagctagaagatgatgacattgagcaagacgcaagagtagaacagagttgaattgatctctcgttttcctgtgtatttttaaggatcaagtgcaaagttaatttagtttttgacaaatgtaggatggatccatgtatgcacatgaaaagttgatgaaataacatgagaagaactaatt

SEQ ID NO: 1047 - DNA, 1146 bp, Oryza sativa
  ref <308>: DATABASE ACCESSION NUMBER: AK059117
  ref <309>: DATABASE ENTRY DATE: 2001-12-06
ctttgcttgagcggatgcctgtgatagatgaagctagttacttggctaagagagctgcttccacacaagcaactatttcatcagataaattagctgctgcagcaactcctggaagctcgcttaagcttccaaatggtgtagcaaagccaccaccggctcctctagctgatttgcttgatttaagttctgacgatgctcctgcgactacttccgcccctactacagcacctaatgatttcctacaggatcttttgggcataggcttgactgatacatctacagcaggtggagctccatcagcaagcacagatattctgatggatcttctatcaattggttcttctccagtacaaaatggcccaccaacagtatcaaactttagccttcctggtcaagctgagactaaagttgcacctgttacaccccaagttgtggatcttcttgatggtttgtcctcaagcacatctctttctgatgagaatacagcttacccgccaatcacagctttccagagtgcagctttgaagatcactttcaattttaagaagcagtctggaaaacctcaggagactacaattcatgctagctttacaaatttgacatctaatacattcacggatttcatctttcaggcagctgtaccaaagtttatccagttgcgtttggaccccgctagcagcaacacgcttcctgccagtggaaatgattctgttacacaaagcctcagtgtcacaaataaccaacatggacagaaaccccttgcgatgcgtatccggataacttacaaagtgaacggtgaggacaggctggagcaagggcaaatcaacgattttcctgctggattgtagtttgacctgtgtctataatgttgtgatagctcttccaactgctgcaagcaaaggcgagtttttctttttacttttttctgctcttccccttttgcttgccttctagtgagttatgtacacgacttagctggttttggccattcattcttcctttctatattgtatagtagccggcagcaattaatgctgcatcttcagttttggcaaaatgtattcatatggtgctgtatatcacttgaggataactaaaattttcagcctccccctcatttcaggcagcaaaggaatgtgttgtatc

SEQ ID NO: 1048 - DNA, 404 bp, Oryza sativa
  ref <308>: DATABASE ACCESSION NUMBER: AK059118
  ref <309>: DATABASE ENTRY DATE: 2001-12-06
agtttgagaaccaagaatatcctataaaggttatgcttctgttgacctatgctaccctcatgtgggtaggattttcttcccattttgctgcaaaatctcctcaagaagggaagaaagtaaatgaatcaggcagcgtggtcaggaaaaatagcttcattgggtggatcagttttagctatcttttaggaattgttgctatagaattatggtctcaagtattccaccactatgtatttggcagcagatttcctttcctacctctcataatggtgtcactctactgtggtgtcggaatgatgtactcatggatgtggcaactcgcatggattgtcaggcactaatatggtctctggttagcaacacgagcatgctgctttgccttgctgggaacccagcctcgcact

SEQ ID NO: 1049 - DNA, 1367 bp, Oryza sativa
  ref <308>: DATABASE ACCESSION NUMBER: AK059119
  ref <309>: DATABASE ENTRY DATE: 2001-12-06
tagggtcggggtcgatccgtcgcgggggaccatctctcggcatcgatcgatcgccgccggtgtcggcggcgaggggcggcgcggggatggcgagcggcaacagcggcgagccgagcacggcgccgcagccgaatcggtggtacgagctccggctgggctcctcctgccgcgacccctcccccaccgccaagttctgcacgctccgctatgaatttaagccagcatcaattgataagactcaagctgggtctctgcagaagaccaaagataacagggttactgtggaattccacaacaatcagcctggcaagccaaaggtgacatttgaaggaagccaagaagagtacaaggataatgatggtgtcttgttttttgatggtgaaacctttcgtctggagcggttgcatcgggctgtcaagagattaaggcatgtccgagttccaggagagtcttcggcagccacttcggctactactggaatgggcgaatcacattcccctccattaccgaaagttggaaagtcaccggccatgagtaaacctgctgtacactcagttcctgttgaggttgaacgcattgacattggtgaacctgaaaatccaggtctaagaaacaataacaggagcactacataccaacctgttaccacaaatccattttcattttcgcctgatccaaatgatcaagaggagaacctagacatacttggtgatgatgacaatggctcaccgaataacatgtcctctggacaaggagcttctgttcgtggttttgacatcaacataccaaaccagcttgacatagatgatgaaattgctgatgtagatgtcagtgatgaggctgatgagggactcaatgcagccgaggccctgcgagctcaagtcaatgcagaagggcagcaggatgagcaggaaacctctagctctagcgggagcagcagcagcagtagtagcagtggaagtgggagtggtagtggaagcagcagcagtgatagtgacggcagtgatggtgattcagccagctctgggggtgacgttgatatataagtttggtgtacagagttttcttgctgtgtatgccatggttcacaattttacaccagtatcaggaggtgtaagccttgaatgtttaactcatagttcacaggtaacaaaattaagtttcttctgttgtgatcttattctgctgtaatttgtttgttctcctcttggttagtctgctatgtttcttagatctagcctggagcatagcatttgtatgaaacctttgcatgatggattttcttcccaaatatgggatatattttctcttgttttgaagtacagaacggcatatattctgatatgtagacatacatagtgtgcacc

SEQ ID NO: 1050 - DNA, 680 bp, Oryza sativa
  ref <308>: DATABASE ACCESSION NUMBER: AK059120
  ref <309>: DATABASE ENTRY DATE: 2001-12-06
acgactactaaccccaaccctcccgcgaccggcagatcacacgattcgagatgggtcactcatacggaaagagagcgggcacccgctatgccttcagccgggacttccgcaagaagggtatgattgccctgaacacctacctccgacagtaccgcgttggagatatcgtcgacattaaggcgaacggtgccgtccagaagggtatgcccttcaaggtctaccacggaaagactggtgtcatctacaacgtcaccaagtccgctgtcggtgtcatcatctacaagcaggtcaagcaccgatacatcgagaagcgaatcaacgtccgaatcgagcacatctcgcagtcccgatctcgtgaggacttcctcaagcgagtcaaggctaacgccgaggccaagcgtgaggccaaggccaccggaaccgttgtccaggtcaagcgtcagccccttggacctcgtggcgcccacacactgtcgctctccgagaacccccccatgaccgttacccctcttgcctacgagaccacgatctaaaagaaaagatattgcgggggttggtggtgcttgcttctatttatttggggtattgcgtccggatgggaaagaattctgcatggcaagggcttgccttttgatgtctgtacggcataggaccagaaaaaagacatcgtttgaagcatc

SEQ ID NO: 1051 - DNA, 795 bp, Oryza sativa
  ref <308>: DATABASE ACCESSION NUMBER: AK059121
  ref <309>: DATABASE ENTRY DATE: 2001-12-06
gcatcaggtctccaaggtgaacagcctctggccaatggaacaatgtaggcaagggaagtcgagttccttcctttcaccggaagccaagggaggcctcggccggaggagctgaagccgcctccccccaaaaatcccttcttttctcggcttcgccaccgccagattcccatgggctgcgcaggatccacccccatgggcgcccccgaatccgatgctactaaaaaaatcaggaagcctaagccctggaagcacccccaaccgataacgatggtccagctcacgaagatgcgcgaggagttttgggacacagctcctcactatggtggtcggaaagaaatctggggtgccctgcgtgttgcggcagagtctgaagtgtcccttgcacaggcaattgtggaaagtgcagccataattgtttctaatactgatctgactctctgctatgatgaaagaggtgcgaagtatgaactgcccaagtatgtcttgagtgaaccaaccaacctgattcaagacagctgaagagcagacctactgatgtaaacaactgtaaatgagaacaaccccttgagtgtcctggtagttgaagcatgcttgataaaagattttaagcatgttctgggtaactgtcagcttacattttgtctcttcttgttaggacacagttctcttccatcttggccgttgtcctccaccttagataaagtctttacaatatcccctgctgctggtgctaccttaaacatggtctgcttagaaatcttttatatgagttaaaaatcttagaatggttcttag

SEQ ID NO: 1052 - DNA, 680 bp, Oryza sativa; identical to SEQ ID NO: 1050
  ref <308>: DATABASE ACCESSION NUMBER: AK104044
  ref <309>: DATABASE ENTRY DATE: 2002-08-28

SEQ ID NO: 1053 - DNA, 1674 bp, Oryza sativa
  ref <308>: DATABASE ACCESSION NUMBER: AK104045
  ref <309>: DATABASE ENTRY DATE: 2002-08-28
aacctatctctcatgaagtcatgagtcccaccatttcacctgtcctggttttcctcctcctatcacttcatcagagcatatgctccagtgctcatgatgctgcaagtgcaagcagcttctcctcctgccttgccacccatggtgtcagcaacttctccctccctgcatcaccaagctacaataccaccctcaacttctccatcagaaatctccggttcacgctccccgatgtcaccaggccggcagccatcgtccttccctggtcaaaggaggatctccggcgagccatactatgtgcacgcaacagttcgctggcgatccgtgtacgcagcggcgggcacagctacgagggcttgtcatacaccacggagaaccatgtccccttcgttgtgatcgacctcatgaacctgaaccgtgtccaggttgactcggtctcggccacagcctgggccgaggccggtgcgactctaggtgagctctactacgccgtgggacggtcgagccagtccttggccttctcaggcgggtcgtgttccaccatcggcttaggtggtgtcatctccggtggcggctttgggttgctgtcacggaaatttgggctcgccgctgatagcgtattggatgcggtgctcgttgacccgaatggaagagtccttgaccggaattcgatgggcgaagacatcttttgggcaatttgcggtggcggtggcgggagctggggtgtggtgtatgcttggaagctccggctcgtgccggttcctcacaacgtcaccgtattcatcgttgaccgtactggaccggtcgagtacgtagctgggttggttcattggtggcagcatgtagggcccaatctacctgacgagttctatctctcagtgtattttcctactggatcatcagatggtaatgtctctgtctcatttgagggccaggttttaggaacaaaacaacaaaccctgtcagtgttgagccaaagctttccaatgttaggtgtcactgagtctgacctaagtgagatgagttgggtcgagtcaacagccaagttcgccaatgttggcacagtctctgacctatcgaatcggtcgcctggaacaaactcatacactaagagtaagtctgattatgtgaaggcaccaatctcgaggcatgacatggttgagatcgcccgatacctatcagctggaccaccagggtccatcatacttgacccttatggaggtgccatggctcgaatcgggagtgacgcgacaccattcccacatcgagctggcatcctctacagtattcagtatactgtatattggggacaatcggatcaagctagggctaatgagtacatcatatggctccgatcgttgtacacatacatgaccccccatgtgtcaaaggatccccgtggtgcgtatgtcaactacctagatctagacttgggcgccaacaactggacgcaccccataggtggatcatctatggaagcagtggcgcgtgcgagatcttcttggggtgcagcatattttgggaacaatttcaatcggttggtcagcaccaagacgacaattgatccaagcaatgtgttcaataacgctcaaagcattccccctttgaattagttctagtgaaaatgtcaaatagaaatgaaactggctgtgttcggcagcaatggattgggagaat

SEQ ID NO: 1054 - DNA, 582 bp, Oryza sativa
  ref <308>: DATABASE ACCESSION NUMBER: AK059122
  ref <309>: DATABASE ENTRY DATE: 2001-12-06
ttttggccgtttcacttcacttacaaaggatggcaaatggcgagcacctccggcgggccttcctatttttcgacaaggatggcaatggctatattgagcccgaggagcttcaggaggctctggtggaggatggggcaactgatatcatggaagtggtgaaggacatattgcaagaggttgacactgacaaggatggcaaaattagctatgaagaattcgtagcaatgatgaagactggcacagattggagaaaggcgtcacggcattattcaagaggacgtttcaacagccttagcataaggcttataaaggatggatctgtaaaattgggcaacgagtgaagttgcaaacttgcagctggtgttgccctttactactcatctgcgcatgtaagtctggcccttggacccactaagcagagaccttctccttttctaatgattattttggtggtaatttagataggcagagccccccccccccccctgattggcttactcatgtaagtagttttcctggtatctctgatgaggagcacgcactgaatgctgcaccaatagctgtgcacagtgcacttgcttg

SEQ ID NO: 1055 - DNA, 457 bp, Oryza sativa
  ref <308>: DATABASE ACCESSION NUMBER: AK059123
  ref <309>: DATABASE ENTRY DATE: 2001-12-06
accctcccacacgcgcgcgcctctctagggtttcccacctctcaccggcggcggcggaaggcgaaggcggcggcggcggcggcgaagatggggcactccaacgtgtggaactcccaccccaagaactacgggccgggctcccgcgtctgccgggtgtgcgggaaccctcatggactgatcaggaagtacgggctcatgtgctgcagacagtgcttccgcagcaacgccaaggacatcggcttcatcaagtaccgctaaagtcatcttggtttcctcagccctactgctgggtgaagagatggagcatttaatggaaggcttaatttcagttccagtaatttagctgtttgtttggtactctgcagactaaagtggtttatgtttctgatgctatttgaatgatgtggatgctaagtatgaattaatcgcgcatcaaaaaaaatcctttaatactatt

SEQ ID NO: 1056 - DNA, 541 bp, Oryza sativa
  ref <308>: DATABASE ACCESSION NUMBER: AK059124
  ref <309>: DATABASE ENTRY DATE: 2001-12-06
gacctcgccgtccactcctcccacccatctcgtcttcgtctcccctctccttccccccacgccgcctcgagaaagaggagaaatcgagagcgcggcggccgaagatgccggcgacgccgacgatcatcggcgccctcctgggcctcggcacccagatgtactccaacgccctccgcaagctcccctacatgcgccatccctgggagcatgtggtgggaatgggcctgggtgcggtgttcgtcaaccagctggtgaagtgggatgagaagctcaaggaggatctcgacaagatgcttgagcgtgcaaagcaagccaacgagcggcgttactttgatgatgatgatgattagctattttcatattggtttgtcagccaccagactcttttttttcagtttgtatggtctgtacacatggtttggaccatccatctgtagtcgccgtatcaacacccggctcgcaatttcaactgcggtgctgtaataaactgttgttttcacaaaggatgtgatattttgcttgtatgagaaaccaattatcg

SEQ ID NO: 1057 - DNA, 1463 bp, Oryza sativa
  ref <308>: DATABASE ACCESSION NUMBER: AK059125
  ref <309>: DATABASE ENTRY DATE: 2001-12-06
agcagccatgcgctcgcttatccgaagcgcctcctcccgcctcctccgcgctcgcgcccgcgccatggccacgccctccgccgcgcgcttctccccctcctccaaccccgcgcgccctcctcctcctcgcctcccgctcccccgcttccttccgccgaccccgccgcaggcgctgctccgggcgaggcctctccggacctcggctgccgttgccgcggccgcggccgtcgtggaggtgggcggcgtcaagatcgcgcgggaggatgtcgtgaaggaggaggacccaacaaacaacgttccggacacgatctactcaaagattggcctgcagctgcacaggagggataatcaccctctagggattctgaagaacactatttacgactactttgacaagaatttctctgggaactttaacaagttcgatgacctctgccctcttgtttctatcaagcagaattttgatgatgtcctggtccctgctgatcatgtgagtcggagttacaatgacacatactatgttgatgctcaaactgtcttgcggtgtcataccagcgctcatcaagcagagctgctaagggatggacacacacatttccttgtaactggggatgtttatcgtagggattctattgattcaactcactatccttgcttccatcagatggagggcttccgtgtcttcactccagatgaatggtcagattctggcatggatgggacagcatatgcagctgcagacctcaagaaaacactggaaggcttggcaaaacatctctttggtgctgtggaaatgcgatgggttgacacatacttcccattcactaacccgtcctttgaactcgagatatattttcagggtgattggttggaagttctgggatgtggagtcactgagcaggaaattttgaaaaacaacggcaggatagataatgtggcatgggcctttggactaggtttggagcgcttagcaatggtcctgtttgatattccagatattcgactcttttggtcaaatgataagcgattcacatcccagttttcagaaggcaaacttggtgtcaagtttaagccattctcaaagtttccaccttgctacaaggatatgagtttttggatcaatgaagagtttacagagaacaatttatgtgaggttgtcagaggaattgctggagatcttgtagaggaggtaaaactaattgacaatttcaccaacaagaaaggaatgacgagccattgctacaggatagcctataggtcaatggaacgttcacttaccgatgaggagatcaacgacatgcagtggaatgtcagagaagaggtgcaaaataaactgaaagttgagttgagatgaaatagagctagttcacgtgttcgaccagacattgattgtttgaccattttcgtctgtacattcattcaaaagtgtgttgatatatggagaaaattttatcagtttcctg

SEQ ID NO: 1058 - DNA, 1256 bp, Oryza sativa
  ref <308>: DATABASE ACCESSION NUMBER: AK059126
  ref <309>: DATABASE ENTRY DATE: 2001-12-06
aacctccactcacgcagaggagaatcgcattgttggaccactaaagaagataccagaggagtggagcaggatgtactagtgtgtggtgcatttcctgcccatgaggatatgatgccatcacttctcacaatagtccacttcttagctctaggcggacatggtgtaagctgcagtttggggcaattggagatttccaattcacaaaggttaggaaacataaactcgctcacactatcctcatcgcaagagtacattgtgttccacacttctaggcttggcatgccttctatggtaaacttcttcagtcgaggaaatggccctgggccgccacaaaaatcctcatcgattttcaccacgctcttcattctttcaagacacaactcttccagattaggtaattggccaagtggtggtagcctgacgcacttgggcatttgtgccatggtaatttgaataagattagggagataaagggaaatgtccattaaccaggatggatatttggtgtctttataaccttccatccgaaacttctttagagatcttggaggaactagctcacgcaacaaatctatgtcctccatagacctcttagcatgttgagtccaatgcaattccaactctttgattctttgcttttcaatcagttctatcttctggacctctttgaccgacctcacattttcaagacatcttatctgcaagttaggaggattcacatcattaagcagaacaaggttgctagaagatccatcatcattaggttgcaccacaaagcgtggtaatgtgagtaaatttttgttccattgtggcaccttggacaggtcactaccattcagattaacaaacttcaggctgtcagctttacctatacttgctggtaaactactcaaaagtgggcaatccgagaggtcaagtgtatgtagctttttgagtgtatcaaaacagtcaggtaagacgacgccattaagatatatgttcttcgacaagaccaaatgctctaggttgttcagacaaccgaggaaactgatatctattgaagaacccaagtaattcagcgagcctgacaagttcaaatacttgagattgattaagctgttcaaaccttgagctagcctttccgtataaaagtgttctgtagacagattcaagtattcaagtttggtgagggtacccaaaacttctgtttctaacctccctttcatataggagcaacttgataagttcaaatataccagtttcgagaggttacccat

SEQ ID NO: 1059 - DNA, 1252 bp, Oryza sativa
  ref <308>: DATABASE ACCESSION NUMBER: AK059127
  ref <309>: DATABASE ENTRY DATE: 2001-12-06
atcctcgcgcgcgccggcgccaccgcggccggcggcctccgttccggcggcgacgtcccccggcgccgcaacatggtcgccatcgtcgcggcgacgacgaccaccggcgccgggccggcggtgccgaaggaggggtcgctggagcggccggcgtggtcgggcgagacgccgctgtcccggctcgtcggagcgctcatcgccttcaagccgctctactccctcatgaagctcgcctcccgggaggtcatcatcaggacggcggagaagtcgaacgtcccgtggagggagatgacgaagcaggtgctggagtccgacgtgtacgaggtgttcgacaggatacgcgacctcaacctcgtctaccctgactattatctgaacccattccatgcgtatgatgaaggcaacctgtcatggctggctgcagctgaagctgaaccggcaacgatgtcgattgctaagagggccatacctgacgctggttcaattgaagaagccaatcaaattgttcgcggaaactggctgaatgcaattgaggagcatcacctgaaatactcggggaattgtcagatcaatgacattctggatattggctgctccgttggagtaagcaccagatacctggctgagaagttcccttcagcgagaactgttggtttagatctttcaccctacttccttgcggttgcggcacataaggaagaaaaattgtcccggcaaaatcctatccgttgggttcatgcaaacggtgaagccacagggttgccctcaaattcattcgacctagtctcccttgcttatgtgtgccacgagtgtccagcacgagcaatcacaggactcgtgaacgaagcatttcggctgctccggccaggagggaccatcgccctgaccgacaattcaccaaaatccaaagtacttcaggaactgtcaccagtgctatttactctgatgaagagcactgaaccgtttctggatgaatactacatgctggatttggaggagacgatgaggcaagcaggctttgttaatgttcattctatactgacagatcccagacataggacagtcactgctaccgtgcctttctgaaacatctgatctcccactgaaattttgttccatctcaattgtgattgtggatgtatactggtaaacaaaagagttgaaaaactgtacccttgttcataaaataggacgacggctgtaccaaccacaataattacattgagtcgtgagctatttgttcgagatattt

SEQ ID NO: 1060 - DNA, 1406 bp, Oryza sativa
  ref <308>: DATABASE ACCESSION NUMBER: AK059128
  ref <309>: DATABASE ENTRY DATE: 2001-12-06
gcttgcagtacaaagacaaagattcagttcagcatactattcctgctgttttcattggaagcctcagttcatttgcggatcaaaagattgtgagcttggtggaaaatgattctcctgttgctggcaagcagaaagttgacaatgaaggacagcaatattacccatcttattatgtagccttgagttcagacaactcatggtatctattcaccgaaaaatggattaaagctgtttacaagacaggtctacctgctgttccttcagcagagggaggccctctccctagagaaaccctgaagcagctccttttgcgtgaagatatgatgtgggataaaattgcaaaatcagaatatggttctttgttatgcatggatggatctctggacacatggtcgcggagtctcaatgttcccgtgcttaatagcctttcagaagatgatgaggtagaacgattctcccaggaacatcaagatgctgtagaatgtcataagcaacagagaaagaaagtttcacaattgaagaaaacaatcaggagcactaagggtttcaaagaatttcaaaagatcatcgacatgagaaactttacaaaagaaaagatcgagcgtttggaagctagatctcgtcgtttgactcggcggataagacaaattgaaccaactggttggaaggaatttttgcagattagcaaagtcatacaagaggctagagcattagatatcaatactcaggtaatctatccgttgggtgagacggcagcagccatacgaggggaaaacgagctctggcttgccatggttcttaggaacaaggtccttttggatctgaagccttctcaacttgcagcaatatgtggaagtttagtgtcagaagggatcaaacttcgtccctggaaaaacagcagttatgtatatgaaccatcttctgttgttactggtgttataaactacttagaagagcagagaaactcactcgtcgatctccaagagaagcacagtgtaaagataccctgcgaaatagatgcccagtttgctgggatggttgaagcctgggcatcagggttgacctggagggagataatgatggactcggcaatggatgatggagatttagcccgtctgctcagacgcacgattgatttactagcccagattccaaaattgccagatatagatccggttctccaaaagaacgcacaaattgcttgcaacatcatggaccgggtaccgataagtgagcttgctggctgaaagtatgtgaaatctgtaagtaccacattgaatgtgaaatctgtaagtaccacattgaatgtgaaatctgtaagtaccacattgaccatttgttttaggtaggcaattctttgttgtatcatgcacatgcagttatcaaattgacagagatcattttcc

SEQ ID NO: 1061 - DNA, 547 bp, Oryza sativa
  ref <308>: DATABASE ACCESSION NUMBER: AK059129
  ref <309>: DATABASE ENTRY DATE: 2001-12-06
aatacaatcgagtttagtaggcgctgcttggagcaaggtgtaactgcgtgaagtcgtgggccattgccatagatgaatggtccactagtaagatgacacagcaatatctgaacagttttagatgattgctgttacatcgatttacagtgacaaaagaggcgaggttccaccgaggttgtggtgaaaagagcttcaaatgtaacagattgcttgtttgatacttgggggccatccaaagggagtttttcattctattgttgtacactacacgaagggcgcgcatcggtcgctgctgtattatgtccagactgattgatgctgtgttgctgccagatacaaacttgtagcctccatttgtttagctctaggcgcgatactgttgtcgggaaattcttgcaacattcatatggtggaaacttgtaatacacctaagtgctgctcttctcggcatttcttacggctatattccacttgtagaatgtagtttttgagtctaagtaaggcctgtagctcttgtatttatatctgtcaacctgattagattggt

SEQ ID NO: 1062 - DNA, 1253 bp, Oryza sativa
  ref <308>: DATABASE ACCESSION NUMBER: AK104046
  ref <309>: DATABASE ENTRY DATE: 2002-08-28
aacacctctctctcgtctctccccctccccgactcgactcgactcgactccacccccgtcctccccctcgtcccgtcccttctttggtttcctcctccccaatccgaggggtggctggggccgccgccgccgccgccgccatcgccatggacgggctgcacggtacggacggctgcttctctcccgggcgggccatgtcgccgcaggtcaggccccccgtcccgcccgacgctgccagcggcgggcagtacttggcggagttgttgcaggagcatcagaagctggggccgttcatgcaggtgctcccaatctgcagcaggctgttgaatcaagagataatgcgagtgtctgggatgtttcggcaacccggcgtaggggacttcgagaggtcgcaacctgcaagcccaaatcagatgcatccgtcgcacatcgtgcccaatttccgtggtaatgcttttggtccatggaatgggatgcgtccagagagagtaagtttctctcaaggaccaggttggcaaggagcaccacaaagtccctcttcttacattgtcaagaagatcttgcggttggaaataccgacagatgcttaccctaatttcaattttattggtcgccttcttggaccaaggggaaattcgttgaagaggattgaggcctctacaggttgtcgtgttttcataagaggaaagggctcaattaaagaccctaacaaggaggagcaacttaagggaagggctgggtatgaacacttggatgatcccctgcatatcttgattgaagccgagttacctgccaatgtcattgacgctagactcgcaaaagcacaagaaatcctagaagagttgttgaaaccagtggatgaatcgcaagattactacaagagacagcaactccgagaacttgctttgttgaactcaccacttagagaggaaagcccacatcctggtagtgcttctccattcagtaatggtggcatgaaacggatgaaacaatgactggatgcttgttcctcctcctccttgaccctccaagagaaatcaatcaatccatgccttcacaacttaaatttttcatgagcaaagctttcatgatggtgttggcattcgcgcggcaatctgttactgctagaattttgatctccatgtgacattttaactcataactgacagatgatggatgagtagcgaggcgaaatcctcccctatggttgtataattagaacatttgatttatttattactggtagtgctgag

SEQ ID NO: 1063 - DNA, 2438 bp, Oryza sativa
  ref <308>: DATABASE ACCESSION NUMBER: AK059130
  ref <309>: DATABASE ENTRY DATE: 2001-12-06
gagtggcgactggccacctgctgatttgaatactactagtagttttccgtttttggcattggcagtattgtccggccgctgattctgctcacagaccggccatggccgccggcgtcctcatgacaaaaccgttcatggctgctgcggctgctgctctagtcagcttgctcgtcatgctgcgctgcttgcctagcgtcgtcgctaccactgtatctttcaactactccagcttcagcaacgcgagcaagaacatcaccctccagggcagcgcggcgctcgccggcgccgaatggatcgagctcaccaaaggcaaagggaacaacctgtcgagcggcggcaccatgggccggatggtgtacacgccgccggtgcagctatgggacgccgccaccggcgaggttgccagcttcaccacgcgcttctccttcaacatcaccccgaaaaacaagagcaacaagggcgacgggatgaccttcttcctcgtcagctacccgtcgaggatgccgtacatgggctacggcggcgccctcggcctcaccagccagaccttcgacaacgccaccgccggcgaccggttcgtcgccgtcgagttcgacacctacaacaactccttcctagaccccgacgccacctacgaccacatcggcatcgacgtcaacgccctccggtcagtgaagaccgaatccctgcctagctacatcctcatcggcaacatgaccgccatcgtcgactacaacagcaattcgagcatcatgtcggtgaagctatgggcaaatggctcaacgacgccttacaacctcagctccaaggttgatctcaagagcgccttgccggagaaggtcgccgttggcttctcggcggcgacgggttcatcctttgagcagcatcagctgcgttcttggtacttcaacttgacgttggagcagaagcagccaacaggacaacattcgcgtggcggagttgtagcgggagccaccgtcggtgcaattctgttcatcgtgctcctcttcaccatggtagcaatcctcgtacgacgacgtcagagaaagaagatgagggaggaagaggaggacgactcggaaggcgatcccatcgtggagatcgagatggggacggggccgaggcggttcccgtaccacatacttgtcaacgcgacaaagagctttgcggcggaggagaagcttgggcaaggcggtttcggcgcggtgtaccgtggcaatctgagagagctcggcctagacgttgccataaagaggttcgccaaagactcctccaagcaagggaggaaggagtacaagtcggagatcaaggtgataagtcggctgcgtcaccgtaatctcgtgcagctcatcggctggtgccacggccgtgacgagctcctcctcgtctacgagctcgtccccaaccgcagccttgacgtccatctccacggcaatggcaccttcctcacatggccaatgaggatcaacattgttcttgggcttgggaatgctctgctctacctccatgaggagtgggagcaatgtgtcgtgcaccgtgacatcaaaccgagcaacatcatgctggatgaatctttcaatgcaaagttaggcgactttggtcttgcaaggcttattgaccataacgttggggtacaaacaatgacccacccctcagggacgccaggctatcttgatcctgaatgtgtgatcacaggtaaagcaagcgctgagtctgatgtctatagttttggcgttgttttgttggaagtggcatgtgggaggagaccaatgagcctactggacaaccagaacaatagcctcttccgactggtggaatgggtctgggacctatatggccagggagtcgttctcaaggcagcagacgagcggctcaacagtgactatgatgcaaccagcatggagtgtgtcatggctgttgggctctggtgtgcgcatccggaccgatacgcacgtccatctatcagagctgccatgacggtcctccaatccaatggaccactaccagtgttaccatctaagatgcccgtgccaatatatgcaccgccgatggcctcgtcagaggggcaactttcatcatcgacaggaatgtcatcctcaagtttgacaataacatcaattacacctcgctagggtggcaagttttctcactcataggatatgtatagcaagacaacttttgtcatatctagatttttatccatacccacaagtcgaactacctgcatccctacacctcagttcctttcgcatactttagccggtttgaagggctcatcttcgttaattgctccgtacagtagtattagccatgtttggttcattttacatgttgtacatttacaaattgccgcttgaataggatgtacagctcgtgaggcaattggtttgctctttagagagctgcctaattggcaatatgagtaatgtgttcagttt

SEQ ID NO: 1064 - DNA, 790 bp, Oryza sativa
  ref <308>: DATABASE ACCESSION NUMBER: AK059131
  ref <309>: DATABASE ENTRY DATE: 2001-12-06
acagatggtagaacgacattgcttcacttcgtggttaaagagatcatccgatcagaaggcttcgattctgatcagagcgcggttaatcctggcagcggcagcaaggaacagttcaaaagggacggcttgaaattacttgcagggctcagcagtgagctctccaacgtgaagagagcggccacactggagatggacacactgagcggcaacatcctgaggctcgaagccgatctcgagaaggtgaagcttgtcctacagctcaaggagacttgctcagatcaaggcgcgagcgagaacttcttccaggcaatggttgtcttcctcagaagagcagaggcagagatcaagaacatgaaaaccgcagaggagcctcaccctctgaggatattcgtggtggtggatgaattcctcctgatactggaccgtgtttgcagggacgtcggcaggacgccggagagggtgatgatgggctccggtaagtcgttccgcgtccctgcaggtacctcattgccgcctcatcggaatgagaaccggcgagttcttagctcctccgatgaggacagctcgtcatcttaggagcaaacatttttggtgcataggttagctgataagatttgagagtagtgattcttccggagctgaacattgtggtgtatagactgtaatcaccgtcagaaataagggagtcgtcactgtctgtcactgttaaaagtagatgtttaccaaagctaaagaaaggtagctgtacaaactacaaaggcattcagtattatggtagtatgttcttacc

SEQ ID NO: 1065 - DNA, 684 bp, Oryza sativa
  ref <308>: DATABASE ACCESSION NUMBER: AK059132
  ref <309>: DATABASE ENTRY DATE: 2001-12-06
aaagccattgggctcgtcggagagacaagtagagagcagcgtagtcgccgcacttagccatgctcgcctcgccggcgctcgccggcgcgcgcgccttcgcggcgaccgtgtccgggagcctcggcatccccattccggccatctccgcgccctcgccctcgcaggcgcggcggcgggcctctctcgtcgtcgttgcaaaggtcaaggtgtccactccccaggccgaccgcatcgcccgccatgtccgcctccgcaagaaggttagtggcaccacggagaggccaagactcagtgttttccgctcaaacaaacatttatatgctcaagtgattgacgatacaaagtcatgcactctggtttcagcttccacaatgcacaagtctctttcaaaggacttggaatactcggcagggccaacagttgaagtggcacaaaagattggtgaagtgattgccaagtcttgcttggagaaaggaattaccaaagttgtttttgaccggggcggtttcctctaccatggtcgcattaaagctctggctgatgctgctagagagaatgggcttgatttctgaaacctccaaatgtttgttcatatctccagaatcacttgttactttctttttcgcccacctgtcgaacagagtttttctttgtagtaatttgatttgctctgcaggcttggct

SEQ ID NO: 1066 - DNA, 481 bp, Oryza sativa
  ref <308>: DATABASE ACCESSION NUMBER: AK059133
  ref <309>: DATABASE ENTRY DATE: 2001-12-06
agccatgcccaatgtgctttggtgcagttcatctctcccggatcaagaggctggtgtatggagccaaggcagaagctgccattgccattggatttgatgacttcattgcagatgctctgagaggcactgggttttaccagaaggccaacatggagatcaagaaggctgatggcaatggagccctgattgcagagcaagtctttgagaagaccaaggagaagtttcagatgtactaatgtgcaggatagagtctcagatacgccaaagtccccctgatgatctagggaggaataaaactacaatgttcagcttttccattatttctcaaactgccaattcaaatgtattttcatcctgataacatttcaattgtctgcatgttaatatcattcaatgaatgggtacctacagaaacaattgcaaaacagagtttgcatgtctatttactcttaaaccatgaaaacgacagatgatggatgct

SEQ ID NO: 1067 - DNA, 1416 bp, Oryza sativa
  ref <308>: DATABASE ACCESSION NUMBER: AK104047
  ref <309>: DATABASE ENTRY DATE: 2002-08-28
aaaaaaacaaataacgccgctccaccttttcgctcccggctcctcctcctcctctcatcctctcctctcccactccacacccaggcacccagctcgagcgcgactcggcaaatccatggctcccacggcggcgtcggcggcggcgggggaggagcagcaggcggtggggctggcggcgcgcgactcctccggccacctctcccctttcgccatctcccggaggagcactggagatgacgatgtggcgataaagattctgttctgtggaatctgccactctgacctgcactgcatcaagaatgagtggaagcactccatctacccacttgttcctgggcacgagatcgccggtgtggtgacggaggtggggaagaacgtcaccaggttcaaggccggcgacagggtcggcgtggggtgcatggtgaactcgtgccggtcatgcgagggctgtaacaatggcttcgagaaccactgcccggagggcgtcttcacctacaactccgtcgacaaggacggcaccgtcacctacggcggttactcgagcatggtggtggtgcacgagcgcttcgtggtcatgttcccggaggcgatgccgctcgacgtcggcgccccgctgctgtgcgccggcatcaccgtgtacacccccatgaagtaccacggcctgaacgcgccggggaagcacgtcggcgtgctcggcctgggcgggctcggccacgtcgcggtgaagttcgccagggcgttcgggttgaaggtgacggtgatcagctcgtcgccggggaagaagcgggaggcgctggagcggctcggcgccgacgcgttcgtcgtgagcagcagcgccgaggagatggaggccgcgaggtccaccatggacggcgtcatcaacacggtctccgccaacacccccatggcgccgtacctggcgttgctgaagcccaacgggaagatgatcctcgtcggcctcccggagaatcccctggaggtccctcccttctctctcgtccacgggaacaggactctggcagggagcaacatcggcggcatggcggacacgcaggagatgatcgagctggcggcgaagcacggcgtgacggcggacatcgaggtgatcggcgccgacgacgtgaacacggccatggagcgcctcgccaaggcggatgtcaggtatcgcttcgtcatcgacgtcgggaacaccctccacgccgccgccgccgagtgatggcatcgcctgcaaactattcgtgtggtctgtaatctgtatgaaattgttcatggtacgtacacgatatatagattgtggcgtgtcatggcgtataggaatgagcccgatcgaggaagctattgttggtagtctgatgctagtcagctcagtgtttgactgtttgcatttacggattgaaattgagctttgtgtggcct

SEQ ID NO: 1068 - DNA, 1710 bp, Oryza sativa
  ref <308>: DATABASE ACCESSION NUMBER: AK104048
  ref <309>: DATABASE ENTRY DATE: 2002-08-28
agtgggatcgaaaggcactgacgaactcgatcaagaaggagtagtcctatcatataattgctgattcagtgattcgattccgtcgagactcgagagggaggcgaagcatggggcgtcgtcgtcttctgttgagcgatctactgctgctgctgctcatcgccatcgcggtggcaggggcagcggcggcgatcgcgatcccaagagcggcgccggcgttcggagttgaaactgggtggccgccggagcactgcttgcgctgcttcgctccaccggatgcccccttcgtcctgggcgccgccgcggccatccatctcggcaacaccaactcctgcatcgccggctacgacgacgacgacgctcccctgggggccaagcgtagctactaccagttctgcatcccctcctgggtagccctcgcacacgacaatggcaccgtcatctccggcgaggccgctatgaaccgcgccgccctcagcccctccacagctgtctccgccttcatgcgcctcctacacagaagggtggaggacgatgtggtgaagagagagatagagcttgtgccgtacaagtttaccaagatgctgggatgggtctccgtccaactagacacagatgctgaattctctgtcgaccatctcgccggcatcctcatctcccacctcaagcacacggcggaggcgcacctgggccgccacatcaacaatgctgtcatcaccctacccagtcgactcagctactccgccgatggcaggcaggtcctcagctcggcggcgaaggagtacagcggcttcagggccgtcaaggtcgtcgacgagcacatcgcggcggccgcggcgtatgggcaccacaccaagcagggtgaccgcaaggccatccttgtcttccatctcggcggccgcacctcccacgcaaccatcttcaagttcgtcgacggcacggctcgcctcatcgcgacgcgagctcatcatttcctcggaggtgacgatttcacggcgaggatcgtggaccacatggtggagcacatcaaggagcagcatggcagggacgtacggcaggaggagaaggcaatggtgaggctaagggtggcgtgcgagcacgccaagaaggcactgagcgagcaacaagagaccctggtgcagatggactcgcttctggacgacggcgcggtcttctccgcgacgctgacgcgggccaagttcgaggagctcaaccacgacctgttggacagagccatggcgctggtgaaggaggtggtggtgacgacgggaggagtggaggtggtggacgaggttcttgtcgtcggcggcagcgcgaggattcccaaggttcgtcagctcgtcaaggactacttcaatggcaacggcaatggcacgcacccaaacagtcgcggttgcaaggggccggtggatgtggaaccagaggatgccgtgcttcatggcgccgcgcttctttcccgtcctctacctgttgcagagggaacagcagcagctcggtccatcggttccgtcggaggcatctgatctctctcgtgtagcttatgctttggctacgacgatgaaccaaggtgggtgcgcttcaggttggagcttacagtgagtgtgggtcattcttgccttctggagtcgttttactagttgtaacatgtagcactaaccactaaataattgttcatttccctgtgaaattctgaatgagacacctccttttgtc

SEQ ID NO: 1069 - DNA, 980 bp, Oryza sativa
  ref <308>: DATABASE ACCESSION NUMBER: AK059134
  ref <309>: DATABASE ENTRY DATE: 2001-12-06
ataagatggagcaggtgttcaagagctactacgatcaaaggagaagcctacacacccaactttcaattccatgataaccaactacgggaaagcgagactcagggagaaagcagagtgtgtgcttgataagatgactgaaatgggattcaaaccgaactatgtgacacaagaatgtctaatcatgatgtatgcatattgtgattgtgtctcaagggccagacagatattcgatgagcttgtgagctcacaaaataatgtacacctgtcatcagtgaacgcaatgcttgatgcgtactgcatgaacggcttgcccatggaagcagatcagctgttagattctgtaattaagaaaggtgctgtgcccagtgcttccacatacaaattgctttacaaggcctacaccaaagcaaacgacaagaagcttattcagaagttgctcaaacggatgaactcacagggtattgttccaaataaaaagttcttcttggatgctttggaggcatttggcaacactgacaagaaaccccggacggtacccagcaaaaactctgcaagcaagccagatgtggagtccgcaaacaattctggaactgacacttcaagcaagccaaatttaagcgtttggcaagttgctgcgtgatggggcggtcagttagttcttacaagctcacactctgcgttgcctgacagcacggagaatgcaattaatttatctctaaaactgtctatagcagtatctttggagatacgagcgattgattggctcataacgcagttttctttatgtgaatgctgagatcttttgtgcgtcggctaatgctgcttgtagtcttgtagatttcatagttgtgttgtaaaatcagcataggggtttcttttttttccttcttttttgttcagctcctctttcgtatagctgcaagcctgcaattctgtctgtcagtaaccttgaggtttctgaagtatcgcttctcattgtt

SEQ ID NO: 1070 - DNA, 1592 bp, Oryza sativa
  ref <308>: DATABASE ACCESSION NUMBER: AK059135
  ref <309>: DATABASE ENTRY DATE: 2001-12-06
caaggagaaaataaagtctgtaagagagaaagccgccagtaatcgtgacaagtatgttgggctatcatcgacagggataacatataagtcaagctctgcttcatttggtagcaactatagttctggtgaacgttatgggagttttagtggtacaagggaaggtgattcatacggtgacagttatagggataaagaacctgttaaatcctctccaagttatactggcagccagaaatctggcagcaggataaaaaaggatgtgaatagaaggaatgaggattcaccgagctccttgaagtctaatgcaaaaggcaatgaggacgattttgatgattttgatcctcgtggatcttcttcaaatggtgcagctaatacaaacaccagtggcgtggatctttttgccccaaacttattggatgatttcatcgatgtgcctgcagcagcaactcatgaaacaaacgactctgcagacgctcaggttgatctgtttgctgatgcagatttccaatcagcaataccaagtacagaaacagctgcgggttcagatgtccagggcaatgtagacctttttgcggaacagccagccttcacagcagcctttccaccacagacagggtttattccaccaccaagttctgggacatctgaagcaaatacttccacgtctaagaacacaactcctgaaccttttgatccttttggtgctattcctataaacagctttgatggatctgatccatttggtgccttcaactccgatgttggatcatctagtataccaccacccacgcagagttctgttggaaatatcagcacaccaagtcagaaccctcaagcagcgtctgactttggtggctttgtgtcgagcactgtagaaacagcagctaaggacccctttgatttttcaagtagcaatcttgggaaaacacctttggcagatccaaaggctgatgcatccgattttggtgcctttgtatcgcacagtgaggaagtagccaaggatccttttgatctttctttgagtaccagctctggaaggacaaaccaagcacctctggcggctcccaagtcagataccaagaaagaaaattttcaggtcaagtctggcatatgggctgactcattgagccgtggactgattgatctgaacataactggaccaaagaaggtgaacttagccgacgttgggattgtcggtggcctcgatgacgggtctgatgataaagctctgccctcatggaccatgggtgcaggaggttccagcctaggaatgtccggaattccttcatctacacaaagtggtggcattgagagcttagctaactacaacaagtaccagtttggctttaaatgagctttcatgtgaggctttctagtatatgccggttattgtcggaatgtcggcttgtgccttatttattttttgttgattctattctcccctcttttgatgcttacattcctttacaatcgcctccaaggatcgtgatcttggttcgtcttgtcgcgcttgtattgtatttattggatttgcggatgagagactcctacctatatcacaccctgattcaatttaactgtactgttatttc

SEQ ID NO: 1071 - DNA, 429 bp, Oryza sativa
  ref <308>: DATABASE ACCESSION NUMBER: AK059136
  ref <309>: DATABASE ENTRY DATE: 2001-12-06
ggtaacacaatcggtaagcgttatgcaaggaccgatgaaatcggtgtccccctggcaatcacggttgacaacaccacgagtgtgactgtccgtgaccgggacagcaaggatcagatccgcgttgaggtcgatgaggtggcctcagtggtgaaggaagtgacggacgggcagagcacctgggcagacatcatgtggaggtacccggcacatactgcctcggccgctgaagaggaggaagcatcagaaacctgaagggggcaagcagtgcagtgcaagccaaaacctctggctggaattgagatggttgttgccatcctgcttttctgatacatgttttaacagaatgctaatgcagcattgagcattgttctgtaatctcgatgatttctctacatatttacagatgattttctcctgtttactgttgat

SEQ ID NO: 1072 - DNA, 750 bp, Oryza sativa
  ref <308>: DATABASE ACCESSION NUMBER: AK059137
  ref <309>: DATABASE ENTRY DATE: 2001-12-06
gctgcgattgtatctcacttgcataaggaacactctggaggctgccatgtgcctgcagaatttcccttgccaagaggtcgagaggcacaacaaaccggaggtggagctaaagactagccctgaacttctgctgaacccagtgctcatttgccgtaatgaagcagaaaagtgtttgatagagacttcaatcaactctattcgtattagcatgaaggtcaaacaggcagatgagctagaaaatattcttgcaaagaagtttcttaggtttttatcaatgagagcagaagcattccaagtgctgaggagaaaaccagttcagggttatgatatcagtttcctgataacaaactaccactgtgaggacatgcacaagcataagctcatagatttcattgttcagtttatggaggacatcgacaaggagatcagtgagctaaagctttcggtaaatacacgtggtcggttagtggcaactgaattcctgaagcagttcatatgacacattcttggcgatctttggaaaacataaaaccctagcattgttagctatgctgtcttggcctttggcgagcaaatctggaaggatctttccaccactttgttttccttttgtaaatgcgttgacaaggatatgtgaattcttgatccaactagacctcattggcagctaaaatctgcccaggcaagagagatgaggggaaacaaagtcatggtcagtaggttgagatagattttttggccttttggttc

SEQ ID NO: 1073 - DNA, 518 bp, Oryza sativa
  ref <308>: DATABASE ACCESSION NUMBER: AK059138
  ref <309>: DATABASE ENTRY DATE: 2001-12-06
tcagttttctgtgacggagcactttagagaagcaattggctatcccaggcctccgcctggtgtatatttcttctatgaattttctccaattaaggttgattttactgaagaaaatacatcgcttcttcacttcctgacaaacatatgtgctattgttggagggattttcactgttgctggcatcatagattcttttgtctaccatggtcatcgtgctataaagaaaaagatggagatcggaaaacttggataattccatatttagcatataccctgtaggatcatagtttgaattgagtcgactaatgcttgcctgagaaaggtacgaagtaaattcaggaggaattttggctaatatgttgtaatacattttctagccgctcagacttttgctgattattcaagcctagagcatagacatgtttgtataagctgttgcatcgtcgtatttaactgtgttttgggctaaatgtactgtaacatattcataaaccttgcagaaagatgtatttcgctcc

SEQ ID NO: 1074 - DNA, 382 bp, Oryza sativa
  ref <308>: DATABASE ACCESSION NUMBER: AK059139
  ref <309>: DATABASE ENTRY DATE: 2001-12-06
ctatgtttcaggctactaggatactaattgttaattcgtttggacgtgttggactacgttccaattaatagacgtcatacctctaaacctgtaaatggatttttcattagagatggatggaatgcttgtaagtctgtattctgtcagccgattggaattgctgtgttaggtttgttgtgtcctcatgagttatgaggattgaggagtgttgaaaggacaactgtttgttgtgccctcatgagttatgaggattgaggggtgttgaagcattcaaggattcaaggttctttgctttccagttttttcttttcttttcttgattattgactactttcgacatcggctaccttacaagtacatgtgatgcttcatgcttgtgttc

SEQ ID NO: 1075 - DNA, 1351 bp, Oryza sativa
  ref <308>: DATABASE ACCESSION NUMBER: AK104049
  ref <309>: DATABASE ENTRY DATE: 2002-08-28
gcacgctagtggagcagctgctgcagcggttggccaccgcctccatcgccgtcgccgactcgccgccatcgtcgttgccgtcgtcgccgtcggcggagtaggcaggcggccatggcggggaagcacggccgcaacggcttcgaggacgacgacgtcaatcccttcgcgggaggaagtgttcctcctgccaacaattctcgactcccacctctctcccatgagccagctgatttttacaatgtggacattcctcttgactcgtctaaggatttgaagaaaaaggagaaagaactccaggcaatggaagctgaactaaacaaaagagaaagggaactgaaaaggaaggaagaggctgcagcccaagctggcattgtcattgaagataaaaattggccaccctttttccctctcattcaccataatatttcaaatgagatacctattcatctacaaagaatgcagtaccttgcattttcatcgtttttgggattggcagcctgcctattttggaatatcatagcaaccacaaccgcatgggtaaaaggggaaggtgttattatctggttgcttgctattatctacttcatatctggtgtacctggtgcttatgtgttatggtaccgccctctttataatgcaatgagaactgagagtgctttgaagtttgggtggttttttctgttttacctgattcatataatcttctgtgtgtgggcagctgtggctcctccttttcctttcaaaggaaaatctttggctgggattttgcctgccattgatgtcataggcaggagtgctatagtggggatattttactttgtcgggtttggattattctgccttgagtcactgctgagcattggtgtcattcagcaagtatacatgtacttccgtggaagtggaaaagccgcagagatgaaacgtgaggcggcacgtggtgctctgagctccgcattctgatgaaacatgccttgagcaaaactgtagccagatgatatgagtgggaggaaacacgaaacatgagttgccaatctagcattcgcatagtgtacatccctgacggctgaacagcgtgcggatttggaatcaccgaaagcacccagccattattatcttttttgctcttctgtaatatataagcagcgttcttgtatggacgcgttcaggtgtttgtttccatttgttgacaaagattttagatgtggacgtgtgttgatagggaatagacatacatacgcgtgcgcgagtgggatcacctgttttttattacttcctttgcagcatagttgcagcacgttgtgtttatctgttgacacgattttcgtgagttataagatgattgatgtcctct

SEQ ID NO: 1076 - DNA, 472 bp, Oryza sativa
  ref <308>: DATABASE ACCESSION NUMBER: AK104050
  ref <309>: DATABASE ENTRY DATE: 2002-08-28
caactaatgtactgcttatagcctttttcaattactattacaccttccttcaattggatcctgatgatcttagtgagcaattgaagcggcaaggtgcttcaataccgcttgtacggccagggaaaagtacagctgccttcataaaaacagttcttagtaatatatctgtcctaggatctgccttccttgctgttttagctgctggaccatctgtggttgaacaaatcactcacttaacggcatttcggggatttgctggtacatcagtgcttatccttgttggatgtgcaacagacacagctcggaaagttcaggcagaaataatttcacagaaatataagaacattgagttctatgatgtcaaccgttttgaccaatgattaatgacactgatcattcttttcaacttgtaccaaatgttctgttgtattataattgggtcatgtggtagcatttaaggctgttcaatttt

SEQ ID NO: 1077 - DNA, 1329 bp, Oryza sativa
  ref <308>: DATABASE ACCESSION NUMBER: AK059140
  ref <309>: DATABASE ENTRY DATE: 2001-12-06
cccttttcaaccctcctcccctccagtctccttccctctcttctcgtctcctctcccaccaccaccgcgccacctaccctcgccgcagcggcagccgcggttttaatgaaaagtagcacttgttaaagctactagttttgttagaaaatctaacatggggtcaggaaacctgatgatgaagaaggtggtgaggcccagctcttttgatttcgacatacagcttgataaaagttggacagaggatgttacttgcccaatctgtcttgattaccctcacaatgctgtcctgctaagatgtacatcttatgagaaaggttgcaggccatttgtctgtgatacagatcaaacccgctcaaactgtcttgagaggtttaaaggtgcatatgagctccctgccaatatgaaagtttcaaccattgcggtggctcctcttgatagtatccatattgtggctcctaatgtgaacaaccgcccaagctgcccattgtgtagaggagatgtcattggatggattgttatcggtgaggctcgtctacatcttaaccagaagaaaagatgctgtgaagaggattgttgttcattcgttggcaacttcaatgaacttcagaagcacacacaacaaaagcatccagactcacgcccttcggaaattgatcctgctaggcaagttgattgggagaacttccagcaatcttctgatatcgttgatgtgctgagcacgattcatgcacaagttcctaatggaattgttctgggagattatgtcattgagtatggggatgatgaaactggagaagaatatgaagttttcaggcgggtcagaaggcactggtggtcttttatgtttttcaggggattctctagatcttcaagaagacgaagaagagcaagggcaagggaaagaagaggcagtggaaggaggaacagcaatcaggcacatctcgaaagctttaacctcgaggttcccacacaatctgttgacttgagagaaatcagatttgatgaaattgatgatgaatacatagtcacaggggccatacctagtattgcaacacctggaagaatggctagtttccattacagggatacaagatatggacgataaatggtgtacttgtaggaccagctattaaaaaggagcatagtctttatgtgatgcagcgatcatgagaacattgtacctctgctcatttacatttcttttcgacctctatcgttgctaggtgctgccctgccccccagcctaaacttcccgtgcatataaattagcaacagaactctccattgatcgttcgcaacaggtttcatgattctagtttcattttgtat

SEQ ID NO: 1078 - DNA, 613 bp, Oryza sativa
  ref <308>: DATABASE ACCESSION NUMBER: AK059141
  ref <309>: DATABASE ENTRY DATE: 2001-12-06
aatatctgaagtcacagaagctgtcaagcaacaggtgaaagatgctaaatttcctgatatagaggttgttcgcatgctatgggatgtgctgatggaggctgttcagtggtctgggaagaaccagcaacaaaattctaattcagcacttcggcaggtgaaagcatgggctggccttttgaatgcattctgcacaagtggcaggcttgaactcgaactcatatacaaagttcagacacagtgctatgaggatgctaagctgatgaagctatttcctgaaataatcagaacgctgtatgaccaagatgtcctagctgaagataccatcctcctttggttccgcaagggttcaaacccaaagggcaggcaatctttcgtcaaagcactggaaccttttgttaaatggctggaggaggccgaggaggaggaataaatggtgctactggaggctgtgcgaatgtattgtttgaatatttccttatatcccaagtttccagctaaagttatgtatcttttgctcccttgttactgggccgaccattttatgatcacatgctgatcctaatagtctactgaatgttaaaatcccatgcaagaagttattccaggatttgct

SEQ ID NO: 1079 - DNA, 307 bp, Oryza sativa
  ref <308>: DATABASE ACCESSION NUMBER: AK059142
  ref <309>: DATABASE ENTRY DATE: 2001-12-06
gcagaagtggatttggtggaggagctgcgcataacttgcaaagacaggcttcctcgcgaaatccaccaccaaggcgaaacacaaccctgagcaattgccatgtccagggagtggctataacgcggtttttatgctagagaagggttcatgccatgccagcatcaatggtgcagtgaaggcatatcattactcttgaggatgaccagcgtatgtgatattctgtttcacggttttgtttccaggggtcaatgtgtatcaagtgtcatgtactggctcttcagttttgttatcattgttcttgttcttg

SEQ ID NO: 1080 - DNA, 556 bp, Oryza sativa
  ref <308>: DATABASE ACCESSION NUMBER: AK059143
  ref <309>: DATABASE ENTRY DATE: 2001-12-06
ttcatagcattactataccttccctattcattgcgggttggttatttgtcagtacgggtttagcttatgacgtgtttggaagtcctcggccaaacgagtatttcacagaaagccgacaaggaattccgttaataaccgaccgttttgattctttagaacaactcgatgaatttagtagatccttttaggaggccctcaatgaccatagatcgaacctatcctatttttacagtgcgatggctggctgttcacggactagctgtacctactgtttttttcttgggatcaatatcagcaatgcagttcatccaacgataaaccaaattccaactatagaactatgacacaatcaaacccgaatgaacaaaatgttgaattgaatcgtaccagtctatactggggtttattactcatttttgtacttgctgttttattttccaattacttcttcaattgagagaaagaaagagagtatcctcacatggtaataagaatgtcaagacaattctgagtgagacgcatgtggttgtgttatgttatgttattttggtgctgt

SEQ ID NO: 1081 - DNA, 482 bp, Oryza sativa
  ref <308>: DATABASE ACCESSION NUMBER: AK059144
  ref <309>: DATABASE ENTRY DATE: 2001-12-06
tacacacagcgatgcttacttggagtgctgttaatatgaaccctcaacccagcaaactggaagaagcaggccctgtatccccttttgcttctagtcttgctgcaggcttctcaggagttgtagcagctgctgcttcccatacatttgataccgccaaaagtcgttcggaatgcactgttataccaaagtatatcgcgatggagaggaggcttcttaaatggaaagtaccaggaaattggatagagagaaagacaggaatatctcctgccgataggaatgttctgttccgtggtattggtcaacgaatggcccgaagtggatttgcatcttttctacttgttgggtcctactattttgttatagatcagttcttgtagacgacatgaagagacatcatttaactaagagatctctttaatgaatttcaaacattctatgtgcatctggtgaataattgaagaacaggtaaccacttgggcatc

SEQ ID NO: 1082 - DNA, 1655 bp, Oryza sativa
  ref <308>: DATABASE ACCESSION NUMBER: AK059145
  ref <309>: DATABASE ENTRY DATE: 2001-12-06
atgaggtggaaattaacatacacatgttctttatggggtatatgagaggtagaagacatccgatgaccttttggcctgagatgcttaagctaaaagattggccaccatctagtatgtttgaccagaggttacctcgccatggtgctgagtttataactgcattgccatttcccgagtatactgatccacgatatggcccgctaaatcttgctgtcaggcttcctgctggtgtactgaagcctgatcttgggccaaaaacttatattgcttatggatgttatgaagagttaggcaggggtgactctgtgaccaagcttcattgcgacatgtctgatgcggtaaatatcttgatgcacacagctgaagtgtcctatgacactgaacagcttgacaagatagcaaaaattaaaatgaaaatgagagaacaagatcttcatgaactgtttggggtttcagaatcaggcaccaagggtaaagctgatgatgaagcatcgaaaatctcatgtaacatggaaaacaaacacacctctaaccaaagtactaagggtttggacattaatgctttaccacctgatgattctggaagtgatattggggataaaccatcattttgtcaatctgaggtagaaagtgaattaacacaatgttcaaaacacaatcacgaggttaatagttctgtcaagatgcatgctggagctcattgtacttcagacaaccaaggatacattgacaggagtggattcaaacgcaaagattcagactgttcagaccaacagaaaactggtggcgctttgtgggatattttccgaagagaagattctgagaagttacaagattatcttcggaagcatgcctcagaatttcggcacatacactgcaatccagtgaaaaatgtttctcacccaattcatgaccagactttctatttaactgtggagcataagagaaagctcaaggaagaacacggtgttgaaccatggacattcgagcagaagctaggcgatgcagttttcattcctgctggatgtccacaccaagtgagaaatttaaagtcttgcatcaaggttgctctagactttgtttcccctgaaaatgttggtgagtgtgttaagctgaccggagagtttagacgtcttccatctgatcacagggctaaagaagataaactagagattaagaagattgctctcaatgctcttaaagaagtcataaatttcttagatcctttaccaaaagggtcaaagaacagggatgaagtggtagaagtgaccaaaccaaaaaggaaatacggtaaccgaagaggtgacctgaagagtggggaagaccaacccattgatgaatccatagaagaaaggaagcctaaaaagcgagggagatctaaacggtgatctgaagattgaagatcctgtccaacaatgaaccagtagatgactagatgagaagcctaaaaaacaattaatgctcttttgattattcagaggcccaaatgattgggctgatatcgctctgggatagacttaagtttcgacagttcaagaatcacctcagacatcaccatggtgtcgattttgttcatatgtggggtgattgccttcactaaaatgatgtgattgtttgttgctgatagtggcaattgacttggaatagctttgatg

SEQ ID NO: 1083 - DNA, 517 bp, Oryza sativa
  ref <308>: DATABASE ACCESSION NUMBER: AK059146
  ref <309>: DATABASE ENTRY DATE: 2001-12-06
gttgcagctcggtgcatgtgtttgcacaatgagctacctcctctcctacatctccaagatgctgtgcatcaagattccgtcggaggcgaggcaagccagcgaggacggcggcagcggtggcctgacggagtgctccgtctgtctctccaggatccgtgtcggcgaggcgacgaggcgtctgccctgccggcatgcgttccaccgggactgcgtcgaccggtggctcctctcatgcaggcggacgtgcccgctttgccgggtttacgtcgtcgtcgacggtaacaagccaggggtggcagcgaagcacaccggcgagccgccgctcgctgaagacatggtgatctggttctctgccatgctcgtccctggattctgacatgtatatctctgatgtctaagcgcaatgctttttatttgtttgtttcctgcctggaaaccggtttgtttttttttcttatattatgcaaattaacatgacgatttcacgcttgtagcgtttgtatgtacgcttacgctc

SEQ ID NO: 1084 - DNA, 1619 bp, Oryza sativa
  ref <308>: DATABASE ACCESSION NUMBER: AK059147
  ref <309>: DATABASE ENTRY DATE: 2001-12-06
ctcgattcgccactcccatccccgccggccgccgctggcccctttccccttctccgaccggaccgcgctcctcagatccatcgcagggcagggcaggacgcgcaatccactgcggtcgcatctgtttgctggagacccaaacttttaggcgtcgagactccatcccagtctgacttcctgctccgaccgcgcgcctcaaggaagctttatctcggctcggctggctacatcttctgtttgctgctgctgcttattggagctggaacttgggagttgctgatcgactctgaagatgggcctgtcgcgtcgggctaagaatctcatcgtcgacgtccccttccaaggcgccaaatggctacgctgcgtcgatctggcaggccagctgttcggtaacaccgctacaccaccaccaccaacaacaatcgcacatggatcagagtcagcagctgtgcaagaagactacacctctcagacactggtgtccgactcctgtaatcccaagaagaaggcagcaggcttaaagatggagaggattcggcttcccagacccatcctcaagttccgacctgctctaaacgaggcatgtaggattgattgcttcccttttgtggatcacaagatgttctgggtggatcacttggggcgccctttcctctttgaagcagagacacggctgatggacatgttgccctgtctccacaagcccaagtcgatgcccttttctgtgtttgtacccaacgccgatgctgacaatgactatgaacacctccgccctggcagcagtctttttgttatggagaggattcccaagccagaggtcaactcaagcacacagtggagcgatcagtttgaggcctttgtctactgcaagcacaagcggacatcgaccaacttctccaagacctggcagtggcaactcctcccgccgccgccgtacgttcgtgaacctaagtactggcacagctgcagccgcccagagatcagctcctacacatcgctcaccgtcaatggtgacccccacatttgcatctccatcgatggtgttggcacctactgcctgaacacggcaagccacacatggataaaagtcggtaattggaccctacccttccatggcagggttgagtatgtgcctgagttcaacctctggtttggcttcagctccgatgagtcaccgcactacttggctgcttctaacctctctgccatggactcccagccacagttagtgggtcgttgggaggagctttacctgccagaggatttgaaggaatgcaaaaaccctcaacttgtcaacctcggctctggcaggttctgcatcacaaggttcttccactctaggagtcacaacagtgactctcggggtgatgttgaccagaatgttgctgtctttaccggtgtggaggtgaagccatgtttccaggatgccaatggcggcagtgggaaagtggaactccaaatgatcccacacaaatcattatttcacaagtctaatcacactaccatcgatgctgtgttctgaacatttttgacgcactattttgaaaactccctgttttattgctataattttggttgttacttctgggtctgaaaaatatataattttggtcgttggc

SEQ ID NO: 1085 - DNA, 910 bp, Oryza sativa
  ref <308>: DATABASE ACCESSION NUMBER: AK104051
  ref <309>: DATABASE ENTRY DATE: 2002-08-28
aaaaaaaagaaaccaactccgacgaccaccggagtcggagagcatcaagaatcgacgacgatcgatcatggccatccccaccatcctgggcagtctgaagctcacgccatccccaccctccgccacgccggtgcgctcctccgcctcctcctccctgcatttccacctcgccaacgccggcgccgccgcgctcgtcgcggcctcgctcctcgtcgccgacccggccctggcattcaagggaggaggcccgtacgggcagcaggtgacacgggggcaggacctcaccggcaaggacttcagtggccagacgctcatcaggcaggacttcaagacgtctatactgaggcaggcgaacttcaaaggcgcgaagctgctcggcgcgagcttctttgatgcagatctgacaggtgctgatctctctgatgctgatcttagaggtgcagatttctcactggcaaatgtatcgaaggtaaatctgacaaatgccaacttggaaggggcacttgccacaggaaacacgacgttcaaaggttccaacatatatggagcagattttacagatgttccactgcgagacgatcagcgtgaatacctctgcaaaattgctgatggggtcaatacaaccactggaaacgccacgaaggagactcttttctgcaaatgatgaacaatagagagacagaggaagagatccagtagagttgagggtgctgattaaattagttgctgaatagtatcactactactagtatattgccgccatgttctctcttttttccccaagtgcagagaggagtagtacacgatcacatgacatgaataaatgtgcaaatgcttaagagcaagttcaataatatagccaactactatctccaattcatctatagtcaatataatagctcattcatac

SEQ ID NO: 1086 - DNA, 1413 bp, Oryza sativa
  ref <308>: DATABASE ACCESSION NUMBER: AK059148
  ref <309>: DATABASE ENTRY DATE: 2001-12-06
gaagcaaaaccaacccaacccaacccaactcaaccgaatcgatggccggcgacgagcccctccccggcgacgggcagcggcggcgctacctcatcggctacgccctggcgccgaagaagcagcagagcttcatccagccgtcgctggtgtcgcgcgcggcggggcgcggcatggacctcgtccccgtcgacccctcgcggcccctccccgagcaggggcccttccacctcctcatccacaagctctacggcgaggagtggcgcggtcagctggacgccttctccgccgcgcacccagccgtccccgtcgtcgacccgccccacgccatcgaccgcctccacaaccgcatctccatgctccaggtcgtctccgagctcgacgtcccgctccacgcccaccaccaccacaccttcggcatcccctcccaggtcgtcgtctacgacgccgccgccctctccgactccggcctcctcgccgccctccgcttccccctcatcgccaagcccctcgtcgccgacggcaccgccaagtcccacaagatgtccctcgtctaccaccgcgagggcctccgcaagctccgccccccgctcgtcctccaggagttcgtcaaccacggcggcgtcatcttcaaggtctacgtcgtcggcgcccacgtcacctgcgtcaagcgccgcagcctccccgacgtctccagcgacgtcctccaggacgcctccgccgagggctccctctccttctcccaggtctccaacctccccaacgagcgcaccgcccaggagtactacgacgacatgcgcctcgaggacgccatcatgccacccaccgccttcatcaacgacatcgccgccgccctccgccgcgccctcggcctccacctcttcaacttcgacatgatccgggacgcccgcgctggggatcgctacctcgtcattgacatcaactacttccccggctatgccaagatgcccggatacgagactgtgctcaccgatttcttctgggagatggttcacaaggacgacgacacgcccaacctcaaccccaaccccaatgacgaggatgtcaaatgagccacatcaatttcgactgccatgctcgcaaacgtgcaatgcctggatgtcagcgcgaggtaccaggtatgctggttgcagaaaatctgatgaggggaatagcgagcaagcaattaggatggggagatcgggattaacggattcctgaccatgtcggggtttcaccggtgccatgcacagaccctacctgcggtgtaaatcctttctcctaactcctttcatactggttgttttaggtatccttctgttcttcgtaatttgcttcatctagtttagttagagcagccaagagagagaaaagaaatgaagaacgaagttctcaaagaaaatttgctcggtgcac

SEQ ID NO: 1087 - DNA, 1437 bp, Oryza sativa
  ref <308>: DATABASE ACCESSION NUMBER: AK059149
  ref <309>: DATABASE ENTRY DATE: 2001-12-06
caagacccctatgaagatcacggtcgcgagcggttcgcttcagccgttcacgtcggatcagtggtccatgcaccagaaagacacgatccggaagaggaggaagcggatggctaccatccacgttgccgatcagcaaggcggccgcgtggttggcgcgtccgtgtccgtgagacaaaccgccaaggacttcccgttcggctcggccatcgcctccaccatcttggggaaccaagcctatcagaaatggttcgtggatcggttcaacgcggcggtgttcgaggacgagctgaagtggtactctacggagcccatgtcggggcagctgcggttcgacgtgccggaccagatgctggcgttcgtgcggtcgcaccgcgtgatggtgcgagggcacaacatcttctgggagaaccaggacgcgacgccgagctgggtgaagggcctgtcaccggacgacctccgcgccgccgtcaacggccggatccagaacctgatgacccgctaccgcggcgagttcgcgcactgggacgtgaacaacgagatgctgcactacaacttctacgagcagcggctgggcgccaacgcgtcggtggagttcttcagcgtggcgcaggacgccgacccgctcgccacgctcttcatgaacgagttcaacgtgatcgagacctgcgacgacgtgtcctccaccgtggacacgtacgtggcgaagctcaaggacctccgcgcggggggcgccgtcctggagggcatcggcctggagggacacttcctcaagcccaacatcccgctcatgcgcgccgtgctcgacaagctcgccacgctcggcctgcccatctggttcaccgagatcgacatcagcaaccggtacgacgcgcagacgcaggccgtctacctggagcaggtgctcagggaggcgtactcccacccggccgtcaccggcgtcatgctgtggacggcgctgcaccccaacggatgctaccagatgtgcctcaccgactggaacctcaacaacctccccgtcggagacgtcgtcgaccgcctcctgcaggagtggcagacggggcaggccgccggcccgaccgacgcgcacggcgcctacagcttcagcggattcctcggggagtacatcgtctccgtcacctacgccaacagcacgtcgcaggccaccttctcgctctctcccggcgacgagaccaggcacatcaacatccagatatgaccatacgtatgtacacggtacacctcctcggtgtatatggcttcaagctctgctgacatcgtgacatactgacatgtcgtcacgtatgtgtaatgggtgacagtgtactgtcacgacttgtaggttgtaattgtggttacggaggtcagttaaccataaattggttcgattgaaccatgtacatgtacctggctcgggccggagactcgaacgaaccacgc

SEQ ID NO: 1088 - DNA, 619 bp, Oryza sativa
  ref <308>: DATABASE ACCESSION NUMBER: AK059150
  ref <309>: DATABASE ENTRY DATE: 2001-12-06
accacagctagatcattagcaatccattccgatccatcaaatttctcttgagaccgtagagagagagagaggcgccaaccatggccggcatcatccacaagatcgaggagaagctccacatgggcggaggcgagcacaagaaggaagacgagcacaagaaggagggggagcaccacaagaaggacggggagcacaaggaaggcgtggtggagaagatcaaggacaagatcaccggcgaccacggcgacggcggcgagcacaaggagaagaaggacaagaagaagaagaaggagaagaagcacggcgaggagggccaccaccacgacggccacagcagcagcagcagcgacagcgactgagccgccgcgcccccacaccggcgccgtgcgtgcgtgcatgcaggtgatgctgcagatgattggaggagttcgtagcaggattaattagtatctgtgcaatacgtgatgcagtgatctgtctcatgcatgtatctgtgcttgattgcaagaaaaaaaaaaggcatggtttgcctttgtgatgtactgataataatggctgcacggtgccttgtaataagaacgctaattatgatgaaattgatgtgtattatcctggcgtc

SEQ ID NO: 1089 - DNA, 469 bp, Oryza sativa
  ref <308>: DATABASE ACCESSION NUMBER: AK059151
  ref <309>: DATABASE ENTRY DATE: 2001-12-06
aagtacgacatcgtggtgtgcctcgacgtgctgatccactacccgcgggaggaggcgaagcagatgatccggcacctggcgtcgctggcggagaagcgggtgctcatcagcttcgcgcccaggacgctctacttcgacttcctcaagcgcgtcggcgagctgttcccggggccatcgaaggcgacgcgcgcgtacctgcactcggagcgcgacatcgaggacgccctgcgcgacgccgggtggcgcgtcgccaaccgcggcttcatctccacgcagttctacttcgccaagctcttcgaggccgtccccatcgccgccgcctcgcagtaggtgttcgtccaagattttgtgcgtcttcgattcgtcattgcaaattttgcgtcgatgtaggtaatgtatgtatctaacaatcaaaatggattttgggatgtggattttcatccctcgaggagacaccccctcgttgttt

SEQ ID NO: 1090 - DNA, 1069 bp, Oryza sativa
  ref <308>: DATABASE ACCESSION NUMBER: AK059152
  ref <309>: DATABASE ENTRY DATE: 2001-12-06
cagacgttgtgctaaactcacaaaatttggttcatccgtaaatccatatgtatctggtggtgaagaagagcatctggtggattcaagaagttccctgcgtatcagctctcttacaattgatcttccatccctgctgcttgttgagcctctcaagagtctctgccacactgaacacttagaaattgaagatgcgtcacagatgaagagcttacctgatcgttggctgctgcagaacagtgcatctctcaaatccctacacatacgcaaagtcaagtccttagaatctctccaacccagcatgcgagacctaacctccctccagaaattgacgctatctggtgttggccaactcctcggttcacttccagattttcccacctctctgttggagctggatatttcggaatgtggttcagagttgaagaagaaatttagaaaacatggaagccctgaaagaagcaagattgcccacatcctcagagtgagaatagacacagactacaactacataaatataacaggaagctcgctcttcatcatgggaaaggaatgctatggagagtgaagagactaagaagagattattgtatgcggaccatgaagaaatattttcctggttggacgaatcaaaacatgtccagggaattgggtcagtatcacgctggttcagtgaacaaatggtctctacgaaacaccagttattagacggttgttgctccagtaaatattgagccaaatccttcatgcgttgccaggaaagtatagcagaccatattcttccatctgggcttactgatgacggttttctatggacgattgttccatctttttatgcatttacaacaagaaacattcagtttgacgcgtgcaagtgcatgcatgcagcaataccagcaggagaaccaaagtttttgattcttaattggagatctcatggacaatgtagatttgaatgtgcagttttggtttgtatgtcactgatgaatttcaattctagtgcttgaggctggctgtagaatttattgtcttcctgggatcatactactagagtatagcttgtatgccttcc

SEQ ID NO: 1091 - DNA, 1462 bp, Oryza sativa
  ref <308>: DATABASE ACCESSION NUMBER: AK059153
  ref <309>: DATABASE ENTRY DATE: 2001-12-06
aagtaatgtggcatctgaaaattgagtttctttgcatctaaattttatagtagtttagaagtttatattgtaccctctgttttatttacaaaagtgagtagtttttggtttttagagcagaaatatagctgcaatgttcacaaaaatgtaaagagagattaaaggggatagcctgtcttcccttgaaatcgatgcatgagttttgcatttgctgaaattttgttctgaaatgcagttttgccaatgattttcctacctggaatttctgtgcaggaaccgagatggcgcagttagtttgcggaggatgccacactctcctgatgtatacacgcggtgcgacgagtgtgcaatgttcttgctgtcacactgtcaacctggctatggaaggtactaccaaaatttatcatcctcctcctctgttgcaattggtatattctgtggctttgattccagtatgcaaaatcctcctcctgaacagaatattttcctgtggctgaaagcaacagcaatcagtcggtagcaataaacatcgtcgagttggcttgtattccagtcatattcatgagagttggctatggttcagaaaacaaaaaagtttgacaaggatacactagatttaccagagtatgatgaaatatctcctacaattacaagatgtgctacagtagtatcctatacttactgaaggtctcacaaggacacctaatttagcatcaagttctgaagttccatataatttgttcagagttcagagttttctttaaggcagacttctgaaagatgagtgtttgttcatataatcttaaacacactgaataacaaatgattcccatgttcttgatggcagcaaatcaagttgcgcatgtaaactgcgggaactgccgtatgctgctcatgtaccagtatggcgcaaggtctgtcaaatgcgcagtctgcaattttgtgacatcagttggggtaagtgttcatcaacaggacacttcaatttcatatttagttcctttatctgaaaacattcaattttacagtagcatcatctaatggctaatattgcactgcaacctgatttttttcatgatgtgaccttagttgaagagtgtgttttttttctgaatcttttcaggcctcacctggtacagaccagaagcccagcagctgaactgctgaagtgccataaatattcagaaaagagcttctcaaaccgatgctttgagtgcacatgtatagagttcttccctgaagcattttttttcttccttttttatctccctttccccccaatttccaccttccttccttggatatggagagagcctgcggaataaatgagagttttgctaaatacctagtgctcaaaattcgtcgaatcgtctgtatgaccgaacaagattgacatattatatacataaacctatgataatatttatgcattgctcattgtttctgaatagttgaaacatgt

SEQ ID NO: 1092 - DNA, 353 bp, Oryza sativa
  ref <308>: DATABASE ACCESSION NUMBER: AK059154
  ref <309>: DATABASE ENTRY DATE: 2001-12-06
gtgacaaggatggcaagctgatccctgttgctctcaaggaaggagacactgttctcctgcctgaatatggtggactcgaagtcaagcttgctgctgaaaaagagtaccttctcttcagagagcatgacatcttgggcacccttgtggactgatttggatcgtcatgaacgccatcagtaatcagttgcgctaatgcaaggcatgtttttttagtattggatcgacgggacacaatcctccagacacaactgtcttttatgatgtcgtagaattttggctaagaacatcatgaacttgcaaaagattgttgcttccttttatctgttgcgatgaaattcagtaaacgttaacgc

SEQ ID NO: 1093 - DNA, 1527 bp, Oryza sativa
  ref <308>: DATABASE ACCESSION NUMBER: AK059155
  ref <309>: DATABASE ENTRY DATE: 2001-12-06
caagctgtgtgtgacaagattgatgtaccgttggaggtagtccatctatctgatgagtattggaaccatgtggagctttcttagaagctattgaaaatttgggatttgattacatagcatctggacattatgcacatgtagttcatccatcacctgacgatgttgaagggccatcagtcctccaactttcaaaagacaaggtgaaggatcaaacttatttcctttcacatctatctcagacccagcttagaaggcttctttttccactgggatgtataacaaaggatgaagtgcgcaggctggctgctcagatggacttgcctaaccaagatagaaaggattcccaggggatatgttttcttggcaaggtcaaatttagtgagtttgttgaaagacagataggagagatggaaggagtactgttggaagctgaaactggagactacctagggacacaccgtggattttggttttatacaattggtcagcgacaaggattgcgccttcctggcggaccctggtatgtggttgagaaaggtgttcaaaacaatgtggtttttgtctcaaggaattactactcgctggataagagaaggcggacatttcgtgttggatcgctgaactggtttagcaattctggaccaacaaacaatgagcaacttaaatgcaaggtacgtcatagtcctgaatttcatgattgcaccgtgacacaagagcaaacatcagaacatggagttattttggtggtgcgtctgtctgaagatgatcaaggtttagcagctggtcagtttgcggccttctaccgtgacaatttatgccttgggtcaggcataattctggattcttgggacgaaatgaattttccagtctgtgcaagggctttagaaattgctagaatggaggataagtccagactggggaagccagtaaagataatgaacttagaacatatcgtgaaatcagaaaaggaggctattgaagtggcatgataggcacagtccctgcagccttctcttgagtcttgactactccgtacattcgtggttctgcaaagttgcacgttaaccctgcaaaagcaagaatcgtgttgtccccaggaactccagctggttcttcaaaggaggtatggttggcgagcttgcatttctgaagagggttctctggataaaagaggcggatgaacatcattatccatgcaagaattgacctggcataaattttcagcggtaagctgccgatctggcaggaaatcacacgaagggtctcggaattccactcatgagccaaagcgtctagaactctagatccgatcgtcagttaagcattacagtatcctcttatagcagtgtatcaggagatgctcctttcatgctactactagtaccggttttatttacgttgtacaaatgttaaggttattgtaggcgaacatcgaatggtagaatttctaccattcgatcatatgttttatcactttctcgtctcggttcggttggttggttctgtgccaaatcgagatgttttttc

SEQ ID NO: 1094 - DNA, 1346 bp, Oryza sativa
  ref <308>: DATABASE ACCESSION NUMBER: AK059156
  ref <309>: DATABASE ENTRY DATE: 2001-12-06
tgaaatgtactgagagtgacaacaagccactgatggaacaccccaagagaaacccatggccacctgcttggttaggatggaagaagtggtatgtgtcctggactgtagtcaattattctgatatgagattttatttcattccaccgtggccaccgccacttaaagtaggttggcttgcattggtattttctaaatttggagcagctcatactgacatgatggatataatgttgcattggactgatatgaaaccatggcctccaccaaatcaaaatttgagaagtatcatggtgcatctatttgcttggaagcattggaaagttagtgtagaagtgagtctctttgcttggaacactaaacaatacatgaatagtgtgctacttattacagttggcaccaaatggttgattcactctgcagtcaaggactgttttctccaaggcaagccattcaaacttgtggacccattggaactcatgcaagtaatttttgtgctattagtgcgggatccagatgttgagatgtttcagattggcagctactctctacaaccagaaaattatcaattaactaactacttggtggcaagactattgaagcaaggtaatctgaaaaaggtactcgatggtgtggatcatagcaaaaacattaagaagagtgatgttgatgttggcgaggacaatcctggtaatattagtactgcagcaaaaatgttcattgatggtcttggtatcaaggaagattcagacatgctatgtccatcagcccagtacattgataattggtctactaagctgctggatgagataagaaacgggtgcaatatatatctgttagtagcactaatagatgatgagcttaatccatggtgtttcctcatagataagatatggtatgatattttggtgcttctattttttactggggctacatggaaggttgaaagctatgcacttccaattaaagatgttatccatatggttgtttattttgtgcaacctttgcaaggtattctgctccaaacaaggcaaggaaaaatagagaatcctgtcattttggacataacttcagcaactcaaactgtcaagtttttgctctgttacaagtcaactattaagatctacccaagttgttcttccatggtacaaatttctgccagtaaattcagagcttgtgggaaggagaacatatgctacatgcttctattgcttgtattgaatattggtgactgcacttttctgaggtccacttcctatatgctacatgcttctattgcttgtgctgaatattggtgcctgcacttctctgaggttgtccaacatgcaatttgtattggatggattatc

SEQ ID NO: 1095 - DNA, 969 bp, Oryza sativa
  ref <308>: DATABASE ACCESSION NUMBER: AK104052
  ref <309>: DATABASE ENTRY DATE: 2002-08-28
attagcatgagtactgtcagcggcactcggcgtgccccaaggaggcaatcacaagatggtcctggtgataaagtcgttgtgaacctggacgcgatctcctccccagtggttggaagccgtcgcgcggtgccgacctccactggtgcgcgcgcctcccccattgatgtggaagctctggatgatgaagtgcagacattgtccgcttcgcaagtgcctcctccgagaaggaaccggagaactaggaggcagcctgtggcagtagttgatctggaagtagatgctagccgggaagggaacaaacgtcaaagggttgcacctgttatacactgcctctctccagaaaggggagaagggtccagcttgaagactagcaatgagcctcctaaggcaaaggaaccggtttttaactgtccggtgtgttggaacaagttggaggagccctccacaacaatttgcggccatatcttctgcacgacatgcatcaagcaagccatccagattcagaagaaatgccctacttgcagaaagagtctgagggcgaacaatttccaccgtatttaccttccaaactctgatagttaaggctcattggatgtaccaaaggaacttctggcagcagcagcagcatcctccaatctaatatattcagaggaacaggagttctcccataacgtgtaccattttgctgtggaattgtgtcacggcaaaatgaccacctagacccgcatgttcatccaaggctactgttgtttgtatgtagatgcatcaccaggagctcatcagctgcaggtgacaactctggtttaggctaccgaatggcctctctgcctccaaaggatacacaacaaaactaactatagtccccattggttagatttatctagtttgtgtactgttgtatttaccatgcgtttggccaagtaccttaccttctctccatagttgttgacgtagccttgaatcagcttg

SEQ ID NO: 1096 - DNA, 275 bp, Oryza sativa
  ref <308>: DATABASE ACCESSION NUMBER: AK059157
  ref <309>: DATABASE ENTRY DATE: 2001-12-06
aatgagtcatgcagcttctagccatccagaatcagaattcagtgttaagcgcccatggcttgtccttccagtatcacttgttttttgagcaagttatatacctaaggcattttgttctgtttagctaagcagcactgtgcacaatgatctgttttgccaagtttatgtgagaatcttgttaacgttgtcgtgatcgtattgttgattcttaattcttaaaatcctggtttggaattttcattaatctggtactcctaccagaatggattagcacc

SEQ ID NO: 1097 - DNA, 1502 bp, Oryza sativa
  ref <308>: DATABASE ACCESSION NUMBER: AK059158
  ref <309>: DATABASE ENTRY DATE: 2001-12-06
gagataccactctggaagagctcggattctaaccttgtgtcagacccgcgggccaagggacagtctcaggtagacagtttctatggggcgtaggcctcccaaaaggtaacggaggcgtgcaaaggtttcctcgggccagacggacattggtcctcgagtgcaaaggcagaagggagcttgactgcaagactcacccgtcgagcagagacgaaagtcggccttagtgatccgacggtgccgagtggaagggccgtcgctcaacggataaaagttactctagggataacaggctgatcttccccaagagtccacatcgacgggaaggtttggcacctcgatgtcggctcttcgccacctggagctgtaggtggttccaagggttgggctgttcgcccattaatgcggtacgtgagctgggttcagaacgtcgtgagacagttcggtccatatccggtgtgggcgttagagcattgagaggacctttccctagtacgagaggaccgggaaggacgcacctctggtgtaccagttatcgtgcctacggtaaacgctgggtagccaagtgcggagaggataactgctgaaagcatataagtagtaagcccaccccaagatgagtgctctctcctccgacttccctagagcctccggtagcacagccgagacagcgacgggttctccacccatacggggatggagcgacagaagcatggaaataggataaggtagcggcgagacgagccgtttaaataggtgtcaagtggaagtgcagtgatgtatgcagctgaggcatcctaacgaacgaacgatttgaacactgccagccagccagccactcatcaatcactcaaggcccctcctcctctctccatcaagagaagctctacctcggcccgtcctcgcccgccggccggccgccgtcgccatggctcccggcaagctcgcggtgttcgccctcctggcgtctctcctcctcctcaacaccatcaaggccgcagactaccctccggctcctccccttgggccgcctccccacaagatcgtagaccccggcaaagactgcgtgggggcgtgcgacgcgcggtgcagcgagcactcgcacaagaagcggtgcagccgctcctgcctcacgtgctgcagcgcgtgccgctgcgtcccggcgggcacggccggcaaccgggagacctgcggcaggtgctacaccgactgggtctcgcacaacaacatgaccaagtgcccgtgagctaagcgcgcacgaatacgatccgtctgcctgcctagatctagcttaatttagctttgcattgctcctagttgagtagttggtgttgtccgttgggtttctgtctttccagagttatccttttttctttttctttttttttcttcctgagagaagagagggtgttgacgagctgttactgttagtattctggacctctagtatgttttgttgtgtaaaaaaggactagtgaaatccatctcggcttgaatcacgcttg

SEQ ID NO: 1098 - DNA, 288 bp, Oryza sativa
  ref <308>: DATABASE ACCESSION NUMBER: AK059159
  ref <309>: DATABASE ENTRY DATE: 2001-12-06
aaaaaaggaacaagaagcccaccatcacctcccgggagatccagaccgccgtccgcctcgtcctccccggcgagctcgccaagcacgccgtctccgagggcaccaaggccgttaccaagttcacttcctcctaggctgtacgcctgcatctagtcctagtagtaatagtagtttttatatgtttatgtggtatattgtttaagtgatatccaagattggaaatggatgttaaattgttggtttggtagtcattggctgtaagaagaatggctttgggttgcttttggg

SEQ ID NO: 1099 - DNA, 526 bp, Oryza sativa
  ref <308>: DATABASE ACCESSION NUMBER: AK059160
  ref <309>: DATABASE ENTRY DATE: 2001-12-06
aacgcgtctcctctcctctcttctcttctctctccggcggcggcggcggcggaatccgatccgaaccaagcaaaaatgacggccggatacattgctgggtccttggttggatccttcgccattgcttacctgtgtgacacatttgtttctgacaagaaggcatttggaggttccattccaaagactgtctctgacaaggagtggtggcaagccactgacaccaagttccaggcctggcctcgcaccgctggaccaccagtcatcatgaaccccatcagccgccaaaacttcatcgttaagtccacttagacgagagaaactggttcagtgtcgtgattttaccatgaatatgaagtttgttttctaggccttgagattgtaataagatgcaacagtcaggatacgttttgcatttttcacttcacctgtgagcaaacattggagcttacattatactcacatttgatgaattctgttcctcggtgaaaaatttccactgggcagtaaagaattacattgttttcct

SEQ ID NO: 1100 - DNA, 1291 bp, Oryza sativa
  ref <308>: DATABASE ACCESSION NUMBER: AK059161
  ref <309>: DATABASE ENTRY DATE: 2001-12-06
gagtgtagcttcctccctagctgtccgcgactccgcgaccgacggcggcggcggcagatggagaggaaccagcaccgcgacggcgacggcgacggtgagggacgccatcatcatgtcgtccaggtcccagcgtcagcagtagaagttgcagcaatggaggagacctcatcagaggcagcagatcgctctctgcgtcagaaggcagcagcgatggttgcctcctccatggagacgtaccggagcaagcccatgtccttctggctgctgctcgtcctcagcgccggcgcgatgctcacagcgttcccggcgtcgagcctcctgtcgcggctgtactacaacaacggcgggcagagcaagtggatcctgtcgtggtccgccgtcgccggctggccgctgccggcgctcctcctgctgccgtgctacctcgccggcaaggcggcgccgacgccgctgtcgccgaagctgtgcgcctggtacgcgctgctcggcctcctgagcgccgccgacaacctcatgtacgcctgggcctacgcctacctcccggcgtccacggcgtcgctcgtcgccgcgtcgtcgctagcgttctcggcgctgttcggctgcgccatcgcgaagaacaggctgcggctgtcgtcgctgaacgccgtcgtcgtcataaccgccggcgtggtgatcatcgcgctggactccgggtcggacaggtaccccgggatcacgggcaggcagtacgcgctggggctcgtctgggacgtgctcgggtcggcgctccacggcctcatcttcgcgctgtcggagctggtgttcgtccgggtcctcggccggaggtcgttccacgtcgtgctggagcagcaggcgatggtgtcgctctgcgccttcgcgttcaccaccgtcgggctcgccgtgagcggcggcggcttcccggcgatgcggcgggaggcggcggcgttcaggcacggcgaggcgtcgtacgcgatggtgatggtgtggtcggcggtgacgttccagctcggggtgctggggggcaccggcgtgctgttcctggcgtcgaccgtcctcgccggcgtgctcaacgccgtgagggtgccggtgacgagcatcgcggcggtgatctggttccatgaccccatgagcggcttcaagatcctgtctctgctcatcaccgtatgggggttcggctcctacatggttggccactcctctaccaagaaagcatccacaaattgatgtactcttattgttcttctcctggaacatgaaaaatatgtgaactgagtatgttcttgtattgacc

SEQ ID NO: 1101 - DNA, 1026 bp, Oryza sativa
  ref <308>: DATABASE ACCESSION NUMBER: AK059162
  ref <309>: DATABASE ENTRY DATE: 2001-12-06
atgtgatgcgcacccatggagctagacaacagagagatgctgtcagaagagctccaagggaacaaatgcaatctgtgtttgaggccttaaatactcttgggagcaccaagtggagggttaacaaaagagttcttagtattgtcgacagaatatggtcaagtggtggccggcttgctgacttggtcgatcgcactgatgttgctttaccagagaagcctgacacagaagatgaagacaagttgaagaaatggagatggaccttgagagcagccaagaaggaaaatagtgaaaggcactcccagagatgtgatgtagaactaaaacttgccgtagctcgcaaaatgaaggatgaagatggtttctactatccacacaaccttgattttagaggccgtgcttatccaatgcatccttacctgaaccacttgggttcagatctttgccgtggagttttggagtttgcagaaggtcgtccgcttggtaaatcaggcttgcgctggctaaagatacatctagcaaatttatatgctggtggtgttgacaagttatcgtatgatggccgaattgcattcacggagaatcacttggaggacatatttgactcagctgatagacctcttgaaggcaaacgatggtggcttggagctgaggatccattccaatgccttgcagtgtgcataaatctcactgaagctttaagaagcccctcaccagaaacgatgatctcacatattcctgtgcatcaggatggttcttgtaatggcctgcagcactatgctgctcttggaagggataagttgggagccattgctgtgaacttagttgccggggagaagcctgcagatgtttatgctggaatagctaccagggtggtggaaattatgaagaacgatgcgctaaaagatcctgctacagatcctgatgcagcacgcgcacgtctgctacttgatcaggttgacaggaaattggtaaagcaaactgtgatgacatctgtgtatggtgtcacttatgttggagcacgtgagc

SEQ ID NO: 1102 - DNA, 638 bp, Oryza sativa
  ref <308>: DATABASE ACCESSION NUMBER: AK059163
  ref <309>: DATABASE ENTRY DATE: 2001-12-06
aaaaaaaaaaaaaaaaaaaaaagagaacaaaaccctagaattgggggaagggttcatcaggtcttcttctcttctggaggcgcgctgctcttcgcggcatctcaattcccaccgccgcatcgcgagatctccggccttttctccttccggttgaggagcaaagagcagcaattatggcggcgaaacccgagccgacccagttggagaaggagcagatgttcgggatgatggagaaggagatggagtaccgggtcgatcttttcaaccgacttacacagacttgttttgacaagtgcattgagaaaaggtataaagaagctgagctcaatatgggtgagaacagttgcattgatcgatgtgtttcgaagtactggcaggtaactaatatggtaggtcagatgctcggtaaccggcctcagatgtgaggcgagaagcagtagaagcattaggccagaccattgtcgctatgtttctccacattggttttagaatgttaccgattgccagaagtacacagcacgagtgagtgtgaccgactaatggattgcccgaaaagaaattgcaatgttcctttccaatggtgtaccttctccctgaatcatgaacaggccacatgcctataataatttggtacagct

SEQ ID NO: 1103 - DNA, 779 bp, Oryza sativa
  ref <308>: DATABASE ACCESSION NUMBER: AK059164
  ref <309>: DATABASE ENTRY DATE: 2001-12-06
ctcgtgctctctttgaggtgggttggcttctcctccccctctttaccttttcctcctcggttcggttccgtggttcgtctagggtttagtgggttgagatggcggcgccggatgtcgagtaccgctgcttcgtcggcggcctcgcctgggccaccgacgaccgctccctcgaggccgccttctccacctacggcgagatcctcgactccaagatcatcaacgacagggagacggggaggtcacgtgggtttggcttcgtcaccttctcctccgagcagtcgatgcgcgacgccatcgagggcatgaacggcaaggagctcgacggccgcaacatcaccgtcaatgaggcccagtcccgccgctccggcggcggaggcgggggctacggcggcggcggtggcggctacggcggcggtcgtggaggcggcggctacggaggaggtggcggcggcggctacgggcgccgtgagggcggctacggtggcggcggctacggcggcgactccggcgggaactggaggaactgattggtggggcccatcgtggccagttatccttagctatccgtgtcagaatcatcttatcatcgagtcgagtcgttatcgtgtccagtggctctctcgagtcgagaagccctctatccatccatccagtgttaggtgttcttcgtccgtgatgttaccatgaattgagttcgctttggttatggtgtttgaactgcttgttgctatctatcggaatgaaatgaaatagaaaacaaggagaaaaaaaagagttcg

SEQ ID NO: 1104 - DNA, 588 bp, Oryza sativa
  ref <308>: DATABASE ACCESSION NUMBER: AK059165
  ref <309>: DATABASE ENTRY DATE: 2001-12-06
aaactcgcgaatcctcttttcccagaagaagaaaaaagaagggctgcgactcattcgaaccgcgcatctcgtctcgtcgaagcgagcgaaaccacacgcggcgcgtcgatcccaacaccaccaacgcaacccctacccatggcggcggcgggcggcggcggcgcgggggcggccggaggcgggaaggtgtcgttcaagatcatcctcacctccgaccccaagctccccttcaaagtgtttagcgtgcccgaggcggcgccgttcaccgcggtgctcaagttcgccgccgaggagttcaaggtcccgccccagaccagcgccatcatcaccaacgatggagttggcatcaacccacagcaaagtgcaggcaatgtgtttctaaagcatggctcagagttgcgcctcattccccgcgatagagttggagcattggctgcgcctttctagattctatagttataattgagaaacttaacagaataaagtcgatgttgggtgcttgcttgcttgtataatgtgacaagttgatgataatttatcgacagtttacctggtattttcaacatgtttgccggctgttatatggtt

SEQ ID NO: 1105 - DNA, 850 bp, Oryza sativa
  ref <308>: DATABASE ACCESSION NUMBER: AK059166
  ref <309>: DATABASE ENTRY DATE: 2001-12-06
actcgacagtcgatcgccaacaagcccaaacccggagagagccggaggagatccgtcgtctcccgcatcctcaccggccgccggcgatggagaagggcaagggcctcgcccgccgctgggcggtggagctccacgacgcctcctcctcctcctcctcccactcctccatccccgacccgcccggcttcaccagatccgcccccgacgcggacgacgccgccggcgcgcggcagcggaaggattccgagaccgcgtggaaggcgcagaaagcgtgggaggtggcgcaggcgccgttcaagaacctgatgatgatgggtttcatgatgtggatggccgggagcaccgtccacctgtttagcataggtatcacgttctccgctctgtggcagcccatcagcgccctccgctctgttggcaaagtttttgaaccattcaaggacccaagggtggatactctagcacctaagttggtctttattgctctcaacttggcagctatgggtttaggtgtatggaagctcaatacgttgggtcttcttccaacaaatgcatcagattgggtgttttcactggctcctgctcgggaggttgaatatgctggtggagggatccccttgcactgaaacctttatgtgcttcagttagtacttattaaagttttaccacttggaagatggtgtctgtactaagcgaaaaattaccctgcagatgggacaagtctggtttttgtgaggatcatatttcagcacctgtactaaacttgcactatatcttgagacaagtaacttacaatttccttgaccccttttgtttaccctggttatttatacagagtcagttgattcttagt

SEQ ID NO: 1106 - DNA, 547 bp, Oryza sativa
  ref <308>: DATABASE ACCESSION NUMBER: AK059167
  ref <309>: DATABASE ENTRY DATE: 2001-12-06
aaaaaaaaaaaaaaaaagaccaaggagtcgccggagatttgtaagatcaaggtcggaggagcgatcctaatgcaccacctgggtaataaaccttcgttgctcgttgtgaaattcgatcaccatgaatcgttgatgattccttgcatgatcctaaaaaaatgtcagtggactagtggagttgcaggtggtctgctgctttgaatggcaacatattgtgttcatccctgcagtagaagacccgaggcaaatgggttaattggattatctaggtgcattccatccgtgttgtgttcacaaagccttctgtaatatgatgtagagaatagctgaaattggcatgcttagggcttgacacttgctcaaccaaaaatgctcttaagctctgttggtgttgtggagatgcatcataagcagggctgcctcgtgagcagtttggccatttgttgtatagagtatctgcaaatacattgtaccgaatttgttcgtgttgctgctgttctactttgatatctttgttcaatgggaattttagaatcaaatttcgtcc

SEQ ID NO: 1107 - DNA, 1425 bp, Oryza sativa
  ref <308>: DATABASE ACCESSION NUMBER: AK059168
  ref <309>: DATABASE ENTRY DATE: 2001-12-06
aagcacacagacgagtgtgactgacatagctagctagctcgatctcgccggaaatggcagctcgcgtcatcctgctcctcatcctcctcatcgcctgcgtcgccgtcccggcggcggcggcgttcgagacggtgtacgcgttcggcgactcgttcacggacacggggaacacgcactcgacgacggggccctactccttcggctacgtgtccagcccgccgtacggcgccaccttcttccaccgctccaccaaccgctactccgacggccgcctcgtcgtcgacttcctcgccgaccgcctcgcgctgccggggttcctcccgccgtacctctcccccgccgccgccaacgccacccacggcgtcaacttcgccgtcgccggcgccacggccatcgagcacgagttcttcgcgaggaacaacctcagcgtcgacatcacgccgcagtccatcatgacggagctcgcctggttcgaggcgcacctccggcggtcgcccgccgccgccagggccgtcggcgacgcgctcttctgggtcggcgagatcggcgccaacgactacgcctacagcttcatggccgccaccaccatcccccaggaccaaatccggaacatggccgtcgacaggctcaccaccttcatcgaggcattgctgaagaagggggccaagtacataatcgtacaggggctacctctaaccggttgcctgccactgaccatgacgctggcccgcccggaggaccgcgacaacatcagctgcgccgccaccgtcaaccagcagagccacgcccacaaccgccgcctccaggccagcctccgccggctccggcggcagcacccggccgccgtcatcgcctacgccgactactacgccgcccacctcgccgtcatggcggccccggcgaggtacggcttcacggagcccttcaagacttgctgcggcgccggcggcggcgcctacaacttcgagatcttctccacctgcggctcgccggaggtgaccaccgcctgcgcgcagccggccaagtacgtcaactgggacggcgtccacatgacggaggccatgtacagggtcgtcgccggcatgttcttccaggacggcaggtactgccacccgccgttcagcaccttgctcgccaggcggaacaaaggcaattaagcaagtgatcatatcttttctgccattaagcaatattgatcagtgttgttgtctctttagtagctaggtgatcattgatcagcattgccattgaagtattgaactgaattctgagcagcatcagtattaagctcttcattcttgaatcattttgtgacttgtgttagccaggcataccatgtgccattattgtcgacgacagagcattcaataagaagaaacctagagttttaggtgaagtttccacttaccagctcttggcttaatc

SEQ ID NO: 1108 - DNA, 1396 bp, Oryza sativa
  ref <308>: DATABASE ACCESSION NUMBER: AK059169
  ref <309>: DATABASE ENTRY DATE: 2001-12-06
aagcatttaaggaaatcaaggtgcctccaccactaagtcctccaagtagtccacccatgtccagtggtcctccacaaagatctaagagatggttgtatgccattgtgatttcatcaatcgctctgctgtttatcggcatagcatgcatgtttttgctatgccgcaacaaatcagtggcgacaataggtccatggaagactgggctcagtggacagctgcagaaggcatttgtgacaggagtaccaaagttgcagcgctcagagctggaaggtgcttgtgaggacttcagtaacattgtcgcaagctatccacactacactgtatataagggaaccttatcaagtggcgttgagatagctgttgtatcaactgttattgcgactaacaaagattggtcgaagcattccgaagggagattcagaaaaaagatagatttgctctcacgaattaatcacaagaacttcatcaacctgcttgggtactgtgaggaggagaatccttttatgaggatgatggtgttagaatatgcacccaatggaacactctatgagcatctccatgttgagggattcgatcatattgattggaatggtaggatgagagtaattatgggggtagcatactgcatccaacacatgcatgagctgaacccttctatcacacatcctgacttacattcaagtgccatattgttgtctgaggatggagctgcaaaggtagcagacatgagtgtttggcaagaagtgatttctaaaggaaaaatgcccaagaacgatgacattgttgatcaccatgagcctgtgtctgccgatccagctgggaacgtgtgcagttttggtctactcatgctggaaatcatctcaggaaggcctccatattctgaacacaagggctcccttgcgaacttggctatggagtgcattaaagatgaccggaatatatcatgtttgcttgatcctaccttgaagactcacaaagaaaacgagctagaaatcatctgtgagttaatccaggagtgcatccaaagcgacccgaagaagagaccaggcatgcgagaggtcaccactagactgagagaagttctagcaatctcaccggaggcagcaacgccgagactgtctccactttggtgggcagagcttgagatcctttcggttgaagcaacctaggagaaagaaagtgtcaatatgatgtggttcttacagcaactctgagtttctgtgcgcaaacttgtacatccccgtttgtgcgtttctgcatttctggtgagttcgctgtccgcattgcggtactttctccccctccagtaaatttctggtgagtttgttgttttcttttttttttctctgtatactaaacatacatggtgtgaaaatagaatgattcaggttatcct

SEQ ID NO: 1109 - DNA, 1384 bp, Oryza sativa
  ref <308>: DATABASE ACCESSION NUMBER: AK059170
  ref <309>: DATABASE ENTRY DATE: 2001-12-06
ctgatttccagtacgaatacgaaccgtgaaagcgtggcctatcgatcctttagaccttcggagtttgaagctagaggtgtcagaaaagttaccacagggataactggcttgtggcagccaagcgttcatagcgacgttgctttttggtccttcgatgtcggctcttcctatcattgtgaagcagaattcaccaagtgttggattgttcacccaccaatagggaacgtgagctgggtttagaccgtcgtgagacaggttagttttaccctactgatgaccgtgccgcgatagtaattcaacctagtacgagaggaaccgttgattcacacaattggtcatcgcgcttggttgaaaagccagtggcgcgaagctaccgtgtgccggattatgactgaacgcctctaagtcagaatccaagctagtgcaacgtcgagccgcgccaccagcatctatggctgcggcgctcgccaccgtcgtgtctttcctgctcgtcgtcctcgtctccgtcgcccacggctggaacaaagactgcccgcctcccggtagcggcagcagcggcggcggccaccacggcaagccgcccggtagcggcagcggcggcggcggtcaccacggcaagccgcccgagcaccaccaccaccacaaacctcccccgtctccccggtgcccgtcgtgccacccgccctacacgccgccgacgccacggccgccgccaactccgccgtacgttccatctccaccaccatacgtgccaccctacatcccgccgccgacgccgccatacgttccaccctacatcccgccgccgacgccgccgtacgtcccgccgccgacgccgccgtctcctccgccatacgtgccgccgccgacgccgccgtcgccgccgccgtacgtgccgccgccgagcccgccggcgacgaagacgtgcccgatcgacgcgctgaagctgaacgcgtgcgtggacgtgctgggggggctgatccacctggtgatcgggcagaaggcgagggcgaagtgctgcccgctggtgcagggcgtggcggacctggacgccgcgctctgcctctgcaccaccatccgcgcgcgcctcctcaacatcaacatctacctccccgtcgcgctcgagctgctcatcacctgcggcaagcacccgcctcccggcttcaagtgccccccgctctacggcgcctgaactgaacaaacgaagcagcagctagcaaagcttcgtcgtcgtcgtcaatggcggaggctactatactacaccctcgctagctagctatactgtgctacctttactctctcgatcgtactcgtgtctgcgatttgtgttgtattaatgtactacctccggttttaatccaagtgtagtttaattaattaatcc

SEQ ID NO: 1110 - DNA, 1605 bp, Oryza sativa
  ref <308>: DATABASE ACCESSION NUMBER: AK059171
  ref <309>: DATABASE ENTRY DATE: 2001-12-06
gatctccgccgccaccgccaatccccgaaccctacctctccccccctccacccatggcgctctcccgccgcctcctcccgctcctcctccgccgcgggtccaccccctccctctcccccgcccgcgcgctctccacggccgccgtgacggccgatgctcccgccgcggcggcggcggcggcgggggaggaggcgatgaccatcaagggcgtgcgcatctcggggcggccgctgtacatggacatgcaggcgaccacccccgtcgacccgcgggtgctcgacgccatgctccccttctacctctcccgctacgggaacccccactcccgcacccacctctacggctgggagtccgacgccgccgtcgaggaggcccgcgcccgcgtcgcctccctcgtcggcgccgaccccagggagatcttcttcacctccggcgccaccgagtgcaacaacatcgccgtcaagggcgtcatgcgcttctaccgcgaccgccgccgccacgtcgtcaccacgcagaccgagcacaagtgcgtcctcgactcctgcaggtacctccagcaggaaggcttcgaggtcacctacctccccgtgcgccccgacggcctcgtcgacgtcgcgcagctcgccgacgccatccgccccgacaccggcctcgtctccgtcatggccgtcaacaacgagatcggcgtcgtgcagccactcgaggagattggtcgaatctgcaaggagaagggcgtgcccttccatactgatgctgcccaggcgctcgggaagatcccgattgatgtcaaccaaatggggattgggctcatgtctttgtctgcgcacaagatttatgggccaaagggcgtgggtgctctctatctgcgtcgtcgaccccgcattcgtgtggagccgcagatgagtggcggtggccaggaacgcggaattcgcagtggaacagtgccaacgcctcttgttgttggatttggtgctgcctgcgaaattgcggctaaagagatggactatgatcacaggagagcctcggttctgcagcagcgccttcttgatggcatccgtggacaggttgatgatattgttatcaatggaagcatggagcatcggtaccctggtaacctgaatttgtcatttgcatatgttgagggggagagcttgctgatgggcctgaaggaggtggctgtgtcgagtggcagtgcctgcactagtgccagcttggagccctcttatgtgctgcgggcacttggtgtagaagaggacatggcgcacacctccattcgctttggcattggccgctttaccactgaggaagaggttgacagagcaattgagctcaccgtgcatcaggtgaagaagcttcgtgacatgagtccactgtatgagatggccaaggcaggcattgacctcaagagtatccagtgggcgcagcactgagacagctttcacttagagctaatccctggctgcttttgaagtgcacggaaggacacatagataggtacatggctctgctgctttgtgatatatcctgttttatttcataattatttcataagggagatgtggaattgctatggctgctattaagttgcttgagtaaccttgcacc

SEQ ID NO: 1111 - DNA, 446 bp, Oryza sativa
  ref <308>: DATABASE ACCESSION NUMBER: AK059172
  ref <309>: DATABASE ENTRY DATE: 2001-12-06
agcgggaatggcggttctggttatccaaatgcttgggctgatccttcacaaggtggagggtttggggcttcagtcaatggagtgtctgaaggccaatcaaattatggcagtggttatggtggtgtgcaacctagggttgctcagtaaatgaggccattagagcatctatgagatgaaccagcaaaattgggcagtctatgtatgttgtgttaccctggcccctctgattgcttttggcctcttgaagatctcccatttgctggttaaatcagtatttctccgggttggaatgcttgaaccttttgcggcttactactagaatgtagtcaataactagcttctagctatactatggagtagctgtatcttgcgtaatgctttatttaagtttagccttatctgtcggtgtgctttgtcatgagtggaatttcagttgcttcgtctct

SEQ ID NO: 1112 - DNA, 316 bp, Oryza sativa
  ref <308>: DATABASE ACCESSION NUMBER: AK059173
  ref <309>: DATABASE ENTRY DATE: 2001-12-06
aaaatgatggcactgccggagtgtttgccaaatttgctgcatccaagtgccatagtagaataagtcgagcctgccgatccacgtggatctgcttttgccccaagtttgttccatgtttgaatagaacatgagtgtgctatatcgatttgaattgttgtcgaccagtgttcactcgcatatgcggtctgacaaatgatagacccgcgagcaggaggatgtttggcttttgcttgtacagtttatgagcttttgggtggcggtcaagtctttgtcgggtccttggcaaatgatacaatgcatagtctggttttgactt

SEQ ID NO: 1113 - DNA, 1789 bp, Oryza sativa
  ref <308>: DATABASE ACCESSION NUMBER: AK059174
  ref <309>: DATABASE ENTRY DATE: 2001-12-06
atcaggttattaagaaccatcctagttcattaaagctttatgaacagaaactgctaggaacaggcgaagtctcaaaagaagacgttcagaagatccacgagaaagtcaacagaatcctgaatgaagagtttgcaaaaagcaaagattatgttcccaataagagggactggctttcggcttactggactggcttcaagtctcctgagcagatttcacgcgtccgcaacactggggttaatccaggggtgctgaaacgtgttggacaggcaattactactttacctgaagacttcaagccccacagggcagtgaagaagatttttgagcagcgtgcagcaatgatcgagagcggtgaaggaattgattgggccgttgctgaagcccttgcctttgcaacactcattgtggaaggcaaccatgttaggctgagtggacaggacgtggaaagaggaacttttagccaccgtcatgcagttctgcacgaccaggaaaacgggaggaaacattgcccacttgaccatgttgtgatgaatcaaaacgaggagctgtttaccgttagcaacagttcactttcagaatttgctgttcttggttttgaaatggggtactccatggagaaccctaattcactagtgctctgggaagctcagtttggtgacttttccaatggtgcacaagtgatgtttgaccagtttttgagtagtggagaggcaaaatggctgcgtcaaactggccttgtcgttctactgcctcatggttatgatggccaaggcccagagcattccagtgcccgtttggagcgctttcttcagatgagtgatgataatccttttgtcatacctgagatggaaccaacactccgcaagcagatccaggagtgtaattggcaagttgtgaacgtgacaacgcctgcaaactatttccatgtgctgcgtcgtcagatacatagggagttccggaagcccctgattgtaatggcccccaagaacctacttcggcacaaggattgcaagtcaaatctctctgagtttgatgatgttgaaggccatccaggtttcgataagcaaggaacacgcttcaagcggttgataaaggaccggaatgaccacaagcaagtcgaggagggtatcaaacgccttgtattgtgttctgggaaggtgtactatgagcttgatgaagaacggaagaagactgaacgcagtgatgttgcaatttgcagagttgaacaactttgtccattcccatatgatcttatccagagagagctaaaaagatatccaaatgcggagattgtctggtgccaagaggaacccatgaatatgggcgcatatagttacatctcccctcgcctgtacgcctctatgaagactcttgggcgtggttcattcgatgacatcaagtatgtgggcagggcgccttcagctgcgacagctactggcttcctgtcggttcatgcgcaggagcagacagagctggtaaagaaagcactgcaggcagagcctatcaagttcccctgatatgatgcatctgtggtttccacttggtgcttatacttgtgcaagacaagtgtgtgcgagctcagctcgtccagcctttgcacacataccataccatcttaaaagttttgctatgtatttacaagctactgtttctctagcttgtttgaggcgattcgatttgaatgtcgtgaataatgcactatttgagccttcttatcgttgaggaggaacctgtttcgacgtgagcaacaaattttgcaatatagtagaagctttagcttcctttcttt

SEQ ID NO: 1114 - DNA, 1504 bp, Oryza sativa
  ref <308>: DATABASE ACCESSION NUMBER: AK059175
  ref <309>: DATABASE ENTRY DATE: 2001-12-06
atcatcaatggcgggcgcgggcaagggcaagggcgaggtcgagggcatggagcagaagctggagaagctgatgtcggcgtttcacgaccatcaggaaggcaacaaggcggtgaggcatcagaaggagctggaggagctcttcagcttcctcagggagcacgaggccgccttctcgcagcttccaggggacaagaaggacgacctcgacgccctcctccgcaacatcgagggcgtccttgagctgtgcaagaatcaggaggagaagaagaagaagacgacgaacaagatgggcgactgcatccccttcaagtcgtcgtccaggccgcctgctgaccacacgtcgtcgacgtcggtggtggcgccgttgctgatgcaggccagggacattctcggcgactcatcatcatctgctcctgcagctgcagggcctaataagaaggaggtgctgtacgagtggacgacgagctacgtcgacgagaagaggctatacgggtgggacgacgaggccacggaggtggcggacgccctcgccggccccgaggaagacgacgacgagctgttcagggcggcgggcatcttcggcatccacggaagcggcaagacggcgctggcccagaaggtgttcgtccacgaccgcatcaaggacaccttcctgctccgcctctgggtgtgcgtcggcccgacgccgccggacgatgacaagcaacagcagtacgaggtgaagtttagcctcctctaccgcatgctcgacaacctcggcctcgacacctataaggtggaggaagtcgtcaacggctcggaagccgtcaagaagcacagcggcgacagcgacgccgccaaggagtccaagatcggcgtgctgctcttcatcctgcacgtggcgctggccaagacctcctacctcatcgtgttggacgacatccgggcgtacgacccctggtacaccaacctggcgctgccgccgccgccccacggcgagtggagcgaccgcctcgcctacggcctgcccaagctgaacaagagcgccgtgctcgtcacctgccgcaaggaggagcacgccagggccatggtgcgcaccggccgcgtcttccacccgccgctcctcgccgtcgccgacgcctggaagctcttcgaacgcgagtacctgcaggaggccgagaagaaacaagtcgggtacaacgtcaaggacgacgtgctgtacaatgatctcaaggtggtgcaggaggggatggtcggcaagtgcctcggcctgccggtggccatcctcgaggccgccaagggcttcgcccagtactgcacctacgttgatgacgacgatgccaaaactactcaacccactactgctaaaggtgccgacgccggcgaccctgctcatgctgccgcctagatccactctcatccatccaaacactatacttatacatatattccgtaatttaatgttttgctgcacacgcatgctactctcgcaatgccatatatatcgtccatcatttttcttcct

SEQ ID NO: 1115 - DNA, 655 bp, Oryza sativa
  ref <308>: DATABASE ACCESSION NUMBER: AK059176
  ref <309>: DATABASE ENTRY DATE: 2001-12-06
tcgcaatccggtttggctctgtcgaaaattgcaagaaatttaaggatttggttgaagagatttcggaatcacttgcaaagacagaaggcaaagaaaccgaggaagattcgtctgccgctggccttctggagaaactcagcgtaactgaaaagaagtctgaggaagtggcgacaaaggaggaatcgaccgaagcagtcaaggagactgacaccaaatcagctgccacctcagagtaatcagcagtgtgttacctccagaacactagtgctcggtgggaagggtaagtttgtcagtgcttcccgtctatggaagttaaaagtcgttagccatgagctatgttgagaacatttgggcagagtcggaagatgtcagggtcatctttacctattgggcgttcacttgttattatttatttgtttgtgtatggtttctgcttagagtcgcaggttggcttttggatcaggtctgttcggatctcgcttttatcgagaacacgaaatgtagtccatgagtaggacgagttggaacgttttgggtccgagttacgagtatcttgacagcaagatgtttatggatgcgtgctattcatataaattacatgataccatgttcaactctaatccagttgctatgggaaagacgatatttcatttct

SEQ ID NO: 1116 - DNA, 1562 bp, Oryza sativa
  ref <308>: DATABASE ACCESSION NUMBER: AK059177
  ref <309>: DATABASE ENTRY DATE: 2001-12-06
cgtcgtctccttcgtcctccacttccccctcccacccaaagacgcgcagccaaatccgacgcgtgcggcggtgcgacgccggccggggtgggggacgccatgagccgcacgctcctctcccacatcctccaccgcccgccgccgctcctcgcgtcgaggggtggtgggcgaggaggagcgctcccgtcccgcctccgcactctccgactcaactgcagcgtggctgaagcgactgcctccggcgacgaggcgcctgctcctccggctaggaagaaaagagtagtttctggtgtacagccaacaggattggtacaccttggaaattatcttggtgctattaagaattgggttccacttcaggatctatacgagacattatttttcattgtggacttgcatgcgattacgttaccatatgaagcaccacagttgtcaaaagcaacaagaagcactgctgcaatatatctggcttgtggcattgacagttcaaagtctcatgtccgtgctcatgttgagttgatgtggcttctgagttcttctactcctattggttggctcaacagaatgatccaattcaaagagaagtcacgcaaggcgggtgatgaaaatgttggagtggcacttttgacttatcctgttttaatggcttctgacattctcctgtaccagtccgatctggtgcctgttggtgaagatcagacacaacatttggaattaactcgcgaaatcgctgagcgtgtaaataatctatacggtggaaggaaatggaagaaaatgggagggagaggtggttcactatttaaggttcctgaagcccttatacctccagcaggggctcgtgttatgtccttaaccgacggtctctccaagatgtcgaagtctgctccttcagatcagtctcgtattaaccttcttgatccaaaagatgttatcatgaataagattaagcgctgcaaaactgactcgttcccaggcttggaatttgacaacccagagaggcctgaatgcaacaatcttctctcgatctaccagattattacagggaaaactaaagaggaagttatcagagaatgcgaaaatatgaactgggggtcgttcaaaacaactcttacagatgcattgattgatcatctgcaacctatccaggtccgctacgaggagataatgtctgatcctggttatttggatggtgttctcttagaaggatcaggaaaagctgctgagatagcagacatcaccctcaacaacgtataccaagccatgggtttcttgcgcagatagcatgcgcttcaaccatccggaacatttcaaagattttttacgaggtcaaaaagttttgttcggtctgtgttactttgttccccttaccattggccttaagattgtttttatgcacatattggccttactagatttacaagagctccattctccaaattttataggaatatcaatcgttttgcttgatgttacgtagtagcctctttgtttctggctctacaaaaacctgtatggtccattaaatttctcatcttaatgacactgatttctttgaagttttg

SEQ ID NO: 1117 - DNA, 605 bp, Oryza sativa
  ref <308>: DATABASE ACCESSION NUMBER: AK059178
  ref <309>: DATABASE ENTRY DATE: 2001-12-06
tctgacgcgatgtcctcatatcatgagctacagtgtcaatgacaatctcaggccaactgctgaatacttccagtcaatcggtgcggatgctgcgtctcttattcagaaaagcccacaggcttttggtctgaacattgaggcaaagctaaaaccgatcacagaatttttcctggagagagacttcaccatggaggaaatcggcactatggcgaatagatttgggattattcacactctcagcatggaagataatctgcttcccaaatatgaatatttcctgacaatgggatacccaaggaacgagctagtgaaatttccacaatacttcgggtacagtttagaacagcggataaagcctcggtatgctcggatgattgattgcggagtgaggttgattttgaaccagctgttgtcagtttcagatagcagatttgaagatattctacggaagaggatggatggaatatgagatggtcataatttcggataaccatggtttaggacaatctcatttgtaacaagacttgatcgctgccctggtatatagtttatcagaacaagtagtgtcctggaaatttgtacttagccatgcttggcagctgacc

SEQ ID NO: 1118 - DNA, 1046 bp, Oryza sativa
  ref <308>: DATABASE ACCESSION NUMBER: AK059179
  ref <309>: DATABASE ENTRY DATE: 2001-12-06
aacaaaaacaaaagcactcgactcgactcgtgcgccgccgcgcgcgcgcacgcacgcacactccggcctcgctcgcatggcggcgtccacggcatccgccccgttcacgccgctcctccaccggcggcgagcgagcgtccacggccggcgcgggagcgggagggcgttcgtcgccgtcgtcgtcgcggcggcggcggggggcgcgccggagacggagccgtccccggctacggcggccggggcggcggcgcaggggaagaagaagacggtggacacgaggatacactggtcggacccggacgaagggtgggtcggcgggaacgccaagaaggacggcggcggccggaagaaggagccgctcggtgggaggttcgccgacctcatcaacaacccgtccgagtctcactaccagttcttgggggtggaaccgaaggcggacatcgaggagataaaggcggcgtaccggcggctgtccaaggagtaccacccggacacgacgtcgctgccgctgcgggaggcgtcggagcggttcatccggctgcgggaggcgtacaacgtgctgagccgggaggagtcgcggcggttctacgactggacgctggcgcaggaggccgagagccggcgcctccagcagctgcggtccaggctcgaggacccctaccagcaggacctcgacagctaccagtccgtccccgacatggtcgaccgcctcggcggccgcaacatggacctcagcgaccaggccatgaccgcgctcaccatcgacatcggcatcatcatcttctgcgtcttctgcctcatctacgccgtcttcttcaaggagcagtactagattattcattcatgccaggaagaagaaattttcaggtacatatacactctcaagatgttgtttgctatacgtacgggtgtatcatgatgtaatgcgaaataagtactgcacatccacaccaagtaaccaaatgtccctgtatcctgtattttgtccacaaaattggattgttgcaatgtgtaaataggctcttgaatgaaattattgaaaaagc

SEQ ID NO: 1119 - DNA, 733 bp, Oryza sativa
  ref <308>: DATABASE ACCESSION NUMBER: AK059180
  ref <309>: DATABASE ENTRY DATE: 2001-12-06
aactcgcaccttcgtctccgcctcttcctctccctcaactgcgcaagcgcttctccctccttgcgcggtagccggcgccaatccctaccctcgtggcggctggctctgctccctctccctgcgcagcagccgacgcctctccagccctctcccctatgcagcgagtcctctcctctctcatgaggtggaggaggaggcgtggggtggcgggggcaagatccaacgacccccaagcttgggaccagcacagcgttaagggagatggcgaggacggtgcgacgacggcaaggacagtggctccacgaaggaggaggtgcagggcggcggcggccagatccaagtgaattttttgctgcctcccgctttcactcacccttgcttctgttactccatctgtaagcgatgtctttgccttagcagccagatttgatgtcgtcctttggaaatttgtggccttctttatggggatctttggtgcttgcccgatttgctctccatgggtgttttggagatgcttgggctgattctgtcaccactggatttgccgcatcgtgactcgtgagctgctgcatcttaaggcgaaagattggtttctttagggagttgagatttgtttgtgtgtatctgcttccacctttataatttttgtagcgtcaatcttcatcgtattcaattatgtgtccttgtgaagcaaaacattgaatgaaaaactgattttctggggttggttttg

SEQ ID NO: 1120 - DNA, 1323 bp, Oryza sativa
  ref <308>: DATABASE ACCESSION NUMBER: AK059181
  ref <309>: DATABASE ENTRY DATE: 2001-12-06
aaatccaaacgcccgaaaaatctagccatggttctcctcgccgccgccgccgtcgggccacacaaaaccctaaaccctaccctgagcccgccgagctccggcggccgccgcccccgcctccgcttcccgctgccccttccgcggggcggccacctccgctgctccgcggggtaccgcgaggcggcggcggcagcggcgtcgacgtcgtcgacgacgacgacgccgcggccgacggagatcccgtggagcagggagctctgcaactccgttcggctcatcgggacggtgggcaccgaggtggagctgcggcagctgcccagcggcggctccgtcgcgcgggggcgcctcgccatctggaagtcggccaccgagaccacatgggtgactctagcattttgggatgacctagcggttgtggcttctgagcatgtgaagaagggtgaccgaatatttgtttctggacgccttgtgtcggacactgttgatgagggccctgagaaacgacaggtttattataaggttgtggttcaacagttcaatttcattgagtcctttcagcaagtgcagttatatgagccagaggcaggcctggataccttaggtggaaagcatggagattatgttggttctacctctggctcgagtgagggtaaaagtagggaccatgttgactcatcctcccgttcaactgaacagttgtggcaagccttctttgctaatccttttgactggtgggataacaggacaaataagaagaacccgaggtatccagacttcaagcacaaacacaccggtgaagcattgtgggttgatgggaggaacaatccaaattgggttatctcccagttggcaattctggactcgagaatgggttctcttcaaggcaatgataggaaaccagttgcctttatgtatgctgatgacttcatgacacctgacaccgacactgaagcccatatgtgaaaggaaacctcccattcaccgatttatcatagcactatgtattagatagaaaatgtactactgcgatagtgcacctgcgctccttcaattttgttgtacataggtagaatcgtgaagtttaccatagaggcgtgcggccatctgttgtagtcagtagtaatgacaaatgcagatgtagtaaagaatcggatggccttcccttaaatttgcctgagaaacggtgtacatcacttggtgtgtttgcatcagctgagcctcaactgacaagtgacttaattacattggcatgctcattggcttagatggtgcaacaatgcaatcatcatcatatctgccatgagttgtgacctgtaaaaaact

SEQ ID NO: 1121 - DNA, 1353 bp, Oryza sativa
  ref <308>: DATABASE ACCESSION NUMBER: AK059182
  ref <309>: DATABASE ENTRY DATE: 2001-12-06
accggcaacccttcccctccccagaagagaagagaagagaagagaagaggtgggatctggattgtggagaggatggtgaagacagtggtcggcgaggaggcgcagctcaaggcattggaggaaaccctctccgcctccgcctctccggctcaggtggggctcgtcgtcggcaagctcagcgcctcttccgaccgtgcccttgcctactccctcatccccacgccgcccaccgattccggcgctcccgcttgctccctcctccgcgcggcccccaaccccaaggccgccaaagctgcctcttccgacgcctcctcgtcgctcgacttcgatgtcgactgggtcgccgagcacgcgcgccaggtctcgaggatgcttcttggaggaatgaccgtcataggtatttacatatgggcgtcagaagcttcgttcaaagcgacttcccctgctgttttatcacaggttcttagagctgtttctcaggttgctcctttgtatggcactggtgttgatgagagactgctcattcatatttcttacagcccaagaaggtgggcctgtcgtatatgtgatatgagctcaggacgtctaaggccatgtgacttcaagtatactaaactattagcttctcttcaaactttcagatgcacatataattttgagataagactgccagttgttcaagctgagccttttaagaaggttatttcgaaggcaatcagtcatctcacgaagcaagtgcagaatgccaaagctttgattgatggagtcctgggagatcactaccgccaatggctccactgggagtaacatggattgcccattctcaatggagaagacattgtccaacatatgcaagagaactttttatgatatctttgattaagcatgtgacatttacttattcgcatgctcatattctaaactttatatcaaacatgattgcattggtttccagtagtccatttgtgtgttggttaataggtggaatacggcgggggagggcggacggcagtcccgcggcagcggccccaccctctacctttgacactggctagtttgccatcttccccagcggtcgacggtcgtggaacattttcactctcaacaggtggagaaactgaatagaataggtttgatttggattagagatttttaaccacctgtaaagaggtttattgagccacgctgcattcagtcacatttgctgtttgtccaatattatctgctgaatgtttattttggtgaagctactagcttgaatcttagtaattcaacaaaattttgaatcttggtctgttaagttaatgttcctaatcagtgaaatggggggatttttgagaatgcgaacaaaat

SEQ ID NO: 1122 - DNA, 1042 bp, Oryza sativa
  ref <308>: DATABASE ACCESSION NUMBER: AK104053
  ref <309>: DATABASE ENTRY DATE: 2002-08-28
ctgtacccccgccgcggctcacctggaaactgggcagattggacaatcgctcgagcgagctagcgagagagagcgcgagagagcgaggcggcgcgcgcggtggttgcggatttgtagcttagagcgcggggccatggggaggtcgccgtgctgcgagaaggcgcacacgaacaagggggcgtggacgaaggaggaggaccagcggctcatcgcgtacatcagggcgcatggcgaaggctgctggcgctcgctgcccaaggcggcgggcctccttcgctgcggcaagagctgccgcctccggtggatgaactacctccgccccgacctcaagcgcggcaacttcaccgacgacgaggacgagctcatcatccgcctccacagcctcctcggcaacaagtggtctctgatcgccgggcagctgccggggaggacggacaacgagatcaagaactactggaacacgcacatcaagcgcaagctcctcgcccgcggcatcgacccgcagacgcaccgcccgctgctcagcggcggtgacggcatcgcggcgagcaacaaggcggcaccaccgccgccgcatcccatatccgtcccggcgaaggcggcggccgcggcgatcttcgccgtggcgaagccgccgccgccgccgcgcccggtcgactcctcggacgacggctgccgcagcagcagcggcacaacgagcacgggggagccgcggtgccccgacctcaacctcgagctctcggtcgggccgacgccgagctcgccgccggcggagacgcccaccagcgcgcggccggtctgcctctgctaccacctcggcttccgcggcggggaggcgtgcagctgtcaggctgacagcaagggcccacacgagtttagatatttcaggccgttggaacaaggccagtacatatgagatatgaccatgagatgtgagatggcttaattagcttcaattcccaacatgtgtaacacagggagtttttctagtggacgacaatactgtttaatttcagaaaaaaaagggaaagaaaaaggttct

SEQ ID NO: 1123 - DNA, 806 bp, Oryza sativa
  ref <308>: DATABASE ACCESSION NUMBER: AK059183
  ref <309>: DATABASE ENTRY DATE: 2001-12-06
taaggaggcgctcaggacaagagggctaaaagatgatacgacctgcatcgctgttgacatgatcccacctgatcaaacaatacgtcatccatctccaccaaaaaagataaacaagttgaagtctttaatctttagaaaaaagacaaaagaccatcctaataaactgactaagcagctgtcagcagcgggtatggtggaagagttattcgaagaaggttcagcaatgctatcagagaggttaggcaatgactcaagtggtcggagaacatcatcaagcttgtttacatgtgccatctgccaggtggaccttgaaccaagtgaaggtatatcagtccatgctggttcaatcttctcttccagctcctctaagccatgggaaggccctttcctttgttccgattgccgcgacaagaaggatgccatggaaggtaaacgaccaagtggcgtcaaggttctatgatatcacttgcaatcagccaccattgtagctcccgcaaactcaccttctttttcaattgtgagcgctctttgtgttacaatttttctctctctcgattttaggcgattcggataattttaggttgcattttaatttattatgtgaggaactagccgccgtgttgtaagtagtattggggaaaggaaaatgtgaagcgagtgaatagagtatgtctccatttttctcttgtaggtgcatgaactaactgcagcttgcctctcgcgagttgagtatgatagtccgattattctttatttgtaacttatcggtgcctttattgctaatggattatcctattcttgcgttc

SEQ ID NO: 1124 - DNA, 499 bp, Oryza sativa
  ref <308>: DATABASE ACCESSION NUMBER: AK059184
  ref <309>: DATABASE ENTRY DATE: 2001-12-06
tttttttgcacagttgttcaatggaattaatagcaatggctgatagatggggcttaagtaacctgttcttcattgatttggtcatcattcctaacttaattcattagtcctgaatccggcatcgccaacagtacctcccagcattgggtttgctatcttcaaccaaattctaccataaagcgtggcatgagccaggaccatctcagtgccggtgagcacccacatggtgatttctcagagtttgcaatgtactactatttgatttcttgatgtggaaataaaaagaataaaaacatgaccaatcacaatgcaaggatcttgtaccccagcttctctcttcatccatgtcttgtgctgagcagttatggtgagtcgtctaaccaatggtactgttgttgtaccttgtgcatgttgatccgtactatacgtttgttgatcatcatgtttgatacacagttacacgcacatactgatagtgaaatcatcttaaatgcttgat

SEQ ID NO: 1125 - DNA, 897 bp, Oryza sativa
  ref <308>: DATABASE ACCESSION NUMBER: AK059185
  ref <309>: DATABASE ENTRY DATE: 2001-12-06
cgtattcgtgcttttttggtacgtacttaacactggtttcaccctgacaacagcaataaccgagtggagcagtgtgttatattctgtgatctatactgctgtcccaactatcgttgttgcgattctcgacaaggatctgagtaggaggacattgttgaaatacccccaactctatggtgcagggcagcgcgaggagagttacaacctaaggctgttcatttttgtcatgctggactccatctggcagagcctcgcagttttctttatcccttaccttgcatacagaaagagtacaatcgacggtgcgagtctgggagacctctggacactagctgttgtcattcttgtggacattcaccttgcaatcgatgtcatcagatggaactggatcacgcacgcagcaatatggggcagtatagtcgcaacgctgatttgtgtcatggtcatagactccataccgatattgcctggtttctgggcaatatacaaggtgatgggaactggactgttttgggcattgctgctcgcggtaattgtggttggaatgattcctcattttgtcgctaaggccataagggagcatttccttccgaatgatattcagattgcgagagaaatggagaaatctcaagattctcatgatgtcactcatccagaaattcagatgagtacagtggcacgagcttaggttaggggtcacatactttttgttcattcagataggatagctctacacctttctttggttctttttactgtgtgtatactaggcaattctttctgtagtaagcacatttcttgttgcttgctgcctttgtcagctatccaaaggataggtttctttgtacccatgctgtgtatccgcctgccaaattttgttgatttataccaaaaaag

SEQ ID NO: 1126 - DNA, 611 bp, Oryza sativa
  ref <308>: DATABASE ACCESSION NUMBER: AK059186
  ref <309>: DATABASE ENTRY DATE: 2001-12-06
atgcacaaaaactaagcttcctcgatatcaaggaatcgactggtattgaggataaagaattgcgaagaacgctgcaatcacttgcatgcggtaaagttcgggttctccaaaagatgccaaaagggcgagacgtagaagataaggacgaatttgtatttaatgaagaatttagtgcccctctctatcgcataaaggtgaatgctattcagatgaaggagacggttgaagaaaacacaagcacaactgagagagtattccaggacagacagtatcaggtggatgctgccatagttcgaataatgaagacacgtaaaaccctcagccacacgcttctaataactgagctttttcagcagctcaagttcccaatcaagccatcggatatcaagaaaagaatagagagcctaatcgacagggagtacctggagagagacaggagtaacccccagatctacaattacctggcttgacagcgcttgccatcataacatgaaagctcgtcgtcttcatttcattgtcagagacattgtaaagtagtaattgaatatgtctacctcttgtttttccgacctttttctccttggaagctgtagcaatcgcaacatttctgt

SEQ ID NO: 1127 - DNA, 923 bp, Oryza sativa
  ref <308>: DATABASE ACCESSION NUMBER: AK059187
  ref <309>: DATABASE ENTRY DATE: 2001-12-06
gtgacatgcctgtggaggaacgcgccacgttgctgacacaggttgctgggctttctgatgaaggtgctcaagatgtagagcttgtgctggagatgattccttctattgaagtggatattaaatgtgagactgaaggcgaagaggggattcaagagggtgatgttgtgaccatgtatgcttgggtctcacttcaccgtcgcaatggcctaactgctgctcttccccatgctccttccttcccgttccacaaggaagagaacttctggttgcttctagcagatgctgcatcgaatgaagtttggttatcccagaaggtcagcttcatggatgagactaccgctataactgcagcatcaaaagctatacaagagacccaagaagcactaggtgcaagtgcaaaggaaatagggattgcgattagagaggcagtcgacagggtgaagaaaggcagtaggttggtaatgggcaagttccaagccccggccgagggcactcacaacctgacttccttctgtttgtgcgacgcatggataggatgtgacaccaagaccagcttgaagttgaaggtcctgaagcgcagccgggcaggaacaagaggtcatgtggctgaagaaggcccagtggcagaggatggtattgaggaagaagaagaggaggaagaagaggagtacgacgactacgagagcgagtacagcgatgacgaggaggatgagaagagcaaaggaaagggtaaggtcgcgaacggagtagcccaccaaaaggcaaactccgatatagattctggcagtgatgattgatatagtaccttgagttgtccaaccatagacacttaacatcgttgtttttgccctttgtgcaccctgttgaaacttgaacatatcagttgtcaacttatagagcaatcggcgatagctaccaaagtt

SEQ ID NO: 1128 - DNA, 1158 bp, Oryza sativa
  ref <308>: DATABASE ACCESSION NUMBER: AK059188
  ref <309>: DATABASE ENTRY DATE: 2001-12-06
catctccgccgtcgtcgacgacgccttcctcaccaagtatgacgtcaagctgaacaatgcaattctcgctgaggaaaagcacttgcctatgtatgatgagttggccagcaagggcaatgttgaatatattgccggaggagccacccagaactctatcagggttgctcaatggatgcttcaaactcctggtgcaacaagttacatgggttgcattggaaaggataagtttggtgaggagatgaagaagaatgcccaagctgctggtgttactgctcattactacgaggatgaggctgctcccacgggcacatgtgctgtctgtgttgttggtggtgaaagatcactggttgcaaacttatcagcagcaaactgctacaaatctgagcatctgaagaaaccggagaactgggcactagtggagaaagcaaaatacatctacattgctggctttttccttacggtctccccagattctattcagcttgttgctgagcatgctgccgctaacaacaaggtgttcctgatgaacctctctgcaccctttatctgtgagtttttccgtgatgcccaggagaaggttcttccgtttgtggactacatcttcggtaacgaaacagaagcaagaatctttgctaaagtccgtggatgggagactgagaatgttgaggagatcgcgttgaagatttcccagcttccattggcctctggaaaacaaaagaggattgccgtgattactcaaggtgctgatccagtagttgtcgctgaggatggacaggtgaaaacattccctgtgatcctactgccaaaggagaagcttgttgacaccaatggcgctggtgatgcctttgttggaggcttcctctcacaattggttcaacaaaagagcattgaggactctgtgaaggctggttgctatgccgcaaatgttatcatccagcgttctggctgcacttaccctgagaagcctgatttcaactagggctaacccaaccacatattgaggaacaattattcgcacatccaacctactagtggtttggtgtgttctacctgtaccatctcgaggctttccatatgatccggccaatatttttttgccgtgatttttgcttcactgctgcaaaccttactttattctcggtataaggcacaattgcc

SEQ ID NO: 1129 - DNA, 889 bp, Oryza sativa
  ref <308>: DATABASE ACCESSION NUMBER: AK059189
  ref <309>: DATABASE ENTRY DATE: 2001-12-06
gactcgtcggctcgcctcggcttccttcgttggtccgcaccttctcccctcacccgccgccggggatccgctccgccgtctcgcctcccgccccgtggatccaccttgccgctccagatggaatcctgcccttcggtgaagaacatccttctgctggattccgaggggaagcgcgtcgccgtcaagtactacacggatgattggcctactctctcggcgaagctggccttcgagaagtcggtgttcgtcaagacccagaaagccactgccggagcagaagctgagattgtaatgtttgatggccacattgtggtgtataagttcatccaagacctccatttttttgttactggaggagaggaggagaatgagcttattttagcatcggtccttcaaggattcactgatgcagttgacattattctcagaaataacgtcgacaaaagaacagcactcgaaaatctggatctcatcctattgtgcctcgatgaaattgttgatggagggattgtcctggaaacagaaggaagtgtgatagctgaaaaggtgtcagcacatggaatagaaggtgctacttcactcgctgagcagactatagttcaagccctaacaacagcaagagagcacttgaccaaatctcttcttatgtgatgtgctctgcttttggagctgaagatggagtagcatcccgttgttacatctctaggactgatacgttcattgcaatagaaacgacggaacagaatatctgaatccatttgcgtgtagagtggcacgttcccttcattgacactatctggttcagttttgcgagtatttaaaaaactgcacaaacaagattgtgaacggtgattgtttcaattttgattgttctttgttttgtagattt

SEQ ID NO: 1130 - DNA, 681 bp, Oryza sativa
  ref <308>: DATABASE ACCESSION NUMBER: AK059190
  ref <309>: DATABASE ENTRY DATE: 2001-12-06
acccaaagcagaagcctccgccgccgcagcgccgctactcttgcatcgcctccgccgtagccgcgcgcgcccttcccgtcgccgcttccacctcgatctccgccggagagggcgtccgccgccatgtctcagaacaacccctcccagctcctcccctcagagctgattgaccgctgcatcgggtccaagatttgggtgattatgaagggtgacaaggagctcgtcggcactctctgtgggttcgatgtgtacgtcaacatggtgctcgaggacgttactgagtatgaatacactgctgaaggccgtcgcataacaaagcttgatcagatactcctaaacggcaacaatatagctattttggttcctggtggttctcccccagatgtggcataagcaagcacttccgtgatatacctgcttgaggctgatggaggcacagaccggtgtttccttacttcaaatgtatttcttccatttgtggctgtactgaactttcttagttaactgacctgaagtagtgtacctgcaacagttgctcctacatgatttggcaatgctaagtatgaggtacctcttgtagctgtttattaccattcttctgcaacctgactcagtaaacactaggtggttgaagaaacctgataatggagagcatatctacaattgttgtatttgtggttc

SEQ ID NO: 1131 - DNA, 1752 bp, Oryza sativa
  ref <308>: DATABASE ACCESSION NUMBER: AK059191
  ref <309>: DATABASE ENTRY DATE: 2001-12-06
gtgctcccatctccgagacgagacaaagatcatggcgactcccaaaccctaaatcccgctctcactggagagcagaagcaagtaagaggtggagcaatggcgcggcggagcaaaggcggcggcgcggagggggacggcatgcggatgcaggtggtgtggcggaagggcgcggtgcggctggtgctcgtctccgccatcgcctgggcgctgctcgtcatcctcgccctcgccttccacctctggtcctgcaactccgacgtcccctttctctcagctctctgtaaaaaagacagtaaagttctgtatgcgttggactccatacgatcctcatcaaagccacttcaccgctgccccatacctgttgcagatgatcctgattctattaccattccaaagagaactcccaacacaatcgtgaaaaggttgtcctacataacagttgacaaacaggacaaagatccatcaccgctgttcggaggacgtcaaagctggaaacagagggaggacagcttcaaactgaatgctacaatgaaggtgcactgtggatttatgaaaaacagtggtgcggacatggatgatgtcgatgtcaagtacatacagaaatgcaaattcgtggttgcctctggtatatttgatggttatgacattccccatcagccatcaaatattagcattcgatctcaaaagttgttctgcttcttgatggtggtagatgaggtatcccttgattttattgaaaagaataccactgtcaagtttgataaggcaggagggaaatgggtaggcatatggcgacttataactttacaccgccttccatttgatgaacctagaaggaatggaaaagtgccaaagatattaacacacagactatttcctcaagcttggtatagcatttggattgatgggaaaatggagcttatagtcgatccgttgcttatccttgaaaggtatctctggcggggaaaatacacctttgcggtagctgtccataagcatcataagagcatttatgaggagggtgatgcaatcaaacggaggaagagatatgcccggcctctggttgatcttcagatgaagatgtactatcatgaggggatggagccttggaacccaaagaaaaggatgcctagtgatgtgccagagggggcagtgctgatccgggagcacacaactatgagtgatttgttcagctgtctctggttcaacgaggtcaatcttttcacgcctcgcgatcagctcagctttggctacgtggtgtataggcttggagatgctcttaaattcttcatgttcccaaactgcgagtacaattcgctgttcattttgcacagacacacaagggaacactcatcaaaagtcgagtgggctaaaacaatcgatgagatcgtgaaaaagggattgaaggagagcaagggaggattagggctgtggactccataccctgcagacctgagctctgtcgaactccccagtgtaaaaagaacttcgccagcaggctaagctgggaaactacctgaacatgatttcgtgattgtgcaaagtagagccctcgtttttcttttcttttcttttcttctgatcagaggaaattgtgtagtttctcatgttgattctggtgcatatgaaaaatgatggcactataggttagcactttacttgtagctttgtgacttcattactgtgccaaattctgcgccaacactgtaactatacgtaaaccaatcgtggtatgagctattgtttccaagg

SEQ ID NO: 1132 - DNA, 830 bp, Oryza sativa
  ref <308>: DATABASE ACCESSION NUMBER: AK059192
  ref <309>: DATABASE ENTRY DATE: 2001-12-06
tccgaaccctagcgccggcgccgccacttccctctcgcatcttctcgcgctcaggggccaggtaagcgaagatgtacaccgcgaggaagaagatccagaaggagaagggcctcgagccctccgagttcgaggactccgtcgcgcaggctttctttgacctcgagaatggcaaccaggagctcaagagcgagctcaaggacctgtacatcaacaatgcagtccagatggatattgccgggaacaggaaggctgtggtgatccacgtgccgtaccgtctgcgcaaggcattcaagaaaatccatgtcaggcttgtcagggagctcgagaagaagttcagcggcaaggatgtggtaattgttgcaacaaggaggattgtgaggcctcccaagaagggctcggctgttcagcgccctcgcacaagaactcttactgctgttcatgatggtatcttggaggatgtagtctacccagctgagattgttggcaagcgcatcagataccgtctggatggtgccaaggtcatcaagattttcttggacccaaaggagcgcaacaataccgaatacaagctcgagaccttctccgcggtctaccgcaggctttgtgggaaagatgttgcctttgagtaccctatgactgaaactgcttgaagatgcattccttggattgttcccaatgtattccagaaatcatagttttgatgccaaagttggtacttgggtatttgttactttgagacgacaaatcgacttgaacaatgttaaagttttgggcatttaaattatagacctttgctttggcacggttagcttgtttcaaaaaaaaaaaag

SEQ ID NO: 1133 - DNA, 672 bp, Oryza sativa
  ref <308>: DATABASE ACCESSION NUMBER: AK059193
  ref <309>: DATABASE ENTRY DATE: 2001-12-06
gtctcactctcttctctctcgtctcgctctcttctctctctccctcccttctctcccgcgcactaccgacggttggccggcggaggcggcagtggtgaccgcgccctcccctccgccagatccgggccatccggtgggaggggaggcggcggcagggagctagaggggagcccgtggctgcagctgcccggcggccggacgggaggcggcggcgacaccctcccctccaccagatccggccggaggggaggcagtggtgcctccgctccaccagatccggccgggaggggagtcaacgacgacaggaggggtggcagcagcaagtggcgtggctcacgggcggtggcggcgacgacctcccctctgccagatctggcgggaggggaggtaatggcggcggcggagccctcccctctgccaaatccggcgaggagtaggtagcggcaacgacggcggtgggctccccacgggcgacagtggtgggctcccttgtctctcctgccaccagtgagcacccccaaccgtctccttcgcttgccggctgtgccattgttgatgtttgattcgatgatttaatgatgtttgatgtttgattcagtgatgtaaacttgttgatgaatatttgattgtgtgatgcatgaatttgttgattatgtgatatgtcctttttct

SEQ ID NO: 1134 - DNA, 638 bp, Oryza sativa
  ref <308>: DATABASE ACCESSION NUMBER: AK059194
  ref <309>: DATABASE ENTRY DATE: 2001-12-06
gtccatctccttgtgtgctcagtagcttctcctcctacgaaaccaaccagctgccgccggtgaccgtcgatccgtcgaccgccgccgccatgagcagcgatgttcctgggtacttcgtggggcggccgatgaaccaagcggagcccgcgaaagaacagcagcagggcgccgacgagcagcgtcctgctaccaacgcgcagatccctggtgactacttcgtcgggcgtccggcaaacccgcagcagccgccgtcgcaacctccgcgggcgcaggagagatcgagcttcttggccaaatggtactccaatttgttcttcgaaaatcgaacaataattgtttagattgtattagatttcatatcgatttgtcactctgatgctttgctcttgctgatttctctgtttcgtttctgcagctgcccatgcctcgacagccgagctgagggatagacgaacaagtgcggcggcgggcgtgaccgtaaattcgatgggaaaattgaagcaaatttgcttggagtggtaaggctcggatctgtgtttgtgttgcaagttttgctaatagatgtttgtaactgaaggttgcttctattcatttgtataccaattgttcattcgtatcatcagagtgcgaattcgatg

SEQ ID NO: 1135 - DNA, 1462 bp, Oryza sativa
  ref <308>: DATABASE ACCESSION NUMBER: AK059195
  ref <309>: DATABASE ENTRY DATE: 2001-12-06
acttccagactattccagtccacgaccgtcggaccgaaccgaaccatccagaagcagccgccgccccaattctaaagcatctcccccccacccatctccgatctccacccgcagatccaacggagacaagcgcaccaagcccccccaccaaaccctaatcctccttcccccccctcccatggcgaagtacggagagggcgacgcgcggtggatcgtgcaggagcgcgccgacggcaccaacgtccacaactggcactgggcggagcgcgactgcctcgagtggtcccgctcccgcctcacctccctcctcgccggcctccccgtcctctccggcgagggcggcctcgccctccgcaccaccgcgctcgacaagctcgacggcgaggcctacgtcaacatccgcaaggggaaggtcatcccggggtacgagctctccctcaccctcgcctgggaggccgaggccaccaccgagtccggcgtcgtcaaggtctccggcgccgccgaggtgccctacctcgccgacgagaacgccgacgaggacccggagctccgcgtcaccgtccgcggcgacgatggccccgtcgcccgccgcgccaaggacgccttcctcaccaagggcaagcctctggtcctcgagaagatccgggagtacgtcgccgccatggcgaagggcggcccggctaaggacgagctggattccaagaagacccccaccaaggccgcggcggtagaggccggtggcgcggccaccgcgcctgcccctgcggcggagaagaaggaggaggcgccggccgtgaaggagaagaaggcgaaggcgaaggacaaggaaggattcaagacgatcgagatgacggagaaattctactgccgtgcgaaggacatgtatgagatcttgatggatgagaacagatggaaggggttcacgcagagcaatgcgaggataagcagagaggtcggagggcagttcagcctcttcgatgggtcaatcagcggcgtcaatgaggagttgcaggaagggaagctgatcgtgcagaagtggcggttcggtagctggccagacggcgtgcactcgacggttaggttggtatttgatgagcctgagtcgggagttacagtcataagcctcaaacaaactgatgtgccagaggaagacagatatggaaattcaactgtggtggagaacacggagcgaggctggagagaactcatcttccagaggatacgcggagtgtttggttttgggatctaaagcagtactttgactcttgagctggatttctgcttttcaggaagtcgagcgttaccatgtcacagttatccctgtctttgctgtcgcagtttattcgatgttagacagaaactttgcatattacggggaagtcggaaaaaacatctgttattcatcacgctggaatgcgtctgcaatgtttgccaagtgttaatctgcaactgatggttgagt

SEQ ID NO: 1136 - DNA, 754 bp, Oryza sativa
  ref <308>: DATABASE ACCESSION NUMBER: AK104054
  ref <309>: DATABASE ENTRY DATE: 2002-08-28
cagaatggtaaaggggagcagtggcaagagcagtggtgggagcattacgattcaagcggtaaagctgagaaatgggctgataaatggtgcagcttggatccaaatacaccactagatgttggtcacgctcatgtttggcatgaaaggtggggcgagaagtatgatggctgcggaggtagtgcaaaatacactgacaaatgggctgaacgatcagagggtgacgggtggtcaaagtggggcgataagtgggatgagcatttcgacccgaatggccatggagtgaagcaaggggagacctggtgggcaggcaagtacggggatcgctggaatcgcacctggggcgagcatcacaactgtactggttgggtgcacaagtatggcaggagcagcagcggtgagcactaggacacacacgttccccaggacacctggtatgagcgttttccgcactttggcttcgagcactgcttcaacaactcggtgcagctccggtctgtgaagaggcagactccaaaaaacactaagcctgaaaaagattagatatttagaatagaatctactcaattgctatcataaaaaatagttggctacatggccatctttcatttttgatcttgctgaagagcccatgcttgtaaaataagattgaatggctgatttcagttgtccggttttatgccaatacctgtaccgagctatgttatcaaaagttcatatgctactatgcaatagaaaggttccttcttttagtttc

SEQ ID NO: 1137 - DNA, 600 bp, Oryza sativa
  ref <308>: DATABASE ACCESSION NUMBER: AK059196
  ref <309>: DATABASE ENTRY DATE: 2001-12-06
gcaatctcatcgcaagaaaagaaaaaaaatcctattcaaatcgaaacccctctctttgatctcgtcgccgaggaattaggaggagagagagcaatggccgccgaggagggagtcgtgatcgcctgccacaacaaggacgagttcgacgcccagatgaccaaggccaaggaggccggcaaagtggtcataattgacttcactgcttcctggtgtggcccttgccgcttcatcgccccagtgttcgctgaatacgccaaaaagttccctggtgctgtcttcctgaaggttgatgttgatgagctgaaggaagttgctgaaaagtacaatgtcgaggcaatgccgaccttcctattcatcaaggatggtgctgaggctgacaaggtcgttggcgccaggaaggatgacctccagaacaccatcgtgaagcacgtcggtgccactgctgcatctgcttctgcctaagaattctcgcaggcgcaagttatcaaataagggccagcacctggtgttgtagtaggtattagcgttagtcatcgttatcgtcagtttggcttgggtgtcctcgaatatcatgcgaaatcgattccgagttctcttttt

SEQ ID NO: 1138 - DNA, 775 bp, Oryza sativa
  ref <308>: DATABASE ACCESSION NUMBER: AK059197
  ref <309>: DATABASE ENTRY DATE: 2001-12-06
aaattcaaatcagctcattttatatcattgtctggtcatattgagagaggcaagtgatgatcaaaagttaattctacaatacttgaatggataacatgaactggtataatcacatacatctgaagcccttgaattcacaagctgttgtttgtcatgtgcataggcaaaaccattgctcgactcgaacaacatgaaggaactagtggatccttctcttgatgttggatatgatccagaagaaatggctcacatcctagcagtggcatccatgtgcattcaccacagctcaagctcgcggcctagcatgaaatcggtgagtgcgatgaacacgctaactatacggccattgtaaaggctaaaaaagaaacaatttggattgtaaactgacctgttggtttgatgcctgtaggtggtccgtttcttgaagggggatagggaatcactcgaaatgatgcaaatgcaaagaccaaaactcatgaaacccctcatgttcgactccggcgattcagaggatatactcgctcaagttacctcaacgatctcgaccggcacaagaagcttgccttggagcagtgatacttgagttgattttgactgccatcttttgtacatcatcatcattatcaacattgtgatcctcctcctttccaaaggtgtagtagtatgcaggctgtatggatggatgtaagggttcagtttatcagttgctccctttgttgctgatcaccatggtgtcattttggccaaatgcatgttgtgataccattattcgatc

SEQ ID NO: 1139 - DNA, 1280 bp, Oryza sativa
  ref <308>: DATABASE ACCESSION NUMBER: AK059198
  ref <309>: DATABASE ENTRY DATE: 2001-12-06
aaaggaaaaaagagctttgagttgactgacatggccgtgctctcctcttcctcccatggcctcctccacccaccgctccgtctcctcgccgccgcctccgccagtagcggcagcagctactcgattccccatgcgcgcctccgcctcgccgtcactactccgtcgaggctaccttcccccatctcatcctcgcccgacccaccgcccgacgtcgcccacgacgaagacgaacaggaaggtcagcaccacaaggaggagcgggacgagcggtacgggttcgagatccaggtgcgcaagctgcccaagcgcaaccgccgcctcgtccgcgcccgggtccgcgtcgacgccccgctcgacgccgtctgggccacgctcaccgactacgagggcctcgccggcttcatccccggcctctccgagtgccgcctcctcgaccagtccgactgcttcgcccgcctctaccaggtgggtgagcaggatctcgcgctgggtttcaagttcaacgccaggggcaccatcgactgctacgagggcgaattgcagctgctgcccgccggagcgcggaggagggagatcgccttcaacatgatcgacggcgacttcaaggtcttcgagggcaactggtccgtccaggaggaggttgatggtggggaaatatcagcggatcaggaatttcagactatactttcttatgtggtggaactggagccgaagctctgggttccagtgaggctactggaagggaggatttgtaatgagatcaagaccaaccttttttcaatcagagaagaagctcagaggatccagagattgcaagataagagaaatccatgctgaagtttggcagtatgttttcagtgattggtcatctcttaaggcttcatcccaatattacacgtccttgattctcaagaatacacttcagaaagggggaaaatgggcgaagaaagatgatgacgcgcttcatgatgttagtggaacacccaaaattatgacttaggtcactgggcatgtcttgtgacaattggattggttgatctttctcaatagaagagaggaaaaggcaaatggattatttggaattcggacagctttggacgtgcctgacaggcaaatggatagagggtcccaaaacctaatcttgcttgtatatctaggattacctttttgccactcaatggagaaatgattaacgtttcgtgattaactacacgatgttgacatatattgcaattttatttgtaaccaatcctaggcagaaagctgctgaattggtactc

SEQ ID NO: 1140 - DNA, 1111 bp, Oryza sativa
  ref <308>: DATABASE ACCESSION NUMBER: AK059199
  ref <309>: DATABASE ENTRY DATE: 2001-12-06
gtacaagggaaaactgggtggcgtggcagtggccatcaagctgctgagaccccatggcaggcaaggatttccagagtacaagcaggaggttgtggtgctgagtagaatggagcatccacacatagtgaggctcatgggcgtgtgcccggagtcatgcgggctggtgtacgagcacctgcccaatggcaccctcttggacatcctctccaactccaagagtctgtcatggaaggatcgcgtgaggatcctcggcgagcagcgttccgcgctggcctacctccattcctgccgcccccacgccatcatccacgccgacctcaagctcaccaacatcctcctcgacgccgccaactccagccgcctcggcgacttcggcacggcgcgcgcggtgcacgtcaagccgctgcaggaccaggcggacaccatctgccgccgcaccaaccccatgggcaccaccggctacatggaccccgtcttcttcgtcaccggcgagctcaccgccgagtccgacgtctacgccttcggcgtcgtcgtcctccaggtgctcaccggactgctcgacctcaacatcgccgaccaggtgcgcgaggccctcaagatggacgccgtccactccgtgctggacgcctccgccgggagctggccggaggtacaggccgagaagctgctccgcctggcgctgcgctgctgcagcctggagaggaagcggcgaccggcaatcacgtgcgacgctgagtggaggtcgcttgacattatgctccgcatggcaaattcaccatctaaatctcggaaatggacttctatttctattcatgcaacctagccgtcgatagtaattactactcctacagtataggcgtatttttttctttttctttttcttttttcttttaagaaaaactaggagtagctagctacttttcagtatgcatgttgcctgtgcatgtacataaggatagggggtctacggtagtcaacagtcaaagtgtcaaataacctgttttgtactactgtcaatgtaattattttagcattataatggttgctccaatttttcatcttcaagattgccatatgtatcaatgtatgcatcaatatgctcctatttacc

SEQ ID NO: 1141 - DNA, 410 bp, Oryza sativa
  ref <308>: DATABASE ACCESSION NUMBER: AK059200
  ref <309>: DATABASE ENTRY DATE: 2001-12-06
tgctgtcaggggcctggggccttaagtgggggtacaacttccacctcctatgtgctctgtgaaagtgcattttggtggagtacatagctggatacataggtgcaatgtccattttgtaggctgatcaacccatcctatacttggttgctgactgacaaggccctaacacggtgtgctgtgctgcacagattgcacgacgactctgtcgtgccaaatttatgcctaattcggtggaattagctgatgatcatgtaagaaacttaggtctggtgacacttattttgtttatctgccagctttagttttaagagatgcaaaggaagctttgcctcgtgcttacggcagaccttatgtaaatcatttgctaactactgtcacgatgctaaatgtattttgaactgtgggaatcc

SEQ ID NO: 1142 - DNA, 525 bp, Oryza sativa
  ref <308>: DATABASE ACCESSION NUMBER: AK059201
  ref <309>: DATABASE ENTRY DATE: 2001-12-06
aaaaaaaaaaaactgcctggaaggaagaaccaatccaagaagaagcgatggcatctcgtctcgttgcggcggcggcggcgtcctcctcgtcttccccgctcgcccgcctcgtctcccgccgtggcctcgccggcgctgcagatcaccatgggcctccgaaggtcaacatttggcaagaaccgatgaacccggctaactggaaggaagagcaatttgtgctagccagcttagctatgtggggaggtattttttatggtgtcggcaggctttttagtgggaagaaggaagacaaaactactgaggcggcgccagcacaggcataataggatttaccagagccttatttcatgctgcagacgtgcaactgtatgaaataaagaagaattttatggtctgttttaagtttgtatcgctaatggtaaattgtggcgactagatgggtgattttgtaagaggcgagattttgtggacctacacttgtcagccagcatgaataatctttaccgcagtggaactttggttgag

SEQ ID NO: 1143 - DNA, 714 bp, Oryza sativa
  ref <308>: DATABASE ACCESSION NUMBER: AK059202
  ref <309>: DATABASE ENTRY DATE: 2001-12-06
acacacgcagagaagatcatatcggatcggagaggcaatggcgagcactaagatggcggtggtggcgatcctggcggcgctgctgctgatggcagctgtggagccggctttggccacgccgcccagcttgctgccggcaagaaagctgcagatgcctcgcctcatggatgtcgtctccgcagagtcaaagctggcttgcctcccagcaggcggtttttgcatgtttcgtcctatggattgctgcggtaactgcggttgtttatatcctgtcggggtttgctacggctcgcggtgtgaggaatgaactgtacgtacgtacgtgtccattttactagctaatcacgcatctgcagtgtcacaataaaatcgcgttctgcgttcggtccctagattgttgctcatgatcaacaagctcgctctgttcaagtatcgagtctgttagtttgttgtcaggtacgtacgtgttgtgcatgagctcacgagttgtgtgacgccgtgcaattagaccccctggagtcgcagtaccgagtctagcttccggccctggactcgctcttcacgtcctgcgtcgtggggggtgtgagaaggatcgagctcccagggccgttccttttgagtcatataaataaaacatagggatcagtgtgcgcacgttgtgatcgtctacgtttgtactgtgtttctcaaaaataataataaaaaaattccaagtgt

SEQ ID NO: 1144 - DNA, 1234 bp, Oryza sativa
  ref <308>: DATABASE ACCESSION NUMBER: AK059203
  ref <309>: DATABASE ENTRY DATE: 2001-12-06
gtcccactcgtgccaaaacccaagagaagctatatcgagctaactagctagccgcactgtaactaaacatggcgcggccgcttgggcagcagcaggttggcgcggcggcggctctggtgatcgtcgtggcgtgctgcgtcgtcgcggggtgctcgggcgcgcgcgggcgcggtttccgcgaggaattcgacgtgatatggggcgaagaccacgtgagggtcaccgacgaggacgacgcggccacgcggcaggtggtggcgctcaccctcgaccaagcctccggctccgggttccagtccaaggaccagttcctcttcggcgagttcagcatggagatgaagctcgtccccggcgaatcgcccggcacggtcgccaccttctacctgacatcggagggagatgcgcacgacgagatcgacttcgagttcctggggaacgtgagcggcgagccgtacgtgatgcacaccaacgtgttcgcgcaggggagagggaaccgggagcagcagttctacctctggttcgaccccaccgccgacttccacaactacaccatcctctggaaccccctcaacatcatcttctcggtggacggcaaggcggtacgggtgttcaagaaccacgaggccgccggcgtgccgtacccaagcggccaggcgatgagggtgcacgcgagcctgtggaacggcgacttctgggcgacgcgcggcggccaggtgaagatcaactggaccgccgcgccgttcgtcgcgtcgtaccggacctacgcctacagcgcctgcgccgtgccggcggccggcggcggtggcggcggcccgtgcacgtccggccagctaccgaattccacgtcgtcgccgtcgacgtgcgactgcggcggcgcgtggatggacaggcagctcggcgccgacggcgagcgcgacgtggcgtgggcgcgggcgaactacatgatctacgattactgcggcgaccaatggcggttcccgcagggccttccggccgaatgtagcctcgaccagagttccggccatcgcacatagccggagccggccattgcctccgtgctgttctagcattcacgatactgtaacttgatctctactgtacttcacaatgtcacatgatcgtaaatctcctcaaattcatatggcacatggtacatgacaccaagaacaataataagcggattaacgaagtcccaacatatataaccatggaataaaaatgggttggctgtttt

SEQ ID NO: 1145 - DNA, 293 bp, Oryza sativa
  ref <308>: DATABASE ACCESSION NUMBER: AK059204
  ref <309>: DATABASE ENTRY DATE: 2001-12-06
acaggcttcaaactcgacctgtttgattataaatgagaataatgataataatgtttgctcggtggtttggcagcgacagctctaaaatgtgtcgatgtggagttgagggtgtttcgggctgtcgctgtgttgcatgccatcagcccagcaatataggacgatgttttacagttttaaattttatacacagctcgataaactgggagtaggtcttgaaggtttctgtacttatcattttttttgtttgaaagttttattgtctcgtcgtattaatatactcagatgatttcaac

SEQ ID NO: 1146 - DNA, 792 bp, Oryza sativa
  ref <308>: DATABASE ACCESSION NUMBER: AK059205
  ref <309>: DATABASE ENTRY DATE: 2001-12-06
gaaagaggagagaaaaactagaggtggaagacgacggcttctcgagtccatagaaagaggggaggagagagaggcggtggtgggaagcaagaatggcgtgctctccgcgtgtgttcctctcggcgtcggctactcctcctcctccatctgctgctgcttcctcttcgtctccgttcctctccacggggcatgtgtcctcggctccgtccacgtccagatggactgtccaatacaagcagccaggacatacattctatcgaaggacccatgtgcaaagcttcttggcttttgctagcacagatgcatcagaaggcaaaagaagttcaggtgataatgtggtaacggttgatccactggaagctaagcgcttagcagctcaacaaatgcaacaaattcaggccagagaaaagctgaagagacgtcgtcgagcagaagctattaatggtgcattggcaatgataggactgactgtaggattggtactggaaggtcagacaggaaagggtatcttggcacagctggctggatatctcacggctttgtctagtttattcgggcaatagcagatcatgattcatgagttcctttttttgcttttaacttcctcaaccaggaaagcttttgtctgaatctcatttgctggatccaaccaatttgtttatggttaatcctgtccatatttgcaatgacatgcagatttgcaggctagtgatccaattaattgtattgatctggcgcctgtcctgaaaattcatacacggtgtatcaagttaaaacattgtattctcccgc

SEQ ID NO: 1147 - DNA, 1223 bp, Oryza sativa
  ref <308>: DATABASE ACCESSION NUMBER: AK059206
  ref <309>: DATABASE ENTRY DATE: 2001-12-06
catctacctcgcattcctggtcttgcagttcattttggcctttggtaatcgtccaaagggttccaagtactcttacttggtatccttctgcgtcttcggtctcatccagctctacattgtcatcctgtccatctacctcgtcgttcaggcctttaccaatccgtcctctgagaagctggatacctcgtcaccagaagcatttgccagatccttcttctcgtcaagtggtgttggtatcattatcatcgctcttgccgcgactttcggtctctactacgtcgcatccttcctctacatggacccctggcacatgttcacctcgttcccgcaatacctgctcatcatgtcctcgtacatcaacattctcaacgtctacgccttctccaactggcacgatgtgtcctggggtaccaagggttccgacaaggcggatcttctgccatcagccaagacagagaaaggatcagatggaaagcacaacgtcattgaggagcctgatctgccccaggctgatattgacagtgcattcgaggccactgtgaagcgtgctcttgccccgtacgtcccaccagaggagaaggacgagaagaccctcgaggattcgtacaagtctttccgtacccatctgtgtaccgcctggattggttccaacgctacccttgccgttgtcattacccaagataactttgaccgctttggtttctcttcgaacgcctctgccagaaccgcacacttcttccaggctctcctgtggtctactgcagtacttgccttgattcgtttcattggatgtctgtggttccttggtcgcactggtctcttcttctgcgtgcggaagaggtaaagtggcgtatgcactactgcaacgtccgcttttgtgtttctaaagccctgcttcgattaccctaatcagatataattggcgtttcttggtgtcgttgggcttgagcagcagctaggagctgtggtttttgcttgtttccgaaaagaaaaatatcacgcgcgcatgtcaggcgtggattcaccgcgtgattcctcgtccgacgtgtcacagatatgaaatgtttggttccatttggaaagggggagcggcaaagacatctatgcccaatattttgtgtcatgggaggcctgctggcttgcttttatgcacgctagagatgtatgggctttttatattcagactttagattggaaataccacaaatatgttaaggttcctg

SEQ ID NO: 1148 - DNA, 345 bp, Oryza sativa
  ref <308>: DATABASE ACCESSION NUMBER: AK059207
  ref <309>: DATABASE ENTRY DATE: 2001-12-06
atggccagagccaaacctctggccggagagagaataaacaccatacatgtgcaaaacagccatatgtttatcagctcattaattagtagtcacttatgtgtctgtatagatgaatatggatgcatgcggaataatgctaagtagtgcctgataacgtaagtatgaaatgaactagcaaaattttgagagggagggaatattggttaacttttgaaagaagctatatatttgttacaaacgcatttaattagaagataaactgtaattaagagaagcatgcgatgaaaattaagctttcgatgataagccataattaagaagaacgtaaatcaagttcaaaggagt

SEQ ID NO: 1149 - DNA, 1896 bp, Oryza sativa
  ref <308>: DATABASE ACCESSION NUMBER: AK059208
  ref <309>: DATABASE ENTRY DATE: 2001-12-06
aagcaaaagcgattcccgtagtagcggcgagcgaaatgggagcagcctaaaccgtgaaaacggggttgtgggagagcaatacaagcgttgtgctgctaggcgaagcggttgagtgccgcaccctagatggctaaagtccagtagccgaaagcatcactagcttacgctctgacccgagtagcatggggcacgtggaatcccgtgtgaatcagcaaggaccaccttgcaaggctaaatactcctgggtgaccgatagcgaagtagtaccgtgagggaaaggtgaaaagaacccccagtgggtagtgaaatagaacgtgaaaccgtgctgagctcccaagcagtgggaggggaaagtgatctctgaccgcgtgcctgttgaagaatgagccggcgactcataggcagtggcttggttaagggaacggaacccaccggagccgtagcgaaagcgagtcttcatagggcgattgtcactgcttatggacccgaacctgggtgatctatccatgaccaggatgaagcttggatgaaactaagcagaggtccgaaccgactgatgttgaagaatcagcggatgagttgtggttaggggtgaaatgccactcgaacccagagctagctggttctccccgaaatgcgttgaggcgcagcagttgactggacatctaggggtaaagcactgtttcggtgcgggctgcgcgagcggtaccaaatcgaggcaaactctgaatactagatatgacccaaaaataacaggggtcaaggtcggccagtgagacgatgggggataagcttcatcgtcgagagggaaacagcccggatcaccagctaaggcccctaaatgaccgctcagtgataaaggaggtgggggtgcaaagacagccaggaggtttgcctagaagcagccaccctttaaagagtgcgtaatagctcactgatcgagcgcccttgcgctgaagatgaacggggctaagcgatctgccgaagctgtgggatgtcaaaatgcatcggtaggggagcgttccgccttagagggaagcaaccgcgaaagcgggggtcgacgaagcggaagcgagaatgtcggcttgagtaacgaaaacattggtgagaatccaatgccccgaaaacccaaggtttcctccgcaaggttcgtccacggagggtgagtcagggcctaagatcaggccgaaaggcgtagtcgatggacaacaggtcaatattcctgtactaccccttgttggtacggagggacggaggaggctaggttagccgaaagatggttataggtttaaggacacaaggtgaccctgctttttcagggtaagaaggggtagagaaaatgcctcgagccgaggtccgagtaccaagcgctgcagcgctgaagtatgagccccgtggactagccattgcttctccacgaggctcataccaggcgctacggcgctgaagtatgtaacccatgccatactcccaggaaaagctcgaacgaccttcaacaaaggggtacctgtacccgaaaccgacacaggtgggtaggtagagaatacctaggggcgcgagacaactctctctaaggaactcggcaaaatagccccgtaacttcgggagaaggggtgccccctcgcggaaactgaggagcaagaagagggtgaatgcactgaaggattgtctggtaccagtaggcaattggtgacacttttgtcgacatacaacattttcctttcaaaatccttttctttttctctcctttttgaggatcctttacttgtattttttttaccttggatcttcatgtacaacacgttgtcagaatagtgtagctcgtccccgacgaaggaatcaacagattttgcagagctattcatttataccgtcatctacagaaattgaaatacc

SEQ ID NO: 1150 - DNA, 1703 bp, Oryza sativa
  ref <308>: DATABASE ACCESSION NUMBER: AK059209
  ref <309>: DATABASE ENTRY DATE: 2001-12-06
tctttcactgtttgccacagcaaagcatgggattcaaaaattgttaccagtgcttggtgggtgtatccttatcaagttagcaaaacagctcccactggcgagtacctaacagtgggtagttttatgatccgtggcaagaaaaattttctcccacctcacccccttgttatgggatttggtattctattccgtttggatgagagctccttggcatctcatctaaatgaaaggagggtcaggggtgaagacgaggaggcccttcctgatgttgagtctcagaagctggaaagtaatgctgaattggatggtgaacttgacagtgatagtgagactggcaaggagaaacatgatgatgaatcaagcttggataatatcaatgttaaaaaaattgacaatcccatcccttctaatgcaccttatgttaaggataatgctgattcatctgagcagctttctgaaatccgaactgtggtaaacagcactacttccacttccaagggacaaacaagtgatcgcactgtttcatcacaacttgaggatctgcttgataagaatcttggtcttgggccaactaaggtgttaggcagaagctctttgctcagcagtaattctgcaagcgtggcagatgacattgatgatcttgatacgaagaaaacatcagtaagagataaaccatacatatctaaagcagatagaagaaaactgaagaaaggtcagaatgttggtgattctaccagtgactctccaaatggtgaagctgccaaaaagcctgttaactcacagcaagaaaaaggtcctgtttcagtttggacttggcagtaacgcgcattttgtcattttagaactatacgcacaaggaaatatacttcttacagattccgaatacacagtgctgacactactccgttcacacagagatgataacaagggattggctatcatgtcgcgtcaccgctacccagtagaagcatgccgtgtttttgaaaggactgactttacaaagttaaaagacacgctgatgatgaatgcagttgatgataaagaatcttctcaagttacacccggttcaattgatgctcaagaaccttctgtaacccccagtgatggagtgccggttactgataaatctgaagaaccatctacaacaacaggaaagaagtcagcttcaaaaaacaagcagtcaagttcaaatgcaaaagctagtaataatgctccatcaaataaatcaactctaaagacacttcttggggaagcattggcttatgggcctgcattagctgagcatatcatattggatgctggattgcttccaagtacaaaggttgggaaagacccagagagcagtattgatgatcacactattcagtccctagtagaatccatttcaaagtttgaggattggcttgtagatgtcatgtctggtcaaaggatccctgaggggtacatcctcatgcagaataaggcggctgcaaagaagaacctcacacctttggaggggtctagtgctagtcagaagatatatgatgaatattgccctgtcctgttgaatcaatttaagtcaagggaattcaatgaatttgagacatttgatgctgctctagatgagttctacagcaaaatagagagtcaaagggtgaatcaacagcaaaaatcaaaagaggactcagcggcacaaaggcttaataaaattaaattggatcagg

SEQ ID NO: 1151 - DNA, 1160 bp, Oryza sativa
  ref <308>: DATABASE ACCESSION NUMBER: AK104055
  ref <309>: DATABASE ENTRY DATE: 2002-08-28
cagcgaagcgcgactccgttttaaccgccttcgccgccgccgccgcgatatcgatcccctccctcttgccgtcgacgccgtcggcatccatggcgccagggctctacaccgacatcggcaagaagaccagagatctgctttacagggactacgggacgcaccacaagttcaccctcaccacttgcacccccgagggcgtcactatcacagctgcaggaacaaggaacaatgagtctgtctttggtgagctccaaacccagcttaagaacaagaaattgactgttgatgtcaaagcaaactcagagtccgatcttttaacaacagtcacggttgatgagtttggaactccagggttgaaatcaattcttagtttggtagttccagaccagaggtcagggaagcttgaactccagtaccttcatgaatatgctggcatcaatgcaagtgttggcctgaattccaatcctatggttaacctttctggtgtctttggaagcaaagagctctcagttggtgttgatgttgcattcgacactgcgactagcaatttcaccaagtacaatgctgcattgagtctaaccaattcagaccttattgcttctctgcatctgaacaatcatggtgataccttgattgcatcctactaccacctggtaaagcaccattcgaacactgccgtaggagctgagctgtcccacagcttctcaaggaatgagagcacactgatctttgggtcccagcactcattggaccctcacacgacagtgaaggctcgcttcaacaactatggcatggccagcgcgctcgtccagcatgaatggcgtcccaaatcgctaatcaccatctctggtgaggttgacaccaaggcaattgagaagagcacgaaagttggcttgtccttggtgctcaagcattgagtatgttttgcatcctaggaatttttcttcagttcttgtggattggaataacatggaaaaaacatggccacagctaccattgtggcttcattttgatcttgagttctttccccaccattaccctaggcaaacattagcattggctatatatttttatcctcggcgcctgttgttaataattttgggtgatttgagacctattgctgaatactgtcaaatatgatggagatatctctgtgttcc

SEQ ID NO: 1152 - DNA, 1803 bp, Oryza sativa
  ref <308>: DATABASE ACCESSION NUMBER: AK059210
  ref <309>: DATABASE ENTRY DATE: 2001-12-06
agctcgatcgtcggcagccaggctaatcttgccatggatcgtcggctccttctctctgctctactgttcatcgctctggcttgcagctccaaccgcgtccatggcgcactcaacaggcacagcttccccgaggggttcctctttggcaccggcacctccgcgcatcagtacgagggtgctgtcgacaagcgaggtcagaacatctgggacaccttcagccgcattccaggtaaaatcgcagatggtagcaatgcagatatagcgaatgacttctatcatcggtacaaggaggatttgaacctcatcaccgcgatgaacatggattccttccggttctccattgcatggagcaggattttaccaaatggaaccattagtggaggaataaacaaagaaggggtcgaattctacaacagcctcatcaacgaggtcatagctaaaggactgaagccttttgtcacaattttccactttgacactccacaggctttggaggataaatatggcggcttcttgagcgaaaacatcgtgaaggactacgtggattatgcggacctttgcttcagcctgttcggcgaccgcgtgaagctatggaacacgttcaacgagccgacgatcttctgcatgaacggctacgccaccggcatcatggcgccggggcggtgctcgccgtacgcgtcggcgtcgtgcgccgccggcggcgactccggcagggagtcgtacgtggcggggcaccacctcctcgtcgcccacgccgaggccgtccgcctgtacagggccaggtaccgggcggcgcacggcggcgaggtcggcatcacgcaggtgtcgcactggttcgagccgtacgacgccggctccgccgccgaccggcgcgcgcggcggcgcgccctcgacttcatgctcgggtggttcatgcaccccgtggcgcacggcgagtacccgccggcgatgaggaggctcgtcggcggccggctgccggcgttcaccgccgagcagtcggagatgctcaggggttcgttcgacttcatcggcctcaactactacacctccaactacgccgtggccgcgccaccgcccaacaagctccacccttcctacctgactgacaattgggtcaacgcgacaggttaccgcaatagcatcccgattggtccaccggcttacacgccgatcttctttaactatccgccggggctacgcgagctgctgctgtacgtcaagaggagatacaacaatcccaccatctacatcaccgagaacggcactgacgaggcgaataacagcacgatccccatatccgaggcgctcaaggacgagacgcggatcggcttccactacaagcacctccagttcgtgcgcaaggccatccaggagggtgtgaaggtgaagggttactttacatggacgttcatggactgcttcgagttcggcgatgggttcaaggaccggttcggcctcatctatgtcgaccgcgccacgctcgcgaggtttcgcaagaagtccagctactggttcgcggatttcctccgtcgatgatgatgattcaaatgcttcaagctcctgatcgacagtgattcgatccgatctatatctccagtgtactcgatgaagctagtttcaggcagctgcctttttttttcttttttcttttaaaataagagagagaggcaaggctaggcaggcagctgatagaattaccaaacctgatgtgtgcagtgtgctgcccaaataattgccatgtgcatggaaaatgattgtgttttctcatggatattgatttgattactggtacagcgagatgtc

SEQ ID NO: 1153 - DNA, 1719 bp, Oryza sativa
  ref <308>: DATABASE ACCESSION NUMBER: AK059211
  ref <309>: DATABASE ENTRY DATE: 2001-12-06
aacagcaacagcccagtactactagcaccgagacgagacgagagagagacggtcgccctcccagtccagtacagtgactcactctcactccagactcctccctctctctctcgtctctctcctgccggcggcgccgtggcggcgagcggcggagcactaggggaggagggggctcgtgctcgtctgtcgctgggtgtgtcgggggcgccgcggatcactctgcctcgagctgcgcgctcgcattccgctccttcgatctgggttcatctgttctgagatggctggcgacattacgtgtggatccttgctgcagaaactgcagttgatatgggatgaagttggtgagagcgacgaggaccgcgacaaggtcctgtaccagttagatcaggagtgcctggatgtttacaagaggaaagttgaccaggccaccgactctagggatctccttatccaggcgctggatgactcgaagattgagctggccagacttttatctgctctaggagagaaggccatagcaagaactcctgagaagacgtctgggacaatcaagcaacaacttgctgctatagcgccaacactcgagaagttgaacaagcagaaaaacgaaagagtgcgggaatttgttaatgttcagtcacaaattgatcaaatatgtggtgagattgctggcactacggaggtgggtgagaaggtggcaacgccacaagttaatgaggatgatttgacacttgagaggcttgaagaatttcgttcacaactacaggagctcgaaaaagagaagagcaataggttggagaaggttcttgattatgtgagcatgatacataatctctgtactgtcttagggatggattttcttagcacagtgactgaagttcatcccagtttggatgactctattggtgacaactgcaagagcattagcaatgatacactgtcaaaacttgacaagactgtagccacacttaatgaagacaaaaagtcaagactaagcaagcttcaagagcttgctggtcaactctacgatctttgggatctcatggatgcccccatgcaagaaaggagcatgtttgatcatgtcacctgcaacagatcagcctctgtagacaaagtcactgcacctggagctcttgccctggatctcattgagcaagctgagatagaggttcaaaggctagaccagctaaaatacagcaagatgaaggaaatagctttcaagaagcaaactgagttggaagacatctatgctggtgctcacatggtaatagatacagctgctgcccatgaaaaaatattggcgctgattgaggcagggaacatagaaccatcagaattgattgcagatatggaaagccagatatcaaaagcaaaggaagaagcattgagtagaaaagaaatattagacaaagttgaaagatggatgtctgcttgtgaagaagaaagctggcttgaagattataaccgggatgacaacagatataactcaagccgaggtgcccacctgaatctcaaacgtgctgaaaaggctcggattcttgtcaacaagattccagcacttgttgaaactctggtggcaaagaccagggcatgggaggagagccgtggtctgtcctttatgtatgatggtgtaccccttctcatcagactctgtagtatagcctttgctggtatgtattactattcgttaacctgtttgctacatgtacaagttcttgg

SEQ ID NO: 1154 - DNA, 334 bp, Oryza sativa
  ref <308>: DATABASE ACCESSION NUMBER: AK059212
  ref <309>: DATABASE ENTRY DATE: 2001-12-06
ttaatagagttgccactgcatatatatgctacttatttggtcgcacgcaagtaggtactcacttaattaagtatcagtttatggtaattagcttctactaatatatatatgtacctccccgagtaaccgtagtctaagctatgaggcagtacaaagtgtgtggtttttgtaccgggaagctagaggtcatcgtgccgataggcaaactgcgctgcaagctatatatatgcacataatacagaagcagttagtcaagtcgctagcaggtagcagcctagcagggcgcatgtactgtggttgttgatctccgttgcaataaattaaactgatatct

SEQ ID NO: 1155 - DNA, 1020 bp, Oryza sativa
  ref <308>: DATABASE ACCESSION NUMBER: AK104056
  ref <309>: DATABASE ENTRY DATE: 2002-08-28
aaaaaaaaaaaaagaaaccaacggcaggaggagggagacacctcgaggaaaccacagcacccaaagaacaagaaaggcgataccccttctcccaccaccaccgtttccgtccatctccatcctcaccgccggcgacgctcacctccgacgaccgatcggcgacctgcttcagccatggcaatggcttacaagatggcgacggaggggatgaacgtgaaggaggagtgccagaggtggttcatggagatgaagtggaagaaggtgcaccggttcgtggtgtacaagatcgacgagcggtcgcgcgccgtgctggtggacaaggtgggcggccccggcgaagggtacgaggagctcgtcgccgcgctgcccaccgacgactgccgctacgccgtcttcgacttcgacttcgtcaccgtcgacaactgccagaagagcaagatcttcttcatcgcctggtcaccgaccgcatcgaggataagagccaagattctgtacgcgacgtcgaagcaagggctgaggcgggtgcttgacggggtccactacgaggtgcaagccacggactcctccgagatgggctacgacgtcatccgaggccgcgctcagtgagctgagctcctccggcgccggcgcgccgccgcgacgcgacgagtcgcgggcgggcttgcggcgctgtacttagcacgtactcacccccagtgtgtgtggtataatcggacggatgctaattggctctctcgttctcgtagtagggcggctgatgatgcgatctgacgagggtttgtgaatttggtttagagtttggcgtggcgtggcgtgctgtttcgtttggagagttggaggggtgtgtgtagcgtggcgtgttgctgagggagtggcagcggattagtgaaacgtcccatgtcggtgacgtagaaattccactgatgatgctccacttggttgattaattgttccaggaaacatgatcggggtgcttcaaaattttgttcgcctgctggaataaaaggacacttgacactt

SEQ ID NO: 1156 - DNA, 1645 bp, Oryza sativa
  ref <308>: DATABASE ACCESSION NUMBER: AK059213
  ref <309>: DATABASE ENTRY DATE: 2001-12-06
gttcgctggggatggacggcggtggccagggcgtcgcgcggcggcacggcgcggtggcggaggaggatcccgaccgccgccgcggcgaccgctcggggaaagaaggtgacgacgacggcgtcgacgtcgacgagaaggcgcctccgcctcgccggaccagcaggcgggtcgcgtcgctcgacgtcttccgtggcctcaccgtcgctctgatgatactggtggacggcgccggcggcgagtggccggtgataggccacgcgccgtggaacggatgcaacctcgccgacttcgtcatgcccttcttcctcttcatcgttggcatggctattcccctctccctcaagaggattccagaccgcggtcgagctgtgaggagagtagtgctcaggacactgaagctgcttttttggggaattctgttgcaaggcggttactcccatgcccctgatgatttgtcttatggagttgacatgaagcacgtgagatggtgtggtattctccaaaggattgctcttgcatacttggtggttgcagttctagagatcgtaacgaagaatgcaaaggttcaggaccagtcaagttcgggcttctcgattttcaggatgtacttctcccagtggattgttgcatgttgcatccttgtgatctacctgtcccttgtatatgggatttatgttcctgactgggatttcagagtgtcagatgttaaaaatccaaacttcggcaaaatcttgacggtgacatgtggtacacggggaaaattaagtcctccttgcaatgctgtaggttatattgaccgtaaagttcttggtatcaatcatatgtaccacaggccagcatggaggaggcacaaggactgtactgatgattccccacatgagggaccttttaaaactgattccccggcgtggtgttatgcaccatttgaacctgaagggttactaagctcactgtccgcggtgttgagtacgatcatcggggtgcattatgggcatgtgcttgttcatatgaagagccacacggacagactaaagcagtggtctatcatgggcataactctcctcattcttgggcttactctgcacttttcacatgcaattcctttgaacaagcaactgtacaccttcagttatatctgtgttactgccggtgcggctggaatcgtgttctacatgttctacttcctggttgacatcctgaatctgcactacccattcgcacccctgaaatggaccggcatgaacgcgatgctggtgtacgtgatggcggcggcaggcatcttcgaagggttcttgaacgggtggtactacgagggcaccaacaacacactggtttactgggtgaggaagcatgtgttcgtgaaggtgtggcattccacccgtgtgggcatcctcctctacgtcctcttcgcgcagatcttgttctgggcccttgtcgccggcctcctccaccgtgctcgcctctactggaagctctagcactgcactggtacactacactacactacagcgtttacacaggggctgttcggattgatgtcattttcaaccgaactattttttttaaaattaccaaaaagaagtgttgcatttagtttgttgccaaactttgataaatacataagaaatcctaccaaaattttgat

SEQ ID NO: 1157 - DNA, 584 bp, Oryza sativa
  ref <308>: DATABASE ACCESSION NUMBER: AK059214
  ref <309>: DATABASE ENTRY DATE: 2001-12-06
gtttagatgatcatgttgagatagatctcgacagtgatgatgacttggaatactccatgaacaagatgtccataacgccgaaccgctctttctttcatcaaattatggcaaatagtgacactggccttaccatgcctgcgaggatcagaccatcaataagccccccatcataatgggtccaaagatcatcgccgccgccaacttgttgttcacttcacaaaagaaacagccgtatgctgggagtgcattaggatccagcttgtataagagtacaagtatcggatagaattggagctttacttcatagctggtagaagggtcgaacgacccatcttttgcgatgtatccagcccaaataggttagttgttgggatgaaatgtgaagtacagatgtgttattaaaaacgaagcgggagtggttgtgactatagactagcaggtagccctctggtatgtaaaagacaggcctgttttgatgtagaacgatttaccaatattttttatatcggaacagcagctgtctaactttgatactagatttggttggtcggtgctgtttcctgaatatgcgttgacacttgacg

SEQ ID NO: 1158 - DNA, 1201 bp, Oryza sativa
  ref <308>: DATABASE ACCESSION NUMBER: AK059215
  ref <309>: DATABASE ENTRY DATE: 2001-12-06
aaagatgtgctgtcgtcctttcaacttgacccagaacttacagaacctcatcgacttataaaacatgagaaattggagctctatttgcaagacaatcctttgtgcagtgatgtagacagtacacttgactctaaaatggctgcaattaaggctgcaatagaaggtgctgaaggacaggacaccgcacataaggagtttgccaaatgtcacatcatgggaaatcacaagaggccattgttactatcgagtgaatccagaaagcttatcgcataccatgaaagtgggcatgctattgttgcactccacactcagggtgctcatcccatacaccaagcaactgtacttccacatggtctttctcttggaatggtcacacaagtcgcttcaccaggaaatacttcaattagcaaacaaaaaatcttggcccgcattgatgtttgttttggtggagcagttgctgaagagctgttgtttggggagcacactgttacagctggggcgaaaaatgacctctttactgctaaagagcttgcccaaaaattggtattatactgttagaccagtgatactgttgatcgtatgcatctggaaaaatggccaagtgtacaaatgcaggccacgattaatgcagaggtgttgaaactcctaggagaatcccgtgagcgagtgaagcgtttgctgaagaagcatgagatgcagctgcaggctatggcaaatgccctattggagaaagaaattctcaatgcagatgagatcatcaaggtggtgcagccctacaaaagagaaccacagattaccttccaagataaggagcttgcagttaattggtcgtaacatttgctgcataaaagggcagaagatacattaaggcgaacagatggtgactgctctttttttttgtccacttttccttttttgtaatctggatctctgcaatatggatgcatattttcttggtggcacatgaaggttgtgctcaagaagctagctaggcgcgcccttgataatctttaatttggtctttagttagaaagaaacaatagagctaggtgcaagtgcagcatctcatatttctgatgctaggattatttccgcctgtgtactgtaaatctctaatgcatgggtcactcttgttctttgcacattgttcacagcatatgctcagtgctgtagtgagttcatgaggcagagtttgcaagtg

SEQ ID NO: 1159 - DNA, 435 bp, Oryza sativa
  ref <308>: DATABASE ACCESSION NUMBER: AK059216
  ref <309>: DATABASE ENTRY DATE: 2001-12-06
atggaaggtgtagccgcgcagttcgccggtccgatcctcaccatcgtcgccgccgccgccgtgaccttctacgccgtcagcttcatggagctccgagacaaatctttcgaggaactcgacgagaagtactcggagctcgacgacgccggcggccagcagcgccgcgcgcgacggcgggccgagcgcaagtccaggaagaagtgactgaccgacatctcgatatgatgatcagatcagcccaactgcctgagaacaggaggatgatgaaccgtcgttgtcgtcgttggtcatttccttgctagatgctagtagtggttaattatcgaatgtaaacctgatttcaagcttgtttcagtactggtcttccatctcatccgtttttgtattgaaatttggcaagttcaaagttgcagaaaatagctgccctggatcgat

SEQ ID NO: 1160 - DNA, 1088 bp, Oryza sativa
  ref <308>: DATABASE ACCESSION NUMBER: AK059217
  ref <309>: DATABASE ENTRY DATE: 2001-12-06
ttagtgtgtatatgttgtctggggacaagaaaagtgctgctatgaatgtagcttcacttgttggtatccaggcagacaaggtcattgctgaagttaaaccacatgagaagaagagtttcatatctgaacttcaaaaagagcacaagctagttgccatggtcggtgatggcatcaatgatgctgcagcactagcttcagctgatgttggcattgctatgggtggaggtgttggtgcggctagtgatgtgtcttcagttgtgcttatgggcaatagattatctcagcttgttgatgctttagagttgagtaaagagaccatgaggacagtgaagcaaaatctttggtgggcttttctgtacaacattgttggactacccatcgctgctggggcattgctgccagttacaggtacggtgctgaccccgtcgatagctggagctctaatgggttttagttctgtcggcgtaatggccaactcactgttcttgagaatgaggttgagttcaaggcagcaaccaatccataagccacaggcgaccatttctgatgtattacccaacgcagccgagtcagagaaaagttatccatcaaaatggagtgcctagctgacatccatttcttcatgaccggctgacctgctttgccttaaagagttcatagcagtaacacgcgtcgcagagaaaacacagtaatttggcccggaactggatgtcgtgataggtagtcctgtctcggagatcagatgcagtcataagaacaaaagaataatcagataaagcacagggttaggagagttcagctgccgcgtgttggtgttttttttttctttgaaaagagtattgagtatgctagtatacaggtacaggccgatacttcacacacgagggcaacatcctctccgatatgtggtacttctttcatgcatagtatttgctatgctgtaacgtttttcctctgataaaaaacactattgacgagtgaaatgacggtccgcgtaccagaactcatgtggtggcgtctcttagatactgtgtagagtcgatactcttctgaattcattctcaattgttaaccatggtgattcgcac

SEQ ID NO: 1161 - DNA, 1032 bp, Oryza sativa
  ref <308>: DATABASE ACCESSION NUMBER: AK059218
  ref <309>: DATABASE ENTRY DATE: 2001-12-06
aaaaaaaaaaaactcttgctggggagcatgccgcagcagggaactttgacactgcaatgaggttgcttagccgccagttgggcataaaaaactttgctcccctcaagcccctgtttgttgatctgcacatgggcagccactcatatcttcgtgcacttgcaactgcccccataataccaatcgctgttgagaaaggttggagcgagtctgcaagtcctaacgtgagaggccctcctgcacttgttttcaccttcccacaaatggaagacagactcaaggctgcctataaggccaccacagatggtaagttcccagaagccctgaggcagttccttagcatcttgcataccatccctcttatcgtggtagactcgaggagggaagtggatgaagtgaaagagttgatcgagattgtgagggagtatgttcttggcctgaggatggaacttaagaggaaggagctgagagatgatgtcaaccgccaacaagaattggcggcttacttcactaactgcaagcttcagagagttcatatgaggcttgtgcttggaagcgctatgggtctgtgctacaagcaaaagaacttcgctactgcagagcactttgcaaggatgcttctggagaacaaccctaatgaggcccaagcaaggagggctcgacaggtgcagcagcagtgcagtggcaagaaggatagctctgagctgaactatgactacagaaatccatttgttgtctgtggcgccacgtatgttccaatctaccgtggccagaaggatgtttcctgcccgtactgtggctcccggtttgttccttcgatcgaagggcagctttgtaccatatgtgagcttgccgtggttggtgcagatgcttcaggcctcctctgctcccctacgcagtcgagataagcgtcggtagatatgctcccttatattctttctagtctctcttaagacttcgctatgatatattttaccaggatgtttactgattgtaaggaataagtagtgttatacatggttgagtttttgtttc

SEQ ID NO: 1162 - DNA, 1634 bp, Oryza sativa
  ref <308>: DATABASE ACCESSION NUMBER: AK059219
  ref <309>: DATABASE ENTRY DATE: 2001-12-06
agcatggggcacgtggaatcccgtgtgaatcagcaaggaccaccttgcaaggctaaatactcctgggtgaccgatagcgaagtagtaccgtgagggaaaggtgaaaagaacccccagtgggtagtgaaataggacgtgaaaccgtgctgagctcccaagcagtgggaggggaaagtgatctctgaccgcgtgcctgttgaagaatgagccggcgactcataggcagtggcttggttaagggaacggaacccaccggagccgtagcgaaagcgagtcttcatagggcgattgtcactgcttatggacccgaacctgggtgatctatccatgaccaggatgaagcttggatgaaactaagcagaggtccgaaccgactgatgttgaagaatcagcggatgagttgtggttaggggtgaaatgccactcgaacccagagctagctggttctccccgaaatgcgttgaggcgcagcagttgactggacatctaggggtaaagcactgtttcggtgcgggctgcgcgagcggtaccaaatcgaggcaaactctgaatactagatatgacccaaaaataacaggggtcaaggtcggccagtgagacgatgggggataagcttcatcgtcgagagggaaacagcccggatcaccagctaaggcccctaaatgaccgctcagtgataaaggaggtgggggtgcaaagacagccaggaggtttgcctagaagcagccaccctttaaagagtgcgtaatagctcactgatcgagcgcccttgcgctgaagatgaacggggctaagcgatctgccgaagctgtgggatgtcaaaatgcatcggtaggggagcgttccgccttagagggaaaaaagcgtcgcacgacacgactctcctcccaccgctcggccttcgcaccgccgccgccggcgccaccgctcgggagacgcatccgccgccgccgccgccgcccgccatggggacccgggaggtgtacgaggagaagctgcgtagcggcgcgcacctccaccgcgaccccaccatgaaccccggcctcggctccgcccgctgccctcgctgcctctcgctcctcacccccaactcctccggagagggcgactgggccatcacctccgtgctccacgacgccaccgccgtggctggttcgggcgccggcgcgatgctcagtgcggtgcacgggttcaatacagggattccgttcgtccagaagcatgtgaaggggcccaagtggctgcaacttcttgttggggtgcctccattgctcttgttctctggtaccagcgctttatttggggcatatgcgcttccaacgtttgctcagctcactgtaacatcttattatgccgcatcaagtgcctctcactatgcagtttcgcagattacccgccagatcgaaaggtcccatttgtcagacactaatgggaattccagatgagtttttctcactcaatattatgctacatacttgtttacgctctatatacgtggtacataagttattcctcccgttttttctgttgcactagtctgatagcttcggcatgttttgcacacacaaacctatatttatcataggatgaagctgcatgtccttaacatcctaaattaaaagtgcttctcttct

SEQ ID NO: 1163 - DNA, 1170 bp, Oryza sativa
  ref <308>: DATABASE ACCESSION NUMBER: AK059220
  ref <309>: DATABASE ENTRY DATE: 2001-12-06
gaaggggagacgccctcatctcgctcgcgccgagccgcatccccgtttcgcagcgatcgcgacgaccgaggccgcccgggaggtcgcggcggcggcggcggcggtggcagggaggtgcccgatgggcgacgagaagtctccgctgagccagatgggcagccgcgaccgggaccgggagctcctcatccccgtctccggcggcggctcggcccccggagacggcgacggggacggcgacagggcggcctcctcctccgcgtccgccgctctgtcctcctccagccgcgaggcttttcataaggtggtccgaagttgggcttcaaagaaattcatgactggatgtgtaattctcttccccatagcaataacattctacatcacatggtggttcattcattttgttgacggattcttctcgccaatctatgctcaactgggaatcaacatgtttggtcttggctttatcacttctgttaccttcatatttgtggttggagtcttcatgtcatcttgggttggagcatctgtccttagccttggtgagtggattattaagcgcatgccacttgtccgtcatatctacaatgcatccaagcaaataagtgctgcaatatcaccagatcagaacaaacaggcattcaaggaagtggtcatcataaggcatcctcgtattggagaatatgcatttggtttcattacatcatcagtctctctccagagttatactggtcaagaggaactgtactgcgtgtatgtcccaaccaaccatctttatattggtgatatcttcatggtaaattcgaaggatgttataaggccaaatctttctgtccgtgaaggcatcgaaattgttgtatctggtggcatgtcgatgccccaaattctatcaactctggacccacagacaattcttggagacagaacaggagcaagcagaagctgagatctctccttggttgcaacttgactaaaattatcagaccaagtacagtgaactagatcctgagcaacacgatgtattagtggtctgtcgagctctaggatcacaaggatctgtaaattagtagaagtaggtgactcatatattccttgttcatccgttggcagtttgtaccatggtttgcactttctaccacgttctatacaagaatgcttcgtagttgtaacgcc

SEQ ID NO: 1164 - DNA, 1704 bp, Oryza sativa
  ref <308>: DATABASE ACCESSION NUMBER: AK059221
  ref <309>: DATABASE ENTRY DATE: 2001-12-06
gatgacaaaaaatatattgccaaggttctagcaaggggtattgagtgtgaccttgcattgctgtctgttgagaatgaggaattctggcgaggaacagagccacttcaactgggtcgcttgccgtgccttcaggattcagtaactgttgtgggatatcctcttggtggagacacgatatctgtaacaaaaggtgttgtttcacgcatcgagcccaggtcactccatatgcacatggaacttcagatcttcttggcattcaaatcgatgcagcaataaatcctggaaacagtggtggaccagcctttaatgaccatggggaatgcatcggtgtggcatttcaggtgttcaggtcagatgaagctgaaaatattggatatgtaattccaactacagttgtatcccatttcttgaacgactatcagaagaatggaaaatatacaggatttccttgcctgggtgttctccttcaaaaattggaaaaccctgcgttgcgtgaaagcttaaaagtaccttcaagtgagggtgttcttgtccgccgggttgagcctactgctcctgcaagcaaagttttgcggaagggagatgtgataacaagttttgatggcgtcgcggttggatgtgagggaactgtaccattccgctccacagagcgaattgctttccgctacctcacaagccaaaagtatgcaggtgatgttgcccaactaggtatcattcgggcaggcaacaccatgaaagtacagaccgttttgcagccaagaaaacatttagtgccgttccatgttgaaggagggcagccttcctatctgatagttgctggccttgtcttcacacctttgacagaaccatttatagaggaggagtgcgaagaaactctagggttgaaattgctggcaaaggcacgctattctctatcaacatttgaaggggagcaaatcgttattgtatcacaggttttggcacacgaggttaacattggctatgaacacatgggcaatcaacaagtcattaagctaaatggaaccgtggtaaagaatattcaccatcttgcccaccttgttgacaactgcaaagacaagttcttgacgttcgaattcgaagacgacttcctagttgttttggatcgggaagaagcgactaccgcatcatcagatatcctaaaggaacatgcaattccctctgtaaggtcatctgatctatcagagccatatgtcgacacagagcaagaaatccaaaaaccaaacgatgattttggtgacagccctgtcacaaactatgaaatgggagttgactgtctcctctgggcatgaacagccaaggatggaatttgaatttcagttcaaacagtgacaatgccggtgaatttcatgcatctggatggcaggaaagagcatttccccaccatgttgaaatccactccatagaggcgaagccggagtcatgtttgttagtgtaggaagttcagagttatgttgtaccttagaaaaccacacaaatgcttgattcatcatcaatttttttaggggatgggactatgggactgtgggagattgggggagggctgtagaatttggcagggtgtaatcctgtaattttttgggcatgcaataaatcgtccagaaattttgttgctttatttttacctcttgtttgtactcccatcatttttagagaacattttatgagtgctagtattcgatattc

SEQ ID NO: 1165 - DNA, 1985 bp, Oryza sativa
  ref <308>: DATABASE ACCESSION NUMBER: AK059222
  ref <309>: DATABASE ENTRY DATE: 2001-12-06
taaaactccatacagaaaagatcctgctgattcagaggctgtgttggcagcagcacgtaaaaaaataagggtgtttcagaacactatttctgagtgtgaagaagtggagaaggatgtggatgatgctgagagggatgaagattctgagtgtgatgatgctgacgatgatcctgatggtgatgaagtgaatattgaggaaaaagatgtcaagacttccctggttaaggcacaagatggtggcatgccaactgcagttggtgacataaagaaggaaacatggaaagaaacgatgctctgagctgatacaatgttgtgatttctgctatcagatttacttagctgaagaaacacactgtgcttcttgccacaagacattcaaatccattcacaatatctcagaacactcttcacagtgtgaagagaaacggagaacagatcctaattggaagatgcaaatttcagactattctgttcctgtaggattgagattgctaaagctgcttttagcaaccgttgaggcttcagttccagctgaagctctcgaaccattctggacagatgtttatcggaaatcttggggtgtgaagttgtattccacatcgtctacaaaagaagtctttgagatgctaaccattctggaaggtgccataagacgggatttcttgtcatctgactttgagacaacaactgagttacttaatttaagcacgcaagattcagcttctcgaaatactgttccacgttctggatctgctgatgtacttccatgggttcctgacactgttgctgctgttgtcttaagattgttagacctagattctgccatctcatacactcttcgtcagaaggtgggatcaaacaaggagcggggagctggagagttcatgaagcttccgccaagatatactcctgctaagaccaaacaagaaactgaacctatgggaacaggttttgatcgacaagaaacatggctaactccaagcaacggacgaggcggtcggggtggccgtggacgaggtagtcgaggcggtagcaggggaggcagatcccggagtcgtggtggcaaggtcccaagaggtattagcagctcccccaagatcgagttcaggggttacagtgccagcgccgtgtcatctgagaaagctcctcgaaagtatgctcgtcgagggcgtaatcgtggacgtgggcgtggacttagaactgttagacctcggcagccatcagatattggagccagatcaattccaaagccaaacttgctgggcagctttagcatgctaaggaatgcaaagcatacaacagccatggagtctcctcagagttctggtgcagaagagtggggcttggagagaaggccgtcatatgtcaaggatgatgaggacaattcagcttctcagtcagaggaatcgagtgaggaaaatagtgaacccatgaacgaggagtacgatgagctgctcccagattattcaagggacaattctgggtccagccctcttcagatgatggatgatgggagtgacgataatgaagaagatgccgaaggggatgaagatggtgaggaagatggagaggactacgatgcagaacagcatgttgacgaagacaacgacgatgctgagatgggcgaggatgatgtcgaggacaatgacgatggcgatggtggcggtggtggagcggagaacggtgacgaggatgaagacggtacatcatattcttccgagtatagcgaataaaacgaatgaattaagaagtctggccttttgaaggtcacgtggcaaccaagtgatggtacggtttacatctggttctatctagctcaaacagatggtttatccatacatagtagaggattatcggttttgtagaagtgtattggtaatttaccaacatgtagcaggatgtatacacagtatattcaatgtcggaaatcattcccgtacaaagttacctcgtacggcaggaaaagttaagaggggaagcccgat

SEQ ID NO: 1166 - DNA, 1314 bp, Oryza sativa
  ref <308>: DATABASE ACCESSION NUMBER: AK059223
  ref <309>: DATABASE ENTRY DATE: 2001-12-06
cccccctccgcctcgcactctctctcgctatagcctatagcgtctctcccgaaggctcgagacaccacacctctcttctctttggctcctctcctcgctgcattgcgatcccaagagctgtgagctttaggagcttgttcatcacgacctgaaaatcatggagttcgaagaccgctgccacaaggtccaggagcccaaattcgactgcctgctgtttgacctcgatgacactctgtacccactgagctcggggatcgcgtcccatgtcaagaagaacattggagattacatggttgagaagctgggtattgaggagagcaagattgagaaccttggcaatctgctgtacaagaactacggcacgacgatggccggactcagggcaataggctacagcttcgattacgatgagtaccacagttttgtccatggaagactgccctacgagaacatcaagccggaccctgtcctgaagcacattctcaagaacctgcgcatccgcaaactcatattcaccaacggcgacaaggaccacgccgtgagagccctcaagaggctggggctggaggactgcttcgaggggatcatctgcttcgagaccctcaacccgccgtgcccgtcgccgccgtgcgacggggaggccagcatcttcgacatcgccggacacttctccatgcccggcgccgccgccgacgagcttcccaggacacccgtcctctgcaagcccaacgtcgacgccatggaggaggccctcaggatcgccaacgtgaaccctcacaaggcgattttcttcgacgacagcgtgaggaacatccaggcggggaagaggatcgggctccacacggtgctggtgggcacgccgcagcgggtgaagggcgcggaccacgcgctggagagcatccacaacatcagggaggcgctgccggagctgtgggaggaggccgagaaggcggaggacgtgctcatctactccgaccgcgtcgccatcgagacatcggtgaccgcgtaggccacacctactgtctctcccgactccggcgaatcgctcagaacgagcaaccatccatccatccatgtccatccctggccgggcaggtgatcatcaggtgggaattcagaattggccgggacaacaatacgttccaagaaaaaaagaggagggtgttccgtggaagttcaggattcagaatgtaacagcaatgttggaacgggtcctgtagtatatatatgtatcggtcagatctttgcatgtaaattagtactcctagaagcaataataataataattaataaagagaatgggggttatttatc

SEQ ID NO: 1167 - DNA, 1269 bp, Oryza sativa
  ref <308>: DATABASE ACCESSION NUMBER: AK059224
  ref <309>: DATABASE ENTRY DATE: 2001-12-06
aaaaaaaaaaatgcaggcaaatttttgttgcagaatttgcctgatagaagtgatgccactgcatgggatgtcttgttagcaaataagtttgatacagaagcgtcacttcagaaactaccactgccagaatcctgggtggtgacaggattacacgaactcatcgatagggtcagcacaagctacgacaaatttttctttggcgatgcagctagagaaatctacgatttcttttggggggactttgctgattggtatattgaagccagcaagacacgtctttaccactctggtgatgattcagcttcttctatggcacaaagtgttctgttgtatgtgtttgaaaacatactgaagctattgcaccccttcatgccctttgtcactgaagagttatggcaggcattgccatacagaaaacaagcaattattgttgcccactggcctgcgactgatctccctaagaattctctctcgatcaagagatttcagaatttgcaatcgttgataagaggtatcagaaatgttcgagcagagtattctgttgagccagccaagcgaatatcttcatcagttgttgctgccgcagatgtcctagattacatatcgaaggagaagcaggtcctggctttactttcaaagcttgacatgcagagtatacattttagcgagttgccgccaggtgatgcaaatcagtcggtccacattgttgctgatgagggtctggaggcctatctacccctggctgacatggtggatgtttctgaggaagttaagcggctgtcaaagcgcctctctaagatgcagtcggaatatgattctttgctggcccgtctcaattcaggaagttttgtagagaaggccccagaagaaattgttcgtggagttcgtgagaaagcatcagaagcagaagagaagatctccctcaccaagaatcggctcgctttcctgcagtcaacagtatcaagttagattcagcagtcaccattgacggtgtcaacctgccatctaaataacaattttgattagtcctgatttggacgagagatgccacttccggatataaattggcgtgtcagagtagtgagtgccattccattttcgcgtgtgcaggacattgcaactggtgcacgcatcttaccgataagttctactatataacactcatttatacgtctactaggtatgcctgtacgcctgtgcgttgtaacgggacaatagttgtacatacataaacaatacataaacaatgaatggaataaacagttgcac

SEQ ID NO: 1168 - DNA, 1271 bp, Oryza sativa
  ref <308>: DATABASE ACCESSION NUMBER: AK059225
  ref <309>: DATABASE ENTRY DATE: 2001-12-06
aaaaaagctatatctgattctgtgatcatgaaagacaagcatacaaagatgcctcgtggatttggttttgttacattttcggatccatctgttattgacaaggttctgcaagatgaacacactatagatggaagaacagttgaagttaaaaggactgtcccgagggaggaaatgtcgtcgaaagatggtcctaaaacgagaaaaatctttgttggtggtattccaccatctcttactgaagataaattgaaggagcatttctcttcatatgggaaggtagttgagcatcagataatgcttgaccatggcactgggcggtcacgaggctttggctttgtcacatttgaaaatgaggacgctgttgaaagggttatgtcagaagggagaatgcatgatcttgcagggaaacaggttgaaataaagaaggctgagcctaagaaacctggcgggggtgattctagctctaatgggagacatagtcacgggagtggtggtggccaccgtagttcttaccgtggtagtggtggtggcaattctggaagcagcagcagcggtggctatggtggatatggtggtggctatcggtcagctgctgcagcttattacggtagcacaggttatgctggctatggcagaggttatggatatggaggtaaccccgcatttgggtcaggctttggctctggctatggtggttcaatgtatggaggtccatatggtgcctatggtgcatatggtggtgcctatggaggtggtggtgcatatggtgcaccgggtggctacggtgcaggaggatatggtgcttatggcggagctggaggtatgggcggtggtgggagcacaagtggtagaggctcgagcagataccacccgtacggaaaatgagcataagatcattgtggttttttagaactgataataaatctatacctttacattattcccattttctgctttgagagagttggaacattacattcaccgtgttgaaccagcggcatcagacgtgttctttgatgctttgcattgcatcgcatccggcaactagtacattgattctgtccgctgaaccctgaacctctgtagaagctacagctaaaacaatgttgtatcattagtttaccatgcagccttagaacccttgaaactaaactttgtggtaggaagaatatttgtgtgttggaacaatgtatcgtgatgtaacactctcaatgagcagctaactgttgccagtttggcttatatgtagggagactcaaaaatcatttgac

SEQ ID NO: 1169 - DNA, 631 bp, Oryza sativa
  ref <308>: DATABASE ACCESSION NUMBER: AK059226
  ref <309>: DATABASE ENTRY DATE: 2001-12-06
gaacgggcatcaatagaacagtggcttcaagcagaagctcaaaatttcagccctcccagctcggccctcgtcttccatctcgcatttgctccccatctgaacattccccaggaccatgctgttattgcagaaaatgagaagaaacttcagcaagtcctcaatgtttatgatgagatactctcaaagaatgagtacctggctggtgatgagttcaccctggctgacctttctcaccttccaaactcacattacattgtgagttctgagagaggaaggaagctcttcactggcaggaagaatgtggcaaggtggtacgaccaaatctcaaagcgcgagacatggaagcaggtggtcaagatgcagagggagcatccgggtgcattcgagtaatggcctgatatattgcccaagttcatcgtgtccgttgtcgatcgatctggcttctgctgtcctgtgttgtcatcgtcgctagtttgcctgttccctgcttatattgtcgtgtgaccaaataatatgaagcctcttcttgttgtgacgtagtttcataccatgtacctcgttgctttacaggtcatttgttttctcccttgtttagtgattaaataaaattgttaatcgacctggcagttct

SEQ ID NO: 1170 - DNA, 1671 bp, Oryza sativa
  ref <308>: DATABASE ACCESSION NUMBER: AK059227
  ref <309>: DATABASE ENTRY DATE: 2001-12-06
ataatcaccaaacgcttcctctgaaaaagcggtgtgtatgtgtgctcagctgaggcgctgagcgctcggctcggcacacgtcttccgcatactaaaatcctattctttttgcttgcttggctcgttgctgtctccagaaaggaagagaccttttctgctcttgttcttcttccacggatcgatcgcctcgctcgctttcgcctgttgcttcacgtttcggaagagcttgggtttgggggaattcgtgtgatcgtgttgatgagtaggtgaagaattcgggaagagctttgagagttttggcatctgatctagggcaaacgtgggcgtgggcgcgggcgcgtcgacggcgtcgtagcatcggcgacgtcgccggtcgccggcgagcatggagagcgagcaggtgaagaggcggttcgggcggtgcccctactgccgcgccatgatctaccaggaccccaacgccatcatctactactgcagcaagtgccgcacgcccatccgaggcaagaacccggagccgacggacgacgccgagtacgcgctctcccagctcgagatcctctccgccgacaccgcctccgtgttctccgacgacccggacacgctgagccgcacgtcctccgtcgcatacggcggcggcgagcagcctccggtgcggaccagctcggctccctacgcagcatttgatcggggcagcgttagggctggttcaagaagcggcgagcaatcgggggaagagagaggtggctcgccgatgcacagccgcgtcagcgaactccggccgacgtcgcggagaaccaggcggccgatgagcggcgacatgggtgcgttcagggacgatggatcgagctatggttcggacaacgacgtcccgacgtctgccgccgcgagctaccgccgccgggcgtcgccgctgacctcccaggaactggaggcgtcgtcgtcgtcgatggggtcgtcgggataccaaccgtccggcgtgtcgtcgtcgtcgatggggtcgtcgtcggtgtacgaaccgtccggcgcggcgaggtcgccgctgacggacccggcgttccagagggacctgctgcaggcgctggacaacctccggagggtcatcgccgccgtcgagcagccgtacggcgtcgacgcgcacctgcaacaagccggaatgcccccgaagagcgcgtcctgcaacgacgccgccaccggcggcagcggcggcggcggcggcgcgtacgcagcagcagccacgcggcgcaactcccgcctcatgcgccgcctcgagtcgcagctcgtgcaggcgctgcccagggacggcctgcgccgggacaggagcacctcctcctcctcgtcggcgtcgagcagccgcccgggcggcgaccgggccagggcggcggggcggaagcaccactgccgcgctgtgctgggcggcacgccgttcgtcgtctgcgacaagtgctcggagatactgcagctgccggccgccgtgtcggcgaacagggcggccaggctggagtgcggcgggggcgttgtcctgggcgcttgagagctgggttgggttgggctgggccatgcctttgcactctattattactccgtctttcctaaatcgatcatcatgtaatagaatctaaaatttctcaaattatcgtcatataattgcatggacacagatttcatcag

SEQ ID NO: 1171 - DNA, 830 bp, Oryza sativa
  ref <308>: DATABASE ACCESSION NUMBER: AK059228
  ref <309>: DATABASE ENTRY DATE: 2001-12-06
acctaccaagccgtatactgattgctcgctcgctcgctcgctgcgtcgccgcactttctccacagatttttctgctgctgttgcttcgtcgcctcgcccgcggattccgtactactaccggagggtttggttggttgatttggtttggtttagccatggccgggagagggaaggcgatcggctcgggcgccgccaagaaggccatgtcgcggagctccaaggccgggctccagttccccgtgggcaggatcgcccggttcttgaaggccggcaagtacgccgagagggtcggcgccggcgccccggtctacctcgccgccgtcctcgagtacctcgccgctgaggttcttgagctcgccgggaacgcggcgagggacaacaagaagacccgcatagtgccccgccacatccagctcgccgtccgcaacgacgaggagctatcccgcctgctcggcacggtcacaatcgccagcggaggcgtcatgcccaacatccacaacctgctcctccccaagaaggccggcggcagcgccaaggcggcggccggcgacgatgacaactagattctgacgcttcccggcgatggcggcggcggtggatgtggatgcagtggatggatggatgatatgttgtgtagtagtagtagtgttctaggatgcctaggtgttgcgttgatctctagtaggatctgaattagatgcttaattgtgcttgtaccgatgctaaaactaagaaggtgcacttgtgtatgatggacagggggattagttgctctgtaattcgttacctgtgttctatataaaagtatcatcctttcgatgattttcttg

SEQ ID NO: 1172 - DNA, 1512 bp, Oryza sativa
  ref <308>: DATABASE ACCESSION NUMBER: AK104057
  ref <309>: DATABASE ENTRY DATE: 2002-08-28
atcctgcgtcccagtgcccaccactcatcacctcccccctctcatcctctcctcctcctccaatggccttctcctccaccgccgccgccgcctccaccgccttcgtctctgggcaccgccgacgcggcggcgcgtgccacctgctgtcctcctctttcctcatcgcgttcccgcgcgccgtcgcggcgaggaggtgcggcgaggcggccgcggcgccgaggagggtgggcgcggtgaccgtgcgcgcgcaggcggcggcgggggcggggaagaagagcgtgctgatcgtgaacacgaatggcggcgggcacgccgtgatcgggttctacctcgccaaggacctgctcgccgcgggccacgccgtcaccgtgctcaccgtcggcgacgagggctccgacaagatgaagaagccgcccttctcccgcttctcggagctgacgagtgccggggcgacgacggtgtggggcgacccggcggacgtcggcgcggcggtcggcggcggcgcctcgttcgacgtcgtcctcgacaacaacggcaaggacctcgacgccgtcaagccggtggtggactgggcgaaggcggccggcgtggcgcaattcctcttcgtcagcagcgccggcatctacacgcccagcgacgagccgccgcacgtcgagggggacgcggtgaaggagagcgcggggcatgtgggcgtggagaagtacatcgcggagcagttcggcagctgggcgtcgttccggccgcagtacatgatcggctccggcaacaacaaggactgcgaggagtggttcttcgacaggattgtgagggggaggccggtgccgatcccggggtcggggatgcaggtgacgaacatatcgcacgtgcgcgacctggcgagcatggtggcgctcgccgtggagagccccggcgcggcggcggggaggatcttcaactgcgtctccgaccgcgccgtcaccttcaacggcctcgtcaagatgtgcgccgccgccgccggcgcccagccggagatcctccactacgaccccgccgccgtcggcgtcgacgccaagaaggccttccccttccgcaacatgcacttctacgcggagccgagggcggcgaaggaggtgcttggatggaggagctcgacgaacctgccggaggacctcaaggagaggttcgcggagtacgccagcagcggcagagggcaggaggagatgagcttcgacctcgacgacaagatcatcgccgccgcctaacaacacccatctcatctcacctcgtcatggtcaaatacaaatacaaagtgctcggggatctcttcttctcgtgatttattttcttctccctctgtttctttggttcctcttctcataccggaagcatagagaaatgcaaaactgaacaattatatatgtaaatgctaggaaaatgctgttacaaataagtgaataagatgagttttcgcttttcgtttttcatttttccatcacatatccaatatgagaatggaactttgcagagtcaatc

SEQ ID NO: 1173 - DNA, 1738 bp, Oryza sativa
  ref <308>: DATABASE ACCESSION NUMBER: AK059229
  ref <309>: DATABASE ENTRY DATE: 2001-12-06
aaaaaactctcacactacaacaaccacaacacactactactagtgagactagtaagcgtcattacgagatccaggtttaatagatcgtttaatctaccaccgttgatttagaaaggggttgaggggagggtagtagtagctaagttagggcaaagatgattacgggttcggaggtgtaccaggtggtggaggcgatggcgccgctgtacacggcggcggcgctggggtacgggtcggtgcggtggctgaaggcgttctccaacgagcagtgcgccgggatcaaccacttcgtggcgctctacgccgtgccggtgctcatcttcgacatggtgtccaccaacaacgtgtacaagatgaacggccgcctcatcgccgccgacacgctgcagaaggccgtgctgctgctgggcctcatggcgtgggcgctctgggagcggtcgcgcgcgcgcggcgccggggccaaggccaaggcggcggtgtcgtcgccgctgcagtgggtcatcacctgcttctccgtcgcgtcgctgcccaacaccatcatcatgggcgtcccgctcctcaacggcatgtacgggcccgtgtccaaggacctcatgaagcagatcgtcgtcatgcagttctgcatctggtacaacgtcatcatcttcctctacgagtacatggcggcgcgtagatcggcctcggcgccgccgccggcgtcgtcggagggcagcgccaagatcagcccttcgtcgccggtgaaagctgctgcggcggcggcggacacaaacggcaatgctgtcgcggccgaccggccgcaagaagtggcggtgaacatcgaaatcacggagatggcggcgtccacggcacgagacggcgtgtccggcgagacgacggcggccgccaaggaggtgagctctggtgaagttgctccggtggaagaggaggaggcgtctgcgccagcgccgtcgatgaagcacgtcatctggatggcggtgaagaagctgctacagattccgaatacctatgcaagcttccttggcctcatctggtctctaatcgcattcaagtgtggattctcgatgccaaaaatcgtcgaggactctctgttcaccattcgtaccaccgctgtaggcctaagcatgttttcttcagggacgttcatagcgcggcagtcgcggttcgcgccgtgcggatacaagatagcgtcgttctccatggtcatcaagtttctgataggcccggttgtgatgctgttcgcctcgctcgtcatcggcatgcacggcacacttctgcacatcgctgttgtgcaggcggctctccccctggcagtgacatcatttgtgtacgctgaagagtacaaggtccacgcagacatcatgagcacaggggttattcttgggatatttatatcacttcctgtgacaattgtttactatattctgttggggctgtgagcctgtgattgagacatctaaatttagtcgaaggctaattaaagttgcatgtgtgctgatgtgcatatatgtaggaagacagaatacaaacagtaaaaatactgaaggatgacaacaaggtgaattgatttccctccggagcctgaagattggggttctggcgagagatacagtgagatgtgactgtaatgtttggtaataataagatgtcacaaaaacgcggcatatatgctgaaacttttgcaatgtacagcaagtatacaatgaacagggcttattacagcccaccagttgattcttcg

SEQ ID NO: 1174 - DNA, 1961 bp, Oryza sativa
  ref <308>: DATABASE ACCESSION NUMBER: AK059230
  ref <309>: DATABASE ENTRY DATE: 2001-12-06
gcaatttaacggagcacctcaatatggtttgatggcagggaactcatcaaatacaaccacaaagcctagtgacaatgttccattgttccaaaattcgatggcaggaaactcctctaactttgccactaggcccagtgacaaagttccggtcttccaaccaacagtccagccatcttatcgccctgcacctaattacaaaaaccatggagcaatcatgaaaaatgaagcccctgctagaataatccccatatctgctttaaatccttatcaaggccgctgggctatcaaggctagagttactgccaagggagatatccgccgataccataatgctaaaggtgatgggaaagtattctcttttgacttgcttgattctgatgggggagagatacgggtgacatgcttcaatgctcttcttgatcgattctatgaagttgtggaagttggtaaggtctatgtggtatcaagaggaaacttgagacctgcacagaagaactataaccatcttaacaatgagtgggagattttattggagaatggatcaactgtggatctttgtcctgatgagaacagttccattcccacccagcggtttgacttcagaccgatcaatgaaattgaggatgcccagaacaatgctatccttgacatcataggtgttgttacatcggtcaatccttgcaccacaatacagaggaaatggcatggaaactcagaaaagaactatgaacctgaaggatatgtctggtcgaagtgttgaggtaaccatgtggggtgacttttgcaacagagaaggctcacagcttcaaggaatggttgaacgtgggatctttcctgtgctggctgtcaaagcaggaaaagtgagtgatttcagtggcaagtctgtcggcacaatttcttcaactcagctcttcatcaaccctgattctgctgaagctcatagtctcaggcaatggtttgatagtggaggaagagatgcttctactcagtccatatccagagatatcacgcctggagcatcaaggaatgagatccgaaagacagtagcacagatcaaggatgaaggtcttggaatgggggacaaacctgactggattacggtgaaagccaccgttatattcttcaagaatgagtccttcttctacacagcttgccctaacatgattggcgacaggcagtgcaataagaaggtgacaaagagtactaatggcaattggacctgtgacaaatgcgatagggagtttgaagagtgcgactacaggtatctcctgcagtttcagattcaagatcactcgggaacagcttgggtgacagcattccaggaggctgggcaggagttgcttggctgctcggcaacagagctcaacgcacttaaggagcgcgaggaccctcggtttgcagacaccatgctcaattgcttgtttcaggaatatctgctcaggctgaaggtcaaagaagaatcatacggcgatgagcgcaaagtgaagaacaccgcggtcaaagtggagaaggttgatccttcgggtgaaagtaaatttctgctggatttgatctccaagtcctcggcgctacattagcagactgtgctactctatcagctgctcgctcgtgcgtggtgaggtgagcgaggtgaggtgttgcagtgcccatagccctcgccctcctgctcgatttttgtgccggtactttaatattaacgccacttaatagtttatatccagattagtgctttaatagtttatatccagattagtgctgatatttccatttttgtgccggtactttaatattaacgccacttaatgtatcagcttttatacctttttctcgatcaaatgattgccttctagctgcagtgcaatttctcccttagttttggtttgtacatgcctgcaaagccttactctgtcgcgactaagaaatctcttgtgctcttccatgcaatcgaacatctgttttac

SEQ ID NO: 1175 - DNA, 753 bp, Oryza sativa
  ref <308>: DATABASE ACCESSION NUMBER: AK059231
  ref <309>: DATABASE ENTRY DATE: 2001-12-06
aaagaactcaagaagaattaacattcgcattcatcagctggtaggtagtgtgagctagagattaagggagagagagagatcatggcgtccaaggttgagctggtggtggaggtgaagtcgccggcggacaagctgtggacggcgctgcgcgactcgacggagctgttccccaagatcttccccgagcagtacaagagcatcgagaccgtcgagggcgacggcaagtccgccggcaccgtccgcctcctcaagtacaccgaaggggtgccgatggtgacgttcgcgaaggagaaggtggaggtggcggacgacgagaagaaggtggtgtcgtacagcgtggtggacggcgagctggtcagcttctacaagaacttcagggtgacgctgcaggtgacccccaagggcggcgccgccgcccccgccgccgacggcgcggtggtgagctggaccatggacttcgacaaggccagcgaggaggtgcccgacccggacgtcatcaaggagaccgccgccaagaccttccacgacctcgacgactacctcctcaagaactagccagacagccagatcgagcgccgccgtgcgggtgcgtggcttatgtgttagagtccactatagcgtcctcgccgtcagtcgtcgtcgcacacggtcgcagtatcggggtgttgcatttgctagctctccggctagccactgtctcccacgaattagtgtacgtatcggtgcatgggtgaataataaagtgttcaggtt

SEQ ID NO: 1176 - DNA, 1389 bp, Oryza sativa
  ref <308>: DATABASE ACCESSION NUMBER: AK059232
  ref <309>: DATABASE ENTRY DATE: 2001-12-06
gtaatgttgctgagattttggatgatagtttcgcacagtatcttcctcatgttgtacctcttgcattttcctcgtgcaacttggatgatggttctgctgtggacatagatgatgctgatagtgttgacaatggattcagtggtgtctcttctgatgatgatgtaaatgatgagccgagggttcgaaatatcagtgtaaggactggagtattagatgagaaagctgctgcaactcaggccattggattttttgcgctccacacaaagagtgcctatgctccgtacttggaggagtcattgatcattgatgaaatttgctaaatctcctcatcctccccaagataagactatggttgttgccactttagctgaggtcgctcagggaatgggagctccaatctctgcttatgttgataagataatgcccttggtgttgaaagaacttgcatcatctgaggcgacaaacaggagaaatgctgctttctgtgttggtgagatgtgcaagaatgggggtgctgcagcactgaaatactacggggatatactccatggtctgcatcgtttgtttgctgattctgaacctgatgacgcagttagagataatgctgccggtgccattgctaggatgataatggtgcagcctcagtcaattccactcaaccaggtacttccggtgtttatcaaagctttgccgctaaaagaagatcatgaagaatccatggttgtctatagctgtgtctgtaatttattattatcttcacatcctcagatccttcctctagtccctgatgtgataaatgcctttgcccaagtggtagtctccccaaatgagagtgatgaagtcaaaacagtagttgccaaggccgtttctcatttgatatctgtttatggtcagcaaatgcaacctatattgagtgctctgccacccgctcatgctaatgcattagcatcatttgccaataggagatgatcagcagaggaacatctatattcagttctttggcctactgggatgctttgtcagtggtttttactcactgaagaccatttgatttgccagatatttatagatctgccaaaaaccggtttggacatcttcattgggatatgaaagtggatgcaaatgctggaaaatgtgccagcagagttgtttgcgtcgtgattatgcgatatatttctgccttttgagttatagtgatcttttgttgggatggcttgtgcggtggttctggttgaaggaaatggccagcggtgagcttttgttggtcatcatcctggtttcgattttggttgcttgtgttgagtttacaattctttgctcgggtgtactaccattgctactattgtatataaacatatttctccatagaggtgtaattcttttgttctg

SEQ ID NO: 1177 - DNA, 2043 bp, Oryza sativa
  ref <308>: DATABASE ACCESSION NUMBER: AK059233
  ref <309>: DATABASE ENTRY DATE: 2001-12-06
acttttccctcgtttttcccccctcttctgccgccaaaaaattcctcagatccaaaccctagcgctcgccgcgccgcgccgcgatcctccccctcccgatcccccccccatggcggccgccggcgccggctccagcgaggtcgccgcgcgggtgctgctccagcgctaccagccgttcgcgccgccgccgggcgagtaccaccagttcggctccggtggcgccgccgccgccggggacatgacggaggccgtgctcatccggacgccattaaagcggaaacatgacagagaagagaatgaagctgctgaatcaaatgactggacgatgagccctggatacactaatccagcaggcagcccagttccaacaccgctttcaggaaaaggttcaaaagcttttgccaaatcaaaagctgcaaaaggccagaaatcttgtccccagacccctttgtgcgctagttctccaggcaatccggttacacctgttggtggctgccgatatgatagctccctagggctattgacaaaaaagttcctaaacttgctaaagggtgcacctggcggcatagttgatttgaataatgccgcagaaacactggaggtacaaaaaaggcgtatatatgacatcactaatgtccttgaagggatagggctgatagaaaagaagctcaagaacaatatccgttggaaaggaattgatgactcccgaccaggagaagttagtgatgatatgtccatcttacaggctgatattgaagccctctcactgcaggagcacagcgtagatcaacaaataagtgaaatgcgagataagttaagaggactcacagaagatgaaaataaccaaaagtggctatatgttactgaagatgacatcaagtctttgccctgcttccagaatcagacactgatcgcaatcaaagcgcctcatggtacaactttggaggtcccagatcctgatgaagtgaatgattatccacagaggagatataggattgttctaaggagtactatgggtccaatagatgtctacctagttagtcaatttgaggagatgagtggcatggagactcctccaaggactgtgcagccagtaagcatggattctctagagaatcccaggacgccattggctgcagaacccaacaaagctgcagagtcacagccaaatattcaagatgggctgctaatgccttctgatgctccttctagttcacaggatattggcgggatgatgaagattgtcccttcagaacttgataccgatgcagactactggctcttatcagatgccggggttagcattaccgacatgtggaagacagcaccagaggtggagtgggaaggaatcgagaaattcaatgcagaggacttcctggaggttagcacgcctcggcagcaggataaaccatcctctgacattatggatggagactcctgcataagctgaaaacctggaaacagtggaagtaccatccaaatacctgggaaatgtctgtttcttggcatgggctactggtgaccacgtgaaaaccgtagaagagaggttcagggaatggctgtaagcctgtgatgatgtacagatggcaaactgacagcttcctggatcaagaaggcatcacaacgtcctgatcattcaggtcttgactggcaagatgaacgaatcctaaagctgaatttgtggttcctgtgagttgtatgttgtatctcacaacaaaaaggagcgtacagctaggtttaagctagacagtgctgcaagctccgggactaaaattattcaggattcaggaagcgctgtaaaacttgaagctgactctgttgtactataaatttttcgtattcttgatggtatctattaaaaatcactgcatcactggtgccatcctgaaatggactgatgcagtgaagtagtaggtagctttacatatgacaacttgacaagtctgttttcagtgtcttgctggatcagccttccattggccattgctgggcaatcacctgtaacatttcgttctctttcattttcgaagggtcttgtgatgt

SEQ ID NO: 1178 - DNA, 510 bp, Oryza sativa
  ref <308>: DATABASE ACCESSION NUMBER: AK059234
  ref <309>: DATABASE ENTRY DATE: 2001-12-06
tcgtcgccgccatccttgccttcgcctgcgccttcttccgccgccgcatcgcgtcgtcgaaatggccccgaagaaggacaaggccccgccgccgtcgtccaagcccgccaagtccggcggtggcaagcagaagaagaagaagtggagcaagggaaagcaaaaggagaaggtgaacaactcggtgctgttcgaccaggccacctacgacaagctgctctccgaggtgcccaagtacaagcagatcaccccctccgtcctctccgagcgcctcaggattaatgggtccctggctaggagggctatgaaggatctgatggatagggggcttatcaggatggtgtcggttcattgcagccaacagatttacaccagggcaacgaacacatgatgttgtcttatccattttctagtcttatagacctgatgttgccgttctgttaagtttattcagtgatacatatgtgggtgttcatttgccccagtaatgttgaatgttttgagatttttggc

SEQ ID NO: 1179 - DNA, 1001 bp, Oryza sativa
  ref <308>: DATABASE ACCESSION NUMBER: AK059235
  ref <309>: DATABASE ENTRY DATE: 2001-12-06
cgatccctgcgtgcaacgaagcgggtgcatcagaagctccatcaaatcacggatacgataatccaaggacatgaaatcatcaaggacggcagcgttggtgatgacaccatacaagaaacagtaggaacacacaatatgcatgggcatggccataagtgtgaggacatccttgacgtcctgctgcgatttcatagggacggtgggcttgggatcaccctcactaaagaaattgtcagcgccgtgttgtttgatcttttcgctgctggctcagagactacatctacaacaataatttgggccatgtccgaactcgtaaggactccccatgtgatggagcgagcacaatctgagattcgtcaagtccttcaaggtaaaaccgtggttagtgaagccgacatcgaaggccgactccattatctacaactggttataagagagactcttaggttgcatcctccggtaccatttctcataccgaggttatgctctgaagcaaatagtaagatcatgagatataatatacctcagggtgctatggtgttagtgaacatatcagcgattggcagagatgagaagatttggaaaaacgcaaatgagtttaggcccgaaagatttaaagatgatatggttgattttagtggtaccgactttagatttattcctggcggtgctggacgaagaatgtgcccaggtttaacgtttggactatccaatattgagatagctctcgcgagccttctttaccactttgattggaaattgcccaatgacgcaagctcatgtaagctagatatgagagaaacgcatggagtcacagcacgtcgtcgaactgagcttttactcaaagctactcctttgtacacataattggattggtccataaaaaattcatgtacgctgtgaagacgaagaattggtctcttaataaaccattgccaattaatgtttgcctaaatttgtttctatcagaactgaaggataattcatgtaaaaaaaaaaag

SEQ ID NO: 1180 - DNA, 1325 bp, Oryza sativa
  ref <308>: DATABASE ACCESSION NUMBER: AK059236
  ref <309>: DATABASE ENTRY DATE: 2001-12-06
ctgatgatttagcatacaaacaagcgaaagaagctgatgacttgctggagcaaggaaaatatcttggtcccttacatggcattccgtatggccttaaggatataattgcagtaccagaatacaaaactacctggggctcaggaacttttgaaaaccaaattcttgatgtcgaagcctctgtctacaaaagattgaagtcaactggggcagtccttgtagcaaaacttgtaacaggctcgctcgcctatgatgatatatggtttggggggagaacaagaaacccctggaacattgaggagttttctactggttcatcagcagggccagcagctagcacctctgcaggaatggttccttttgcaataggttcagaaactgcaggttccataacatatcctgccgctagatgtggagtaactgctttgcgcacaacatttggaacagttgcacggacgggcgtcatgagcatttcagagagcttggataaacttggtcctttctgcagaagcgcgatagattgcgcagttgtacttgacgcaattcgcggcaaggatgccggcgatccatcatctcgtgaagttgctatcgaggatccctttcatgttgacatcagacaactcactgttggatatcttgacagtgctgagatggaggttgttcatgttctttccgctaagggtgttaagctagtgcctttcaagctgaactacaccgttcaatcggtccaatccatactgaacatcaccatggatgttgacatgcttgcgcatttcgacaactggcaacgcgagcgacacgacgacgactatgaagctcaggaccaatggccagtggagcttcgccgcgcacggttaatccccgcagtcgactatatacaggcacaacgagcacggggtaaactgatcagagaagtcagggagagcttcacggtcgatgcattcatcggcaatgtgaccgactgggagctcgtctgtcttggaaaccttgtggggatgccggtggctgtggtgccgacaggcttgaagagcatcaagaacccaccagaaggcggcacgcggagaagaaccaccgtgacgacgggcatatacgctcctcctgaccatgaccacgttgctctagctctggcaatggcgtaccagtctgtgactgaccaccacaaacaacgcccagcgatcggcgatctaggaccgggagatgacatacagcggtaagcagtggctggatgacgatgatggtgtattttcatgaaagctgaagttccagatgattgaccactgtgttaatttccttgagaaacatgagatgtaatatatatgaacttacag

SEQ ID NO: 1181 - DNA, 1293 bp, Oryza sativa
  ref <308>: DATABASE ACCESSION NUMBER: AK059237
  ref <309>: DATABASE ENTRY DATE: 2001-12-06
aacctgaagcgcgagctgctgcgcgcgcaggaggaggtgaagcggatccagtccgttcccctcgtgatcggccagttcatggagatggtcgacggcaacaacggaatcgtcggatccaccaccgggagcaactattatgtgcggatcctgagcaccatcaaccgcgagctgctcaagccctcggcgtccgtggcgctgcaccgccactcgaatgcgctcgtcgacgtgctgccgcccgaggcggactccagcatctctctgctcggatcatcggagaagcccaacgtcacttatacggatattggaggatgtgacatccaaaaacaagaaattcgggaggctgttgaattaccgctgacacatcatgagctgtacaagcagattggtattgatcctccaagaggtgtgcttctgtatggtccacctggaactggcaaaactatgctcgccaaagctgtggcacaccacactactgctgcatttatcagagttgttggttcagagtttgtgcagaagtacctgggtgagggacctaggatggttcgagatgtattccgtttggctaaagagaatgccccagctatcatattcatcgatgaggttgatgctatagcaactgctcgttttgatgctcagactggtgctgaccgaggagttcagcgtattcttatggaactactcaatcagatggatggatttgatcaaacagtgaatgtgaaggttataatggcgaccaacagggcggataccctagaccctgctctgttacgtccaggtagattggacaggaaaatcgagttccctcttccagatcgtcggcagaagaggcttgttttccaagtctgtactgctaaaatgaacttgagtgatgaggttgatttggaagattatgtttccagaccagataaaattagtgctgctgatattgctgctatctgtcaagaagctggtatgcatgctgtgcgcaaaaatcggtatgttatcctccccaaggacttcgagaagggttaccgaaccaatgtcaagaagcctgagactgactttgacttctacaaatgaggcaacatattgttgaactgcatgcttgttcccctccggagctatcattaacattaaagatgatttcctggatagtcgcctcagcgatatttagtttatgtacctagaggctcgtcagtgccccaatctgttttatcaggtctgtaatttcaatttgtgcttgtacttgctggaaaatagaaaggtttgcacggtcaatccttttgatgtgaaactggacgtattttcgctact

SEQ ID NO: 1182 - DNA, 1085 bp, Oryza sativa
  ref <308>: DATABASE ACCESSION NUMBER: AK059238
  ref <309>: DATABASE ENTRY DATE: 2001-12-06
attgaagtcttaccaggagcttctgaggatgatcatctagtggagtcaaaagagcctatagaatttaaagcagagagtgatgcccagcagattcaactcattggaacagcatacactgtagcagatgaattattgccagcagctgtatccaaattttttgatatccaaaccgagaagaagagaattggtggaacaggcgagggccttggctctggatctatatactccatagaatacaaagagtggaaacgtagtctgcaacattcactggacaaactgagggatcatttttgcctacagtatgtcttatcatttatttacttagaagggaaatcacgactggatgctagaatgtacttggagctgaaaactgatgatcttctttgggagtgtgatccttcaccttctctgcctttccaggcgctgtttgtaaagttacggcagctagctagtgttgctggtgatgtcttactgggtaaagagaagatacagaaggtcttgctctcaaggctaactgaaacggttgtcatgtggctctccaatgaacaggaattctgggatgttttcgaggatcaatccatccaactccggccttcaggactacagcagcttattcttgatatgcacttcgtcgttgagattgctgtctgtggacggtatccacacagacctgttcagcagcttgtgtcggtaatcataactagggcaatcgcagctttctcagtgagaaatgttgacccacaaagttctctacccgaggatgaatggttcctcgacatggccaaggttgcaattaataagcaattagggacttcaggatctgagtccgagcttgaggagcctgtggttgtacatgatgaaatctcggattctgaagagagtagtatttcaagtccatcgacgataggatctgaagattcatttgcttctgcaaacaatgatgatctagaaactcctgtatatttcacggatcccgaggcataagagttatttatgcagggaggtgattgtagttatttaaacatctagtagtttaatgtcctatatacttgcagaaaaattgataatccatatttactgtcctc

SEQ ID NO: 1183 - DNA, 564 bp, Oryza sativa
  ref <308>: DATABASE ACCESSION NUMBER: AK059239
  ref <309>: DATABASE ENTRY DATE: 2001-12-06
aaccacaaacacaaagcgtaaagccatctactagtaccaagtagaggaaatagctcaaggctttggaacgcaagaacatcaccatgaagagcagcactctcttggtgatcctggctgtccaggccgctcttatcatgggaatctttgctgctgttgcaaaagaaaatgccgtgggtgagagcaaggcgatcgacatcaacccggggcagctcaagtgctgcagcaactgcaacttctccttctcggggctctacacctgcgacgacatcgtcaagaaatgcgaccctgtctgcaagaaatgcgccgtcgtcaagacctaccctgtgaagatgttcaagtgcaccgacaccttcctcggcatgtgcggccctccctgcaagcactgatcgatcgatcgatcgatgatgacctgaataatgcatgaacgcgagccattgctgtcatatatctgtgatctgtgtgatatacagtgtgcattatatatcatatctcgatgctagtatactgtatactcgaacaataagccgttgtctgagtgaaggaccaaataaaaataatgaagct

SEQ ID NO: 1184 - DNA, 504 bp, Oryza sativa
  ref <308>: DATABASE ACCESSION NUMBER: AK104058
  ref <309>: DATABASE ENTRY DATE: 2002-08-28
ttatctttcaagattggaaagttcatatggagagctcaccattggatgcaacctcacgaaaatgacaaaggatgagtggctgtctacaacacaaggcattcttctggaggctgctaagattatcaagttacatggcgttgaactgggaagcaccacgcagtgctgctgattacggtgcttttggaagttctaagtaggtgaattacgttagtcacactcaacagaagtacataggttggtggctttggaacacttctagtgcgaaggcaaggacgtcctttagtctttttggtatcttcagatttcagaccctcgactccattgctttctgttaaccgcgttttttttagctaaggtcaatttccaactctctttaactttcccttcgcttgatatatcatccgctaatagcctaacagagagaagcactgccaatgagccacggtaaacattttggtccgcatgctgataatgtgagcgggtagtttacccctgtttcaatgc

SEQ ID NO: 1185 - DNA, 1062 bp, Oryza sativa
  ref <308>: DATABASE ACCESSION NUMBER: AK059240
  ref <309>: DATABASE ENTRY DATE: 2001-12-06
ccaagaggatctgcagccgcagagctgcagagattcagtggccggaacaaccacggaggaggacgagggagcccttgaggcgcggcacggtgagtccgcgcctccctgtgcccgaccacatccctctccctccttacgccggcacgaatcgcctccctgatgttgaccccaatcgacagctgcatgactgcgagagcattgctcgtatgagagccgcctgcgagctcaccgctcgagttcttgagtacgcagggacactagtcaagccattggcgacgactgatgagattgacagagcagttcatcagatgatcatcgacgctggcgcctacccttctcccctaggctacggtggttttccgaagagcgtctgcacgtcggtgaacgagtgcatctgccatggaatccctgactcacgggtgctacagaatggagacatcattaatatcgatgttactgtctacttgaatggataccacggtgacacctcaaggacatacctatgtggagaagttgatgaatctactatgcaacttgtaaagcctgcaaacacggtgctagttttaagacaattggtcagagaataagtgagtacgtggacgagtacgggtacagcatcgatccctttgtcggacattcacaattggtagagcctactctgtccatgggaggcacccagtgcacactgtgggacgacgggtggacggctgtcacggtggacagcagcctcaccgcgcagttcgagcacaccatcttggtcaccggcgacggcgcggagatcctcaccatgcacccgcggtgagatgacgagaaattctacgcaactagcaccacttgcatatcgtgctggtctaaaagcatccttttctcagttttcatctttcacaaaacaaaggcaactcatgatctgtacagcattttcaaatagtagcaaaatgcccatactttgttacgggattaaaaacaaaatcttactgtatgctctagaatagtacttcccgttcaataattatgggattattaatgtgactgactggggattagtagaatcttttcagaatc

SEQ ID NO: 1186 - DNA, 1276 bp, Oryza sativa
  ref <308>: DATABASE ACCESSION NUMBER: AK059241
  ref <309>: DATABASE ENTRY DATE: 2001-12-06
atgccaacgcgaatcacataagagttcaagccaaagctaagaggccatgagatcagctatggctactgcatcggtggttacctatcttcagaggccgagagagcttccggtgccggagttccgggcaccgccgccgtctccggtcaccggcgtcctcacgagcagtagctccggctctcttgcatacggcgagtgccccgatagcaacgaagacgacgagatcggcaggttcttgcgccgctccgccagagtcccggtgctgcggctgccggagagggccgtcccgcggaagaagaaagcggcgtgggcacctccggtcatcgacgtgcgcctgctggccttgccggaggccggcggtccggtggcggaggcgctgaggtcggcagccgtcgcgtttggctgcttccaggtggtcggccatggggtcgaccggagcttggtctcagcagcgttgcgtcatgtggcagctgcaactgcaagggcagcggcgccggagccggaggaggtggaggtcaacggagacgatgagaacggtgaggagatgtggtggtcgcctggtgacggaggccaagaaatggcgggaaattgggcgctccaaagtggcgccagccacttcaggaacacagcagacgctttgttcattcagctggagcaaaccgcaaccaaaataatggacgtcccgcagcgaggcggcgccgttgccacgcaatccatcgccggagctgacacaaacggctcgctcctctgcatccgcaagcaccgccgcaggcaagacgaccgcagcggcggcgcctctggcccgatccgccacgacgacatcctgaggatgctggtccggagctcgcggtgctcgcgggccctcgccctccacctctgccccggcgcctcggcgttccacatcttctcccggcgaggctggtccagattcaggcccatggacggcgccgtcgtcgtcaccgtcggcgaccagctccaggcatgcaacggtgggctctacaagagcgtggccgggaagccagcgtacagcaatgacgacctccgaggaaacggcggcgacaccggtgtcgcctccgcggagttgttctactgcttcccttcggccggcacggcggctggcaaggcgagcgaggtgttgagcgcggatgccggcaagatcatcccgttgaacctgcagttcatggtggctgcttgccttgtgcttggataccactttctcctgtcaagcttgcattcgacttggttgttgtgatttgtgaaatacaggacctgttctctg

SEQ ID NO: 1187 - DNA, 1517 bp, Oryza sativa
  ref <308>: DATABASE ACCESSION NUMBER: AK059242
  ref <309>: DATABASE ENTRY DATE: 2001-12-06
agccgtccacaccccaccaccaccgccgtcgcctccaccccgccgccgcgggagaaaccacaggtaagggcaagcgcgccgccgctgcggccgccggcgaagatgcagatcttcgtgaagaccctgacggggaagacgatcacgctggaggtggagtcctcggacaccatcgacaacgtgaaggcgaagatccaggacaaggaggggatcccgcccgaccagcagcggctcatcttcgccggcaagcagctggaggacgggcgcaccctcgccgactacaacatccagaaggagtcgaccctccacctggtgctccgcctccgcggcggcgccaagaagcgcaagaagaagacgtacaccaagcccaagaagcagaagcacaagcacaagaaggtgaagctcgccgtgctccagttctacaaggtggacgacgccaccggcaaggtcacccgcctccgcaaggagtgccccaacgccgagtgcggcgccggcaccttcatggccaaccacttcgaccgccactactgcggtaagtgcggcctcacctacgtctacaaccagcaggcttaggcgtaggctcctgttctttgggggcggaagtaaggaaggaggaggaaatcgaactggttattagatgataattaatccttttttgtcatgtcgtattaaactagtctccttggaactgaacaccttagcatcacctctgtgaagattgtgatgccctacttttggttttgaaatcatgttatgtactacaaaaaaaaagaaggtgccaggcataggcaattctttctttcccaaagtagacctcattaacttgtctcaattgcaggcgccaaaaagaagttgagctcagactattagaggaggaaactgcaaaaagagttgagcaagctattaggaaacaagttgaagagagtttgaattctgagggaatcaaacatgaaatacaaagacggattgaggtagggcgaaagaggatacatgaggaggtattagtccaaattgagaaagaaaaggaggcagccctggttgaagctcagcacaaagcggaacgcgaaaggaaagagcgggaggagctagagaaaaagctcgaggaagagcggaagaaagccgaggaggctcagatgaaggaagcaatggagcagcagcagaaagagctggagcggtaccaggagctggagaggctccagaaagagagggaggaagccatgaagcggaagcagatggaggaagagcagcagaagcagagccagatgaagctgctgggcaagaacaagtcgcgcccgaagctgtcgttcgcgcttgggatgaagtagatgaaggaaattagtgccttattatttagtcgatgtgtattttgtaacagtctatctatgcctgaaaacatcatctctcttgctggtaaatcgtttgcagatcgtgggcaagaagaaagctctaacaatgtttactgtactacacaagcctgtggcaacctgcaagttgtaattggcttgggcattttaccatct

SEQ ID NO: 1188 - DNA, 524 bp, Oryza sativa
  ref <308>: DATABASE ACCESSION NUMBER: AK059243
  ref <309>: DATABASE ENTRY DATE: 2001-12-06
aaaaatagctacttagccactgcatatcttccagcttttgtcatagccttttttgtttcttctcttttggtacaaattcagggtctggaatacttgaatcagtgagaagaaaaaacaagatgtataaccctccaagtgcccaggagatgacatacaaagatcatgttcagaggcgccatgaggaaaaaggctgcttatatgcatgcctgtttacactgtgctgctgcttctgctgctacgagacctgcgagtgctgcctcgagacactctgctgctgctgctgacgtcgtcatgacgaagtgatatgcggactgtgacgtccactgggacactcatcgttgtccatctgctttgtctgaataaaaaatgtatctatgtacttaattaattatttgagtgctgtaaatctgcaatgcgttgtgttgatgtgtttaattaccttttcttttctctgcaatggatggaaacctggtgtatttgtatgttcatcaaataagtactctatgcagtgttttggcttgaac

SEQ ID NO: 1189 - DNA, 1492 bp, Oryza sativa
  ref <308>: DATABASE ACCESSION NUMBER: AK104059
  ref <309>: DATABASE ENTRY DATE: 2002-08-28
gagactattctttgaaagatggcatattgcatatagatgcgggtgctggactgaaaattgaggagtcccagatgattgagatagaaacttatggaagtgatgtggagcatgttggtggtactgatgcttccaagacatcatcaagctccactgatactcgtaaggttgagaaggtccctattgaagatgggaagataaaaataccagactgggctagtgatgtgactactcttgtatggtttcctgttcgtgctattgatgatacaattgcaaggggtgcatcgccagcatcccctcagaaacagagcatagtagatgggatgagaatgattgctctcaagcttgaatttggagtttttcttaatcaagtgtttgaaaggactatcgcagtacatttcactaacccattccatgtgagcacacgcgtagtagataagtgctatgatggaactctactactgcaggtgatattgcattctgaagtgaaggccactctgcatgtaaaggatatatggttggatctgcaatctggatttgaacacacaggaaagggagatggacgaccaacttcgaacttgttccctctggttattgctccttcttcgagagctggaatcttatttgtaatacgtttaagtgccttaggagatatggatgagctagaaaaggcagatagcatgttgaatattaagtatggaatatccggtgacagaacaactggagcacactctccagttcctgttaaacctgatgattctgaggagcttgtattcaagattgcggtgaagatgaagcgccctgtcctggacccatgtgtggcagttgggttccttccgttttcttcggactgcttgagggttggccagctggtcaacatgagatggagggttgaaaggctgaagaacccggaggatgcctctctgttagccgacgaaatactttatcaagtcgacgccaacccacagaactggatggttgctgggaggaaatgcggtcacgtatcgctgtcaaacaaacaaggttcaaggatagagatcacggtgacgtgcgtgccgctggtgtccggctacgtccatccgccgcagctgggcctgccgcacgtcggcgaggccaacatcagctgcaacccggcaggccctcacctggtgtgcgtccttcctccgacactgagcacctcatactgcataccggcttgatccatccatcatacacagattgtatgttaggcttgtagcctgtagtagaagagaaatgccacttacactggtcggcttgagatgtatcgccatttgcaccggatgagatgtatgctgtttttgccgagacattcttttgtgcagatgagttctttttcgtcagtaacattcagaacgtgttccattgtttcatgtaccataagataagtaacataattctccgtgtatatcaaatcaagtgatagactggattttgaagtctaccagaattccggcacaagagttacttcgttctc

SEQ ID NO: 1190 - DNA, 1186 bp, Oryza sativa
  ref <308>: DATABASE ACCESSION NUMBER: AK104060
  ref <309>: DATABASE ENTRY DATE: 2002-08-28
agaccagcaggagctagtcagtagaagaagagacattatttgtaggcagcagctagaaattaaggacgattatcgatggagcagaagccaccagcagttgctgctaataataatcagctgctgctgatgatgataatggtggtggtggcgtgcagtaattatatgattagtggcgcaggagcgcagccatcgccgggatactacccgagcaagacgatccgatcgatggcgttcggcgaagggtacgacaacctgtggggcgggcagcaccagacgctgtcggcggaccagacggcgctgacggtgtggatggaccggagctccggcagcggcttcaagtccaagcgctcctaccgcaacggctacttcggcgcctccatcaaggtcccctccggctacaccgccggcgtcaacaccgccttctacctgtcgaacaacgagctgtacccggggcagcacgacgagatcgacatagagctgctggggacggtgccgggggagccgtggacgctgcagacgaacgtgtacgtgcacggcaccggcgacggcgccatcatcgggagggagatgtggttccacctctggttcgaccccaccgccgacttccaccactacgccatcctctggaaccccgaccacatcgtcttcctcgtcgacgacgtccccgtccgccgttacccgcgcgccgccggcaacacattccccgaccgctagatgtgggcctacggctccatctgggacgcctccgactgggccaccgacggcggccgctacaagtccgactaccgctaccagcccttcgtctcgcgctaccgagacctcaagatcgccggctgcgaggccgccgcgccggcgagctgccagcccgtgccggcgtcgccgtcgggcgccaccggcgagctcagcgcgcagcagaaggcggccatgaggtgggcgcagcagaggtccatggtctactactactgccaggactactccaggaatcacgccaactaccccgagtgctagtggttgagccatgcatcttcagtttcacatcgtttcatgtgttgtgtgcaccacgtagtacgagcaccaacacgtatctactattaccctcatcataattattgtgtacgattggattgaggtgtgcagctgtgtcacccaaaatttcacttcgacctgcaatgcaagcatgtgttcc

SEQ ID NO: 1191 - DNA, 1164 bp, Oryza sativa
  ref <308>: DATABASE ACCESSION NUMBER: AK059244
  ref <309>: DATABASE ENTRY DATE: 2001-12-06
aaaaatctttcgcgaaggcgattcaggcgagaagagagagagagagcgcgaggccggcggttctagaagcttccagacccttcggcgcgagcgagctcacctcccccgtaggagctgttcattagatctgaataagggggattgaagcagtgaggagaagatgagcgtggtgggctttgatctagggaatgagagctgcattgtggccgtcgcgcggcagcgcggcattgatgtggtcctcaacgaggagtcgaagcgggagactccggctattgtctgcttcggcgacaagcagcggttcatcgggacagcgggcgctgcttcctccacgatgaacccgaagaattctgtttctcagatcaagcggctcctcgggcgcaagtactctgatcctgagctccagcgtgatattgcggccttccccttccgtgtctcggaagggcctgatggatttcctcttgttcatgcccgttaccttggtgaagagcgggttttcactccgacgcagctcatggctatggtgctttctaatctgaagggtattgcagagagcaacctgaatactgctgttgttgactgctgcataggcattccggtgtacttcacagaccttcagcgcagagctgtgcttgatgctgccaccattgccggcctctgcccattgcggttgtttcatgagaccaccgcaacagcattggcatatggtatttacaagactgatcttccagagaatgatcaattaaatgttgcctttgtggatgttggacatgccagcatgcaagtctgcattgctggttacaagaagggacaactcaagatcttgtcgcgtgcatatgaccggtcccttggtgggagggacttcgatgaagtcctgtttaagcactttgcagcgaaattcaaggatgagtacaagatagatgtttaccagaatgctcgtgcctgcattaggctccgtgtggcttgtgagaagctcaagaaggtgctgagtgctaaccctgagtcaccaatgcacattgaatgcttgatggatgagaaggatgtgagaggttttatcaagagggaagagtttgagaagattagtgcatcaatactggaacgtgttaaggggccactggagaaggctttagcagaagctggtttaacgacagagaatgtccattttgt

SEQ ID NO: 1192 - DNA, 1332 bp, Oryza sativa
  ref <308>: DATABASE ACCESSION NUMBER: AK059245
  ref <309>: DATABASE ENTRY DATE: 2001-12-06
gctttgtggactgcccatccagaaggcttgccgtggaaccctcgggtttcctgccgtgttgccgcattctgatcccctctcctcagctggcgtttcaccaatcaacaacaacaaaacatcgcacttcctgaatggcattgtgattggctcaatgtcaaccatggctcttgcattgatcgcggtactaggcttcctctggatatgtcttctgtccaggaagaagagcattggtggaagctatgttaaaatggacaagcaaactatcccagatggtgcgaagctcgtgacataccagtggaaccttccgtactcatcaggtgagatcatcagaaggttggagctgcttgatgaagaggatgtggtcggttgtggcggttttggtaccgtgtacaagatggtgatggatgatggcacggcatttgctgtcaagaggattgatctcaaccgtgaagggcgcgataggaccttcgagaaggagcttgagattctgggcagcattaggcacattaaccttgtcaatctgcgaggatactgccgtcttcctacagccaaactactcatatatgatttcttggagctgggcagtttggattgctaccttcatggagatgctcaggatgatcaaccattgaactggaatgcacgtatgaagattgccctgggctctgctcgagggctggcgtatttgcaccacgattgctcacccgtgattgtgcacagggacatcaaagccagtaacatccttctggacagaagcttggaaccccgcgtatcagattttggccttgcaaggctgcttgtagataatgatgcccacgttaccactgttgtcgcgggtacttttggatacctagcaccagaatacctgcaaaatggccatgctactgaaaaatctgatgtgtatagctttggagtgcttttgctcgagttggtgaccggaaagaggcctacagatgcatgcttcctcaagaagggactgaacattgttggctggctcaacaccctgacgggggagcatcggctggaggagatcattgatgagaactgcggtgatgtggaagtggaagcagtcgaggcgatcctcgacattgctgcgatgtgcaccgatgcagacccaggccagcgtccatcgatgagcgctgtcctgaagatgctggaggaggagatcctgtctccctgcatgagtgagctctactacgagcagcacctggaactctgagtgagtacctcctataatggttgctactactcatgattgcagtgacaagcaacaaattttgtagatacatgatgatgaaccgtgtaggagtgtagctggacaagtgcagcttc

SEQ ID NO: 1193 - DNA, 1150 bp, Oryza sativa
  ref <308>: DATABASE ACCESSION NUMBER: AK059246
  ref <309>: DATABASE ENTRY DATE: 2001-12-06
gcaagggcgcaaccgcatttcaaaacttgaaacgagggagacgaagtgagagagagatggagagggcggtgccggtgcggaagacgcacgcctcgacggccggcctgctcagctggtcggagtcgccgggccccgacaatgccgcggcggcggcgggcgccgccgcgccgccttcctcgcggcccagcctcaagccggccggtgggatcacgccggcgatgttcggagcgccggtgaccgacctggaggccgaggatctgaccaagaggaaaatgtgctcgggctcaaagatgaaggaaatgaccgggagtggaatattttctgcacagggtgcaaatggagattctgaaactggctccggtgactctaatcctcccagcaagacatcattaaggatgtatcagcaaactgtaactggcacaagtcagatatcatttagtgctgaggggagcgtgtctccgaagaagccttcctcattgcctgaggtggcgaagcagcgagagttgagtggtacactggagagtgaagctgatgctaaattgaagaagcagaactcggaagcaaaaagcaaggagctcagcgggagtgatatatttggcccacctcctgagattccttctagacccttagctgctcgtaacctggagctgcagggaaatttagattttgcgcttccacaaccaagaagcattcacacttcagttaaagtatccaatcctgccggaggtccgagcaatatcatgtttggggaggagccggcggtcaagaccgccaagaaaatccataaccagaagttccatgagttgacgggcaacaacatcttcaaggaagaagctcccccaggctcggccgagaagtccctgagcacggcgaagctcaaggagatgagtggcagcaacatcttcgccgatgggaaggtggcctcccgggactacttcggaggcgtcaggaagcctcctggcggcgggagcagcatcgcgctggtctgacgactcgccggaagagttctgaatatgtagtttgtggccagtctgtgtttgttggctgttgtttatccatcattcgagcgagatttgttagttgttgcatactcacctaaagggctggtcattgttcatctccgaacttcaaataccattcacttctcatc

SEQ ID NO: 1194 - DNA, 1635 bp, Oryza sativa
  ref <308>: DATABASE ACCESSION NUMBER: AK059247
  ref <309>: DATABASE ENTRY DATE: 2001-12-06
cgctgcagctgccggagtaccccaacgcggcggagctggaggcggtgctcaagacgatcgaggcgttcccgccgatcgtgttcgccggggagacgaggcacctggaggagcgcctcgccgacgccgccatgggccgcgccttcctcctccagggcggcgactgcgccgagagcttcaaggagttcaacggcaacaacatccgcgacaccttccgcgtcctcctccagatgtccgccgtcctcaccttcggcggccaaatgcccgtcatcaaggttgggagaatggcggggcaattcgcgaagccgaggtcggaggcgttcgaggagagggacggggtgaagctgccgagctacaggggcgacaacatcaatggcgacgcgttcaacgagaagagccgcatccctgacccgcagaggatggtccgggcctatgcgcagtccgccgccacgctcaacctcctccgcgctttcgccaccggaggatacgccgccatgcagcgcgtgacgcagtggaacctcgatttcacccagcacagcgagcagggcgacaggtaccgtgaattggcacacagggttgatgaagcccttggctttatgtctgctgctgggctaacagtggaccacccgttgatgacaagtactgatttctggacctcacatgagtgccttctcctaccctatgaacaatctctgacccgtcaggactccacaactggtcatttctacgactgctctgcccacatgctatgggtgggcgaacgcactcgccagctcgatggtgctcatgttgagttcctcaggggtgtggccaaccctcttggcatcaaggtgagtgacaaaatgaacccaatcgagttggtgaagctgattgagattttgaacccatcaaacaagcctgggagaattaccatcatcacaaggatgggggcagagaacatgagggtcaagttacctcatcttatccgtgcggtccgccacgctggacaaattgtcacatggattactgatccaatgcacgggaacaccatcaaggctccttgtggtctgaagacacgcccctttgactccattctggccgaggtacgagcattcttcgatgtgcatgatcaagaaggaagccacccaggaggtgtccacctcgagatgactgggcagaacgtaaccgagtgcatcggcggatcccgaaccgtcaccttcgatgacctgggtgaccgctaccacacccactgcgacccgaggctgaacgcgtcccagtcgctggagctctccttcatcatcgccgagaggctgaggaggaagaggatccggtcgtcgaagctgaacaacatattgccgttgccacccttcggtgtctgaatctgaaatgggtaagggaaaccaggggaagacggaggaatgacgaacggggtagataagatagctgcagcaagaactcgacgacgcctattccatttgttggtgggatgctcttggtgaaatcctatattttgcgagcttttttttctgttgtaacttttcagttggtatatatatgctctgtaatatcatgccaggctgaaaggctttgacatttcggtttttctatgtttctatcatggataagagaataaaatgcaagatagaagaaggctttgtg

SEQ ID NO: 1195 - DNA, 1445 bp, Oryza sativa
  ref <308>: DATABASE ACCESSION NUMBER: AK059248
  ref <309>: DATABASE ENTRY DATE: 2001-12-06
atcaaagctaggctcctaaaatttgtcatccacatacaaatttcacagagaaaaaaccatgatgtcatccaattccctcttccagcgtctggcaaaatggtgcccgtggttactgagagatgagccgaagaagcctgtcaaggttcttgtcaccggcgccgcagggcaaatagggtatgccattgtcgcgatgatcgcgaggggcctcatgctaggagccgaccagccggtggtgctccacctgctggatctgccggtcgcggccaatgctctgaacggcgtcaggatggaactgatcgacgctgcgctgccgctgctcagaggagtggtggcgacgagtgacgaggctgaggcgttcaagggcgtcaacgtcgccatcgtcatcggtggatggccgaggagagacgggatggagaggaaagatttgattagcaagaacgtgacaatctacaaatcccaggcctctgcgctccatcagcacgccgccccaaactgcaaggtcttggtcgtggtcaatcccgcgaacaccaacgcgctcgtcctgaaggagttcgccccggcaatcccggccaagaacatcacctgcctcaccaggctcgaccacaaccgcgccctcggccaggtcgccgagaagctgaacgtgcacgtcggcgacgtcaagaacgccatcatatggggcaaccactcctccacgcagttccccgacgccagccacgccaccgtctcgaccgaccgcggcgagaggcccgtcagggagctcatcgccgacgagatatggctgagggaggagttcgtcaccgacgtgcagcagcgaggcgcggcggtgatcaaggcgcggaagcagtcgagctcgctgtccgccgccagcgcggcatgcgaccacatgagagactggatccttggaaccccaaagggtacgtgggtgtccatgggcgtttactctgacggcagctatggcgtccccgagggcgtcctcttctcgtttccggtgacctgcgagaagggggagtggtctgtcgtgcagggtcttgagattgacgactttgcacgctccaagatggaaacctcggcgaccgagctcaaggaagagaagtccattgcttatgagtttctctgatctgaactgcaaccgaggtccgaagcagagcttcggttaatgtttactaaaaagaaatcgttgcaagggtttcgtcagtgatgtttctcattgtcacgcagtagatgatcccgatgatccatgggtggtgttgttagctggtgatgctatcacggtgcatctcatgatttcatcagcatttgttatgttgtgtatcgatgttgcatacttacatctgtgagtcgaaatttcccccatctgtgttgtatacccagccaacaaggaatgcacttgttgtcatctaccccagtggctgatatttaagaaaataaaaatcaattgactggtg

SEQ ID NO: 1196 - DNA, 1611 bp, Oryza sativa
  ref <308>: DATABASE ACCESSION NUMBER: AK059249
  ref <309>: DATABASE ENTRY DATE: 2001-12-06
aattattctgaaagagcttaatggcggggatacttcaaggatgctaattgttataacgggtgcaagccatgttatttatgggtcacgaggaatcggtgttcctgccagagtatctaaaaagatgccaaagaaagaccaagttgttgtactacttgatcctgagagacaaagcataaggagggaaggtgaaatcccggttgctgacttcttatggtattcagcagctaaaccttgcagtagaaactgctttgaccgtgctgaaattgcacgagttatgaatgctgctggtaggagacctgaagctttgcctcaggatcttcagaaaggaatagatcttggtgtagtttctcctgagatactgcagaactttttcgaccttgagaaataccctgttatgtctgaactgattcacagattccaaggtttccgtgaaagattgctggcagaccccaaattccttcaaaggttggctattgaagaagctatatcaataacgaccactctattagcacagtacgaaagacggaaagggcgatttttcgaagaaattgattatgtactcaccgatacaattagaggctctgtggttgatttctttacagtgtggcttcctgctcctactatttcagtcctttcttatgctgatgatggttctggtgagagtttggagttcgtcaaaggccttttaggatcattgccagataatgcattccaaaagaatgtattgggtcaaaattggaatatgaagcagagagttgcagcagtgttagttggtggtttgaaacttgctagcgttgggtttatttctagtgtgggggctggagcttcctcggatctcctgtatgctgctcgaggtgtgctgaaatcttcagtgaatgcagaagcaggacggaagagatctcctatttggaagtcagcagctgtttatagttgctttcttggaacgtcagcaaacttgcggtatcagatcattgctggtttagtggagcatcggctaggagagagtctagctactagctacaatcagccacttcttgctagtttgttgtcctttgtggcaaggacagtgaactcatactggggaacacagcaatgggttgatcttgcgagatatactggactacaaaaaaccaaggaagttcctcctgttgaggccacagcaccacctgctgaaacgtcacagttagccacaccgcccgctgaaacatcacagttagccgcaccacccgctgaaacatcacagttagaggatggtagaacagaagtacaaaatttggatgacaacagcaaccaatcaagtggttgaacctagtgatttggttacttcacaatgccttcaaagtacataacgatatagctaggtttgtatcacaattccttagagttagggagtacatcacttgttaacccccaacacagtacatgcatgtactgcttgtgattttagagtaaaaattggaagggggacacttgcagtcttctgaggattgcagcaacaaccgttttcttctctgtaattcaaaacaggttgtaatttagtaggatcgcatactgtagaaagtttggcaggtttgcctgttgcaataaaatctttccgcctgctatggagcc

SEQ ID NO: 1197 - DNA, 1226 bp, Oryza sativa
  ref <308>: DATABASE ACCESSION NUMBER: AK059250
  ref <309>: DATABASE ENTRY DATE: 2001-12-06
tccaaggaatcctctccactcccggcgatggcatcggcggcggcggcggcggcggcggagtgggaggaggctgagcggaaggtgctggtggcgaggaaggccgccttcgggctgcccaccgcctgcccgacctgcctccccgtcctcctctacctccgcatgtgcaacgtccccttcgacatccacgtcgactcctccttccccgacgccgatcacataccatatgtcgagtttggtgaatgtgttgcattcaacaatgaaaagggtggtgtaattgaatatctcaaggaggagaaaattgttgacttgaactcaaagcatcctagtgtttcttattcggatgtattatccacaaaggccatggttatgacctggctttcagatgctttgcaatatgagctctggctggcttctgatggaagcattccacatgatatctacttttctgatctctcctggcccattggaaagatactctattggaagaaaacgagagaagtgaagcaacaactgggcataactaagcttaatgctgcagaaaaagaagaggagatataccagaaagcaaatgctgcttatgatgccttatctacgagattaggagatcagatctttctctttgacaacagccctacagacgttgatgctctttttcttggacatgcgctttttgttcttaatgtattaccggatacgtctgtgctgcgaagctgtctgcagaagtatgacaacttggtaaactttaccaagcacctcaaggtccaattactggaagctgattctgattcatcagcaacaggattgggatcaactgatccatcatcatcctctacacccaggaaaagagcgtcttctggtcggagttataagccaaaacccagagctaagaaggaacgaacagaggaggaaaagaagttcaggcgaaaagcaaagtatttccttgcgacacagctcgttgcggttcttctattcctatcgctcatgggtggagccgatagctcagagctagacgatgaggacggtgtagattatgaagattaaatcctccctttgttgtactgcacgattctttctgaagtgttaatttgccaaagcaccggttgtggtgcttgaaaatgttcttcccatggttagtcagagagatcgcatacttcatcatattgtagttagcaatacactgagttggtcagcagccggcagttccatagttttggtacttcaaaagt

SEQ ID NO: 1198 - DNA, 1328 bp, Oryza sativa
  ref <308>: DATABASE ACCESSION NUMBER: AK059251
  ref <309>: DATABASE ENTRY DATE: 2001-12-06
cagcatgccagggatcttcctcctttggaagtattccgtattctgctccatttgagactttcggagtgcccatcataccttgtggatcggttgcattacatgaacaacaggttatgctgggtacagacttgtttcaaagtgcaggcacaaaaatgaaaggtggtcaacttactatcctcggaaatggaccaaattcatcggtttcttgttctgttcatgtccaacagagaaactctggtggaaattccagtcagggcttgaaagcaaatgtgcacatgggtgctcctcctccctggttagaagctagcgagcgtgatcaggagaatgagtcacttagtggttatgctcgtccatcctctcggaaaggaaaatctggaaagcttaacccaaagcgtgtaggagctgcatgggcagagaggagaagagcagaaatggagatggaaaaacgaggtgaacttgttccagaaacatctgattctagttggctccctaactttggtggtgtctggcaatctggtacaagaaaggaatcaaggaaagagtttgagaaaaaccataagcctcacgaagagaagagcaacaagttgtcccttgagatgaaaccatatataagcaaacggatgcgcgtaggttccaataaaggtgaacagtcagacattgatgtagagcagtgaacagatctacatggttgccagatgatttgtgattgtggtcacggttttctgtagttctgctaggacgcagccgcttgtcttttttgggggtccaaaactttgaattgcgttgcggttgctgaaagagtcgatgttattgccacatgcctgaaaaggatgatatttggtgtggaagtggaatgccatatgcaagtgtaataaaagaagggagcatttctttccaagaagagagctgtcctctggagtccggaatgttggttggtgcgctcaactgtgtggagatccgtgccttgtcgctgcaacttgatgtccttgcgttttgcacctgatccgattacatgtccgtgcatttgctcctcctgatcggataacatagaaagcctgaaacagagatctacctgtaggagaatactccttcgtagcaactagctatcgagctgattagattgattgatttctgattcccctgggctaattggagaattgttatgcctgtagggtgtccatgtcactggatttttcccaatcagatgacttttagcacaaaactggcataatatttgctttaaattgtaactccatccaatggaaggatgcactcagaagtacagtatagtaggagtaacagccacagaagttggttgttgacaaggc

SEQ ID NO: 1199 - DNA, 1146 bp, Oryza sativa
  ref <308>: DATABASE ACCESSION NUMBER: AK059252
  ref <309>: DATABASE ENTRY DATE: 2001-12-06
ccggcatgttctctttgggtatttcagccagaagactggcctccttgtgcatcttgaggattctcacctcaccaggattcagtccaccaccggaggggacgcagtttactgggagaccaccatcaattcgttcattgaggactaccgcccggtggagggtataatggttgcgcacgctggtcgctccgctgtgaccctcttccgtttcggagaggttgccatgagccacaccaagactcgcatggaggaggcatggagcatcgaggaggtcgcgttcaatgtccctggcctctccatcgattgcttcatcccgcccaccgacatcaagtctggatccatcagcgagaccgtcgagcttcctcatggcgagaagagcaaggttggtcttctccaatgccatagtgctaaggtggccgcgttggagaaggcagacgacaacgtcgcgtggagcggagcactgcagcgagatttcaagtgatttgctgtctgttcatagttgcttcttgcagtgccagtgctactgactcattttgatgattgtagggtagcaagaaagagccaagggaggatgatttggagctttgcaaattccaaatgtcctgtaaataggaagcttaaggaattcacatggtcttccatatccctgaggaggcctattgtgaagaacccttacctatcttattcagatatatggtagtaggtagttgttagtaacttctggcgtttttttttgtcggtgccttgtggaagaaccaggaggggtgtttctcatcctgcacccaaccacatggtaagggatcatggtggtggtgctgttctttctcttatagcgatactaatttatcggagcccagcgaggaagaagggtttcttctctggcaattgagagtgattttattctgattttagcagtccagtgtgcttttggttggtgatagtctccggtcaaaactaactttaggtgaaagattaagagttctgaattgctgttgctctttgtttagggttatcatgatgggtctctggttgtttttttccctgtccttccttcacatctctctttatttagtatgagatggtggttgtattctacagaagttgatgtaagccagaacttctaatgaatatcatggaatgaattgtttc

SEQ ID NO: 1200 - DNA, 1352 bp, Oryza sativa
  ref <308>: DATABASE ACCESSION NUMBER: AK059253
  ref <309>: DATABASE ENTRY DATE: 2001-12-06
tattgacatggagatgggttcgcttcaagaagatttaactgctgccaatgccagaaaggacaaggcacatgaatcattggtccaattgagacatgcacgagatgcctataacgcatcattccatcaaaaccgccaacttctgagcaaagctagggatcttgcttctaggagtgagcttgcacaagtgcaagagctctacaagacacaggttgacaaattcgtggcagaatggtgcaacagcaaggccttcagagaggactacgagaaaaggatcctctcctccctcaacagtcgacagcttagccgagatggccggatgaggaatcctgatgagaaacccatatttattgaaacagaggcagcagcaccacctgtagaacaagagcctatccaatcaaaaatgcctgcaaaacaagccaaggaagcgcctgctccccaagcagaggtttctcccaaagatgagtcccgcgtgaaagcaatagctaagccatctaaggctaaatcctctctggatgctgatgatgactatgaggccgagtctcccaaggagaagccaaagcctaaagaggttgatgtagctaagttgaaagagatcaagagacaggaggagatggagaagaatagacttgccctggaaaggaagaagaagctggccgagaagcaagcagcgaaggcagcagcccgtgcacaaaaggaggcagagaagaaactcaagagagaggagatgagggccaggaggagggctggggcagctgacaccgaggcgtccactgaatcggacaacaggtctgatggagcagcggaggcacaagcagaggacgactccgctcctgcttctgctccggtgatgagagaacagagggagagtgtccggtacagcagaaacgtcgtgaccaagagcaaggccccgctgccgaaggcgatcctgaggaggaagaaagcccagtcgtactggtcctgggctggccctgctgctgcagtggccgccgcgctcgtcgccctgcttgccgtgctaggctactaccagtactacctcccagcgagcgctagcaactgatggaaggaaagcaggcagcccccccttgagaattgcttacttgaacaattttgcaggtgagaaacagagtgcgtggtctgctgagacgtggactgaaagactggagatttgttcgttttcgttctgttagtttgatgatcggtggataagagtaaggaaaaaaaaaggatagaagttaattttggttgggacttagaatctcctatatactgcgagtgatctcatgtactcttaaactgaagcataggttgccgttctgaaataaacaatgccgcatgctttaggtttacttatc

SEQ ID NO: 1201 - DNA, 1261 bp, Oryza sativa
  ref <308>: DATABASE ACCESSION NUMBER: AK059254
  ref <309>: DATABASE ENTRY DATE: 2001-12-06
tcgaattgggagggcgatcctcccggtgagctgaccgtaccccaaaccgacacaggtgaacaagtagagtatactagggcgcgtcgagagaaccatgtcgaaggaactcggcaaaatgaccccgtaacttcgggagaaggggtgctctcctatcttttgattaggaaagcggcacataccagggggtagcgactgtttattaaaaacacaggactctgctaagtggtaacacgatgtatagagtctgacacctgcccggtgctggaaggtcggaaggagaagtgtgataagctttgaatggaagccccggtaaacggcggcagtaactctaactgtcctaaggtagcgaaattccttgtcgcataagtagcgacctgcacgaatggtgtaacgactgccccgctgtctccgacatggacccggtgaaattgaattctccgtgaagatgcggagtaccaacggctagacggtaagaccccgtgcaccttgactatagcttcgcagtgacaaccttgatcgaatgtgtaggataggtgggaggtggtgacacacaacgaccaatcctgaaagaccactctttcgtctaaggatgcctaaccgccgcaccgatcattcggggggggcgggacactgcgaggtgggtagtttatctggggcggatgcctcctaaagagtaacggaggtgtgcgaaggtaggctcaagcgttgattctgctcgtgagcgtaatggtataagcctgcctgactgtgagaccgactggtcgaacagagacgaaagtcggccatagtgatccgggagtcccgtgtggaagggctctcgctcaacggatcaaaggtacgccggggataacaggctgatgactcccaagagctcttatcgacggagtcgtttggcacctcgatgtcgactcatcacatcctggggttgaagaaggtcccaagggttcggttgttcgccgatgaaagtggtacgtgagttgggtttagaacgtcgtgagacagttcggttcctatctaccgttggtgttaaagggagaactgcgaggagccaaccctagtacgagaggactgggttgggtcaacctatggtgtaccggttgttatgccaatagcagcgccgggcagctaagttggtatggaagaactgctgcgccgcgggaaatccttctctatacaagttctcgtacgaggtttttgaacagaacttcgataggcgagaggtgtaagcaccgcgaggtgtgaagcgatctcgtactaaacg

SEQ ID NO: 1202 - DNA, 2177 bp, Oryza sativa
  ref <308>: DATABASE ACCESSION NUMBER: AK059255
  ref <309>: DATABASE ENTRY DATE: 2001-12-06
acctcgcgcccgccgcctccaccgctcgagccaccgaaccctagaaatcccgccgccgccgcccgcccactccgtcgcgccgatggcggagcacgaggagcagccctacgagggcaacgggaacggcggcgacccggcccccgcctccgcgtacgctgagtaccctgcgcccgaggggtccccgcccgccgccgccgccaagcccaccggcttctccgatggcgccaccgacggcggccgttctcagcacgagacacagccacatgatggcaggtccccaaagtctagagagagggaaagagaacgggacaaggacaaggaacgcgacagagaccgtgatagagaccgaagggaccgcgaccgtggtgacaaggacagggaccgtgatcgccacagggagcaccgcgatagaagcgaaagaagggaacaccacgatcgtgaacgttctgatgaccgtgatcgacgccggggccatgattctgaaaggagaagagaccgtgacagagatggtcaccgcaggcatcgatctcgctcccgctccccttcaaagggtcgtgatcgcagatctagatctcgctcacgctctcgatctagcaagcgcgtgagtggatttgaccagggaccacaagcagccattcctgcgcttgctgctggagcagccccaggccaggtacctgttgtggcccctgctatttctgggatgcttccgaacatgttcaatttgactcaaaccccgttcactccgcttgttattcagccacaagctatgacacaacaggctactcgacatgctaggcgtgtttatgttggtggacttcctccaactgctaatgagcatactgttgctgtatacttcaatcaagttatggctgctgttggtggaaatacagctggtccaggtgatgctgttcttaatgtctacataaaccatgataagaaatttgcatttgtggagatgaggtctgtggaggaagcaagcaatgcaatggccttggatggtataatgtttgagggagcacctgtgaaggttagaaggccaacagactataatccttccctagcagctgcattgggtccaagccagccaaaccccaacctcaatcttgctgctgttggcttaacacctggctcagctggaggtttagaaggtcctgaccgcatttttgtgggtgggctgccctattacttcacagaagctcaagtcagggagttgctcgaatcctttggacctctgcgtggttttgatcttgtgaaggacagagaaactggaaactcgaagggctatgctttctgtgtataccaggatcttaatgtcacggacattgcctgtgctgctcttaatggtatcaagatgggagacaagaccctcactgttaggcgagctaaccaaggagcttctcaacctaggccagagcaagaaagcatgctcctgcatgtacaacaacaggcgcaaatgcagaaactcatgttccaagttggagggggagcactgcctacaaaggtggtatgcctgacccaagtggtttcaccagatgaactgagggatgatgaggagtatgaggacatcgtgcaagacatgagggaagaagggtgcagatacgtcccacatagtgccattgcagagtcttttatagtccgaccttatgcaatattggcagtcgggcatagcctacagaagacacacaattccaattttactttgctttatcagctttatgattatgatataatatgatgccatgcttttttctatttgtctatgttctcactgacgcttgttcaggtaacctggtgaaagttgtgatcccgcgacctgatcccagcggtgctcctgttgctggagttgggagggtgtttttggaatttgcagatgtagagagctcgaccaaggcgaagaatgggatgcacgggaggaagtttgccaacaaccaggtggtggctgtcttctaccctgaggacaagttcgctgaagggcaatacgacggttgaacatcgaagtcgccctcttattgtttctaacgcctataaggcggaatctatttacgtttaccttagttttgcaatttttacatctagttttttttttctgtgttagttggaattttattagtagtccagagattggtgcagaatcatgtgtactttgggtatgttcttatggttctgacttgaaaagc

SEQ ID NO: 1203 - DNA, 1534 bp, Oryza sativa
  ref <308>: DATABASE ACCESSION NUMBER: AK059256
  ref <309>: DATABASE ENTRY DATE: 2001-12-06
cattctccttgatcccacccagccactcaatcccagatccgaatcccacctctccgtctcattctccggcgccggccagaaatgctgccctcctcctcctttaggcgttggggggagctagagctctagctagctagctaggtgcgacgcgacgacgtgatggctggtattgctaaggagaggcggctgccgccggcgctgccactcgccactctcatcggccgcgagctccgcgccgggggctccgagcgcccctccctccgctacggccacgccggcttcgccaagcgcggcgaggactacttcctcgtcaagcccgactgcctccgcgtccccggggacacctccaccgccttctccgtcttcgcggtgttcgacggccacaacggggtctcggcggcggtctacagcaaggagcatttgctcgagcacgtcatgagcgcgctgccgccggacatcggccgcgacgactggctacaggcgctgccgcgggcgctcgtcgccggcttcgtcaaggccgacatcgacttccagcgcaagggggaggtgtcggggaccaccgcaacgctggtggtcgtcgatggattcacggtcacggtggcgtcagtcggggactcgcggtgcatcctggacacgcagggtggtgaggtgcagctgctcaccgtcgaccaccgcctggaagagaatgccgaggagcgggagcgggttaccgccagcggtggggaggtcggccgcctcaatctcttcggcggccaggaggttggtcctctccggtgctggccaggtggcctgtgcctttcaagatctatcggggacatggatgtcggggagttcattgtgccgattccacatgtgaagcaagtgaagctctcaaacattggaggaaggttgatcatcgcatcagatggtatatgggatgcactaccctctgaagcagcagcaaaggcatgccgaggtttacctgcagaactggctgcaaagcttgtggttaagcaagctctcaaaaaaagtgggctgaaagatgacaccacttgtgtggtggttgatatcatcccttccgattatcgtttgacatcgccgcagttgtccccaaagagaaaccagagcaagttcaagtctcttcttttcggtagaaggtcacacagttcaattggaaagcttggaggcaagtctgcctcttttggctctgtggaggaattatttgaagaaggctctgcaatgttggaagaaaggttgggtaggaatttgtccttgaaagcaacctcggcacctcttcgatgtgctatctgccaggtggaccaagaaccatttgaaagtatgatgactgagaaaggaggcagttactgctcttccccatgcgccccctggggaggtccatatctttgtttggagtgtcgaaaaaagaaagacgcaatggagggtaaaagatcaagccactctacagcgtgcaggtgaaacagagcaggggattctggacaaggttgatgttgagtgtaaaaactaaagatggaataataagttgctggattgaatt

SEQ ID NO: 1204 - DNA, 1374 bp, Oryza sativa
  ref <308>: DATABASE ACCESSION NUMBER: AK059257
  ref <309>: DATABASE ENTRY DATE: 2001-12-06
accagaagaccaaggacggcaagcccttcgtcgatgtcctcaaggagggtggtgtcctccctggcatcaaggttgacaagggtaccgttgaggttgccggcaccaacaaagagaccaccacccagggccacgatgatcttggcaagcgttgcgccaagtactacgaggccggtgcccgcttcgccaagtggcgtgctgtcctcaagattggccccaacgagccatcgcagctttccattgacctgaatgctcagggtcttgctcgctatgccatcatctgccaggagaacgggctggtgccgattgtcgagcctgagatccttgtcgatggctctcatgacattgagcgctgtgcctatgtcaccgagaaggtcctcgctgcctgctacaaggccctcaacgaacaccatgtcctcctggagggttccctcctgaagcccaacatggtcaccccaggatctgaatccaagaaggtttcccctcagctcatcgccgagtacaccgtccgcgccctccagaggactgtccctgctgccgtgcctgccattgtcttcctctctggtggacagagcgaggaggaggcgaccgtgaacctcaacgccatgaacaagctcagcaccaagaagccgtgggctctgtccttctccttcggccgtgctctccagcagagcacgctcaaggcctggggcggcaagacggagaacgtggtgaaggcgcagaaggccttcatcaccaggtgcaaggccaactctgaggctacccttggtacataccagggtgatgctgtgctcggcgagggtgcctctgagagccttcacgtcaaggactacaaaaactcttatggaggctgtgatgggagagacgaagcagctgcaggagcttggagagcgggcagccgaaatggagaaagcgcacgcttcgcttgcggaggagttgcagaggcggtacgcgtgcccaggctgtggagtcaacaacatggttgggttggaggaggcggcggcggccagctgaagatggcgctcgctggttggttgctgtacatagacaaagcttgacacagatgacagatgggtgtggaaggttttgctgttgaatgggtgtagtaatttgcactagttcagctgagtatagctgttggcatttgtcttcccggtatgatatatgggattatgggtagaaggatgaaataggttagtggttggtcagccattttttggagtcaattaccccaccaaagtttggggttttcttttgtagctgcaatgattcgtcgatagctgatggccagtagatggggttatgattgttcgcaaactcaacagaatgcgcaagaatcaggcttgctgagaagaaccactcccaagttcagtttgc

SEQ ID NO: 1205 - DNA, 1434 bp, Oryza sativa
  ref <308>: DATABASE ACCESSION NUMBER: AK059258
  ref <309>: DATABASE ENTRY DATE: 2001-12-06
acggaagcgaggcgacgcgagcatcactactcctccttccccccaaatttgcctcctcccaccctgagacctcgtcgtcgtcgtctccaatctcgagttccttgccgtggaagcaaactccgcatccattctcccaaaaccctagcccccggatcccggcgcgcgtcgcgggttgctgttcgtttgctggatccttcgcccgggggttggcggttgacgcggcggcggcggaggtgggccattggtgctcgccctcgccgcattgggggcgcctggggtgtcgtgcttgctcgtgggggcggagatctgggaggaggaggaggaggtggtggtggtggtgaagccgcggaggtgcttggctcaagcgcggagatggggcggtgggccgccgggatctgcgcggtggcgctggtttggctcgccgcggccgccgcgggagacctcgagccggacgagctagagcgcgcatttccaattgtggagccagattatggccacactaagctccgtctctcacaacaaggtctagacgcaattcgaaggattgaaactcctattgctgttgttggtgtcattggtccatatcgatctggaaagtcttttctcctcaaccagcttctctctttatcatgtgaaaaaggttttggagttggtcatatgcgagatactaaaactaaaggtatatggatttggggtacacctgttgaaatggacattgatggttcaaaagtgtctgtcctttaccttgatactgaaggatttgagagtgttgggaagtcaaatgtatatgatgataggatatttgctttggcaactgtcttgagttcagtgctaatctacaaccttcctgagacggtgcgtgaagctgatatatctaggctctcatttgctgttgagattgcagaagaattctatggaaggggcaagatgttgcttttgaaccagcaaagcttctttggcttatccagagggatttcctgcaaggaaaatctgttcagcaaatggtcaatgaagccctccaacgggtacctaacgaaagtggggacaaatatattgatgaggttaatcaaattagagattctttggcagttatgggcaacaacagcactgcttttagcctgccccaggcacatccgtacttcctccaagtgagagctgcagaaaatagcagagcacgaccacaatgatcttgtgtacctgctaaaatgatgatccagctgatgatccacgacggtactactttgagtttgtgtgaacgatcgtggaatgtgcttgtagccttgcatttgtaaactgtaattcactccgttggttgcgtttgatgaatgccgtgacatgcacataattatttatttctgtaatgttttaccataacaacgattaagatgcaacaggtacctgtatgacagcatgagccttgttaagcttgtttcg

SEQ ID NO: 1206 - DNA, 952 bp, Oryza sativa
  ref <308>: DATABASE ACCESSION NUMBER: AK104061
  ref <309>: DATABASE ENTRY DATE: 2002-08-28
gagagagagagagagagagagctcaggatcgacgagacaccagcgaagacgttgaggcgcgcacgtgggcagcccgcgcgtcccctcccccatcgccgccgtgctgcttagatccgtcgagctccggtcccgccgtttcttgcggcggcgagcgagcgagcgagcacaaggagttcttgctgcgcctgggaggaggaggaggaggtgcagcacgatggctgtggaccgtgggctcctcctgctcgtcgtctcggccgccgtcctcgtcgggctcgcctccgcgtcccccttcatttccgacagcgtgttcctggggagcgtcggatctacggggaggagcttgctgcaggccaagaagaattgccctgtgaattttgagttccaaaactacacaataatcacaagcaagtgcaaagggccacggtttcctgctaaacagtgctgcgatgctttcaaggaattcgcatgcccatttaatgaatatatcaacgacgagagcaatgactgtgcatcaacaatgttcagctacatcaacctctatggcaagtatccacctggtctgtttgcaaacgagtgccgagaaggcaagctaggtctttcttgcgaaggcgtttcccaaaaagatagtgtcgtttcaagtgctggccagcaagctcagagcagcttgcttgctttcatcatgctgacctttggactagctgcattgtggttccattgagttattatgtcttccatttatccaaagttggtgtgctgttgtaaccaatgaggattgagttagttcacccggctgggcattttccttttgcgtgtaaaatcctttgtaatttatggcagaggctacgtattatctggaatctcacttctcggttgactacttagaactcaccttctgtcgctgcattgtaactgctacattatgttgcatcaaattcatgtcattcatgtgtat

SEQ ID NO: 1207 - DNA, 1640 bp, Oryza sativa
  ref <308>: DATABASE ACCESSION NUMBER: AK059259
  ref <309>: DATABASE ENTRY DATE: 2001-12-06
gaataatgcaatatggggataatgaagaaaataattgcccgataacacgtcttcttgatatcgtgctttacctttgtgaaagagggcatgttgagggaggtatggtattccagctgttagaagatctgacagaaatgtcaactatcaaagactgcaaagatgtatttggatatattgagagcaaacaagatgtcttggggaagcaagagcttttcgggcgtggcaagcttgttatgctaaggacttgcaaccaactacttcgaagattatcaaaggcaaatgatgtggtattctgcggacgtattatcatgtttctagcacatttcttcccattatcggaacgttcagctctcaatatcaagggggtttttaacacatcaaatgaaacaaagtacgagaaagacgctacagatggaatttctgttgatttcaacttctacaataccctatggagtctgcaggagcattttagtaaccctgctttaactgctgcaaatctgacaagatggcaaaagtttgtgtccaatttaacggttgtgctaagcacatttgaagctcagcctctcagtgacgatgatggaaaacttaacaatcttgaccaagaggaagatgctgctttcaatattaagtacctgacaagtagtaaattgatgggtttggagttgaaggacccaagttttcgacgccacatccttgtccagtgcctcatattcttcgactttctcaaggcacctggaaagactgacaaagaaggtccaactgggagcatgaaagaggaaatcgattcttgtgaagagcgtgttaagaaacttctggagataattccaccaaaagggaaggacttcctacaaagcatcgagcatattcttgagcgggagaaaaattgggtatggtggaaacgagatgggtgtctagcgtttgaaaaacaaccttttgaaaagaaaccaggccaagctggagtcagaaaacgtaagccaaggtggagattgggaaacaaagaacttgcccaactgggaaggtttttcttggttttgtgattacggtattgaaggagttgtacctcaagaactgttgccacctgaagtccgttccaagttttattcgaagcctggtgacaaggctaaacgacctaagagggaagacccaaaaggcacttcagcccaacccaaggaacaacaggttgtttcagccacaccggagaccgacggtggcggtagcggggctgaaccagaagaaggtgctgtgccaatggattctgataatgccgcgatcgatgaaggccggaagcagagcccagaggaggtgtctggacctgaaagcgggcagtgcgaggctgaagccgatggcgaagataacatgaaaaatgaggctagtaaagacggtccatccgcatagaacctctgccggaagattttgtagtatcctgttgccgacgtttctactgagatcgcccatctttagagttactgtgaccccccagattgagacatccaggctccagattgttttaaagaagatagagagacatgtatctagtccactgaacacagaattttaatgaatcatcagtagctgacgccatgccttagcctgacatgtgtatatagacagcttgttcgttgaagtgttatcttgcatcc

SEQ ID NO: 1208 - DNA, 1173 bp, Oryza sativa
  ref <308>: DATABASE ACCESSION NUMBER: AK104062
  ref <309>: DATABASE ENTRY DATE: 2002-08-28
ggtttactcggcctaagacagtgggagacgacggcgacggcggcggcgggaggaagccatggttctcgctctgctgttgggctcctcctcttcttctcttgcggcgccacaccctgcttgctcttccaggagaaaatgcagacccgctggacgaaataatttcagatgctctctgcatgacaaggtgccactgaatgctcatggagtattatccacaaaattgctctcatgccttgctgcttcgcttgttttcatctctccaccttgtcaggctatccctgcagagacctttgtacagccaaaattgtgccaggttgctgtggtagcagccatcgacaaggctgcggttcctctgaaattcgatagcccttctgatgatggcggcacaggtttgatgatgaagggtatgactgccaagaactttgacccaattcgctactctggtagatggttcgaagtagcatcgctgaaacgtggctttgctggtcagggacaagaggactgtcactgtactcagggggtgtattcatttgatgagaaatcacgctcaatccaggtggacacattctgtgttcatggtggacctgatggttacatcaccggtattcggggaagggtgcaatgcctgtccgaagaggacatggcgagtgctgagacagatcttgaaaggcaggagatgatcaaggggaaatgctttctccgtttccccacactaccattcatacccaaggaaccttatgatgtgcttgcaaccgattatgacaattacgccgttgtgtctggtgctaaagacacaagctttatccagatatactcaagaacacctaatcctggaccagaattcatcgagaagtacaagtcctacgctgccaacttcggttatgatccgagcaagatcaaggacaccccacaggattgcgaggtgatgtccacggaccagcttggtctgatgatgtcaatgcctgggatgactgaggctttgacgaatcagttcccagacctgaagctgagtgcacctgttgcattcaacccattcacaagtgtgtttgacaccctgaagaaacttgtagaactgtacttcaagtaaactccatattgtaaaacttgtgatcaatgttccctccacatgaagatgcagttgaataaaattctcacacacagatgtctctagtg

SEQ ID NO: 1209 - DNA, 1384 bp, Oryza sativa
  ref <308>: DATABASE ACCESSION NUMBER: AK059260
  ref <309>: DATABASE ENTRY DATE: 2001-12-06
aaaaagccctagctttcttatccggggaaagaaaaagaaaaaagaaaaaaccctagcgatcgatcttggcggcgaggcgagcgacaggggatggaggtggattcgggtcggaacgggaccggccacggccagatcgctggccccgacgaggagatccccgccggcggagacgcgaagaggtcgcgcgaggagggcggccgcaacaccaccaccacctgccaagaagacgaggacgaggacaacgactactacaacgacgactccaatttcctcgactcctaccgtaccacctgggccaccaactacggcaaaaacgacggatcctcctttgaggacgagactgcaatccggcccatgcagcacactgatggacctgtgctgccgatatcctcgtggccaatggacgtgctacaaatattttcagtcaaggtgacagaggtcatggggaaccttgagtggccactgcgtgtctacggcatcgttgctgtccgtgactcgctggatcacaagaggaacgtcctcttccgccgcgacagggacgactgccagaccctcacctcgccacaggattcatctctgacgctcactggccctagccgtgccgtcgtgctgatcaaccctgtcatgttcgaggttgacctcaaggtgatcacccacaacaatagtggcttgccgttgtctgaatctgaagaggacgataaggtgctaagctacaacgccttcttctacgacggcgtagctcacatgaacaacactggcttcgcccggagatccgtcgagtcgacggagcactccacaatggagttcgtcttcgcacacctgatattcgccgtggaggccaccatcgcagttcgtgtcatcgaaggctcaaccgatttcagggcccgtctcaccgctcgcaccgctggcatcgatgaagacgtggtgctgctcgactccggtgacggcaaggtggcggtggtcaatgacgatgacgacagtggcccactcgtcgtgctgcagcggcgcgtcgtggtggtggaggagaagggaagcctgatccttggtgtggaggctgcagagattggcagcgaagagattgtgacgagacaggtggacatcaggcctaggcatgcgttgagaagcaggtgtggattcaatcttgggttctgcaggatgtcggtcatgatcgcctggtcagtgctaccttaattcatgtctcatgtgcattcaatgcttgactaatccatggctaactactacctttatgaggatgacacttagtactaattttaagcctctgtcaaattgcaagtactgctttgaactaattaagctagatgtgatgtgatgtgatggtgccgatggtttcttttgtacttgtgaagttgtgaccagccggttg

SEQ ID NO: 1210 - DNA, 975 bp, Oryza sativa
  ref <308>: DATABASE ACCESSION NUMBER: AK059261
  ref <309>: DATABASE ENTRY DATE: 2001-12-06
tggaactcgaagtagcaaataaaaatggaagtgctgacacaaaatcgcttcaagaaaatatagaagctcgaacaaaacagttgatgcctctatatactcagattgcgatacggtttgctgaattgcatgatacatccctcagaatggctgcgaaaggtgtgattaagaaagttgtggactgggaagaatcacgatctttcttctataagagattacggaggaggatctctgaggatgttcttgcaaaagaaattagagctgtagcaggtgagcagttttcccaccaaccagcaatcgagctgatcaagaaatggtattcagcttcacatgcagctgaatgggatgatgacgatgcttttgttgcttggatggataaccctgaaaactacaaggattatattcaatatcttaaggctcaaagagtatcccaatccctctcaagtctttcagattccagctcagatttgcaagccctgccacagggtctttccatgttactagataagatggatccctctagaagagctcaacttgttgaagaaatcaggaaggtccttggttgaatcatatgatgccaaaactattattggaggcacaaatagcttgtggaccctgtcggattgttggtgagtgtatattggatttgttagttctgccagatgaaagtgcaagtctgatgattcatgataccgtcagttggcaagaacaccggttaacctgagtgcttgtttacaaatggtcctttatgacaatcgttgtttcgcgctagttccgtgatctactatcatctgttagacgctgtaattagtgagtctccgcggatccacagtatacggttgagctgttgattcaattttggacacgaataatatgattttgtaggcataaatgcgtctgtatgtgaaataaattgtctgttgagttaacacacaagatgacaatatgtttgtgctctaaaaaaaaaaaaaaaaaaac

SEQ ID NO: 1211 - DNA, 573 bp, Oryza sativa
  ref <308>: DATABASE ACCESSION NUMBER: AK059262
  ref <309>: DATABASE ENTRY DATE: 2001-12-06
ctagcaccgccgccgccgccgccgccgccgccgcccgccgcgccgcctccgtcgccatggcccggatcaaggtcgacgagctacgggggaagaacaaggcggagctgcaggcccagctcaaggacctcaaggcggagctctccctcctccgcgtcgccaaggtcaccggcggcgcccccaacaagctctccaagatcaaggtggtgcgcacgtcgatcgcgcgggtgctgacggtgatctcgcagaagcagagggcggcgctgcgtgaggcgtacaagaagaagagcctcctccccctcgacctccgccccaagaagacccgcgccatccgccgccgcctcaccaagcaccagctttcgctgaagacggagagggaaaagaagcgcgagaagtatttccccatgaggaagtatgccatcaaggcgtaggtcagggaacatgagagaatgttatgtttagcacatcactcagtcaatttatctgccctcgagttccttgaattttgatgttatcatgtatggacatgccttgtggtcaagtacaatgtgacgggggtttgagtacttgcatgct

SEQ ID NO: 1212 - DNA, 1349 bp, Oryza sativa
  ref <308>: DATABASE ACCESSION NUMBER: AK059263
  ref <309>: DATABASE ENTRY DATE: 2001-12-06
gtagccgccttccgccgcgactttctctctcctcctcctcaccgtcgtccggcggcgccgcctctcctctccgcccctcccgtccaatggaggctctcgccggcaccgccgccgcctccctgccggccttgccttcccaccagccgcggtcccgcctggccccgcggtcactcgcccttcccggcggccgctcgtgctgcgggcccctccgcgccgccgcagccggtggcggaggcggcgccaaggacgacgcgcaggctggcgtcacgcccaacgggtctcccgttatcaagccgaagagtgactcggctctttcgagtcagaatggagttcttggatcaaccaaaactgacaagccacacacgaccttatcaacgcatactaccactgactcgagtggatccagagctggcttgtttagaacacctatatctggtggtgtgcagagtgcggcttttgcccatggtctacctccgccggcattggctgttcgcaacttgatggaacaggcgcggtttgctcatctgtgcactgtcatgtctggcatgcatcatcggcgtactggatacccatttggttcgcttgttgatttctctaatgactcgatgggccatccaatattttcactatcaccgttagcaatacacacaaggaacttgctctctgacccaagatgcacacttgttgtccaggtacctggatggagtggactgtcaaatgcacgtgtcacaatatttggtgatgtatatcctttgccagaagatcaacaggagtgggcacataagcagtatgttgcaaaacatcaacaatgggcatctcaacagtggggaaatttttactattacaggatgcagaacataagcgacatatacttcattggaggctttggcactgttgcatgggtagatgtcaaggagtatgaagctattcaacccgacaagatagcagttgatggtggtgaacaaagcttaaaggagctgaatgcaattttctcgaagccacttagagagttcttgtcatcagaaggggaggttgatgatgctgcacttatatcagtagacagcaaagggatagatataagggttcgccagggtgcacagttcaacattcagaggctggcatttgatgtacctcacaaggtggagacactagaggaagccaagagagcactccacaagataatcaagacaaccagcaaataaagtcttcaaaagaaaagtgagattgcaaatgctggcaatttccactctcctgcaactgttttgtgacccgataaaaagtattttaagcatcatgtaatgtagcaataagtgatgtttatcagtttaataatgacttacttgagaatt

SEQ ID NO: 1213 - DNA, 1189 bp, Oryza sativa
  ref <308>: DATABASE ACCESSION NUMBER: AK059264
  ref <309>: DATABASE ENTRY DATE: 2001-12-06
cccacaccatcaccatctctctcttctatctctttctcacgatttcactctatgtaccgccgcctagagccgctgcgccgcgcctcctagcgccgccgttgccggcggtgcctcgctggagttcgccgccgcctccccgaccgccggtcgctgagccgggactcgctgccgcggtgcgtcgccatcccagactgagccgagcaaaagagcaagaggaggaagaagaaggcggagccgagccgctgacaggctgaccccatgccccttttacctccatcccccactgacaagccgggcccgcgcatccttcctcccatccatcgccgatagagcctaagtacgaggaagcttcggacgccgctttcgagggagaagacccgcaccctgtgcaagctttatgatgcatccaaacgtggaggattactgggacggaattcagggctgtcaccacctgccgcctacctcggacaaatccatgggatacacaaaacaaaggtatgggaaacgaccaaactaccctccaaccatcattaggaagagatcagggccatccacatcgaatctcacgatcaacggccacaaaaagtgttcgggccgaactcgagacggctccgttcggcccgtttttcatcgtggacactaattttgagaccctcagcctattggcatgatagttgggcccatttggagttgtttacttgacttatggggcctccaatccgtgtaaatgtatcctgaatgcgcggaggtgcagtttgttgcttgacggatgtgttttcttctcaaaatacctgcacacacatatttcaccaacactagtggaaatgattagtaataatacctaccactaagttggataccatattttatttcattatatgtaggtaatgacggtcagatattatgatttaagaaccgtcaacagacttctagatgtttcgtgcctagccccaaagctcgcctgtggaataagttagttgcctaggttctttgcctagtgcatagtcgcttagtcgcttagttctccgcgttgttcgctagtcgcttagttctccgcgctgttcgcttctgcgtcgtcgcttttatggttttctgtaatgttgtgttgctcatctatggacctgtccatggtggcaacttatgtaaggactactacccagtgatgtaataaaacagttttctttgattc

SEQ ID NO: 1214 - DNA, 386 bp, Oryza sativa
  ref <308>: DATABASE ACCESSION NUMBER: AK059265
  ref <309>: DATABASE ENTRY DATE: 2001-12-06
tttctttcttgacctcttcatcatcttctctacaaatgcttttgcacgagtgtatcattagggagaagcaaaaccttttactatgtagaagaagctgctatgatgatgagagaaaacggcaatgtagtagttcttgaccatctctgctcatggttgtcagccttactgatactagcattcagttgtttgattcctgactagattcaggttgttgtacatgagagcatatgcagatgcagtgttgcatctctgcaggtgtgccagattggtcagttcatcatctctctcactggatagatttcaatgtctcactggatagatttcaatgtcattcagttcttatatccttaacactttgtctaatactatttcttaagctgctttct

SEQ ID NO: 1215 - DNA, 1478 bp, Oryza sativa
  ref <308>: DATABASE ACCESSION NUMBER: AK059266
  ref <309>: DATABASE ENTRY DATE: 2001-12-06
aaaaaaaaaaagtaccgagatccccaacccaacccaagccgcgatgatcctccgcatccgcagccgcgacggcacggaccgcatcaccgtgccggacccggccgccgccaccgtcggcgacctgcagcgtctcatcgcggcgcgcgtcaccgtccccgtcccgctccagcgcctctccctcgacccggcgctcctcctcccctcctccgcctccgccgccctgctcgccgacccggccgccccgctctcctccctccgcctctccaatggctccttcgtctacctctcctacccgcccgacgcccgctcctcccagccgcctccccccaaagccctctccgccgccggctccttcggcaagaagatgaccatggacgacctcatcgcgcgccagatccgcgtcacccgccaggaggccccgctctgcgccgccgcctccttcgaccgcgactccgccaacgccttccagctccacgtcgccgagtcgctcgccttcgctaccaagcgcgccggcttcctctacggccgcgtcgacgccgacaccaaggaggtcttcgtcgatttcatctacgagccgccgcaggtcggcaccgaggacgttgtccagctcatgcgggacgcgcaggaggaggcccgcgtcgacgccatcgcccacggcctcgggatgcgccgcgtcggcctggtgttcacgcaggcagtcgggaggaagaccagcgacactggcgagtacaccatgtccaaccgcgaggtgcttcaggccaccgagctgcaggcggagggcgggatcccggagtgggtcaccgccatagtcaagctcgaggtgggggatgatggctccggtgatgtgcacttcgaggcgttccagatgagtgagatttgtgtgaagctgttcaaggatggtgtgctggagacggagattggggacaaagacgatccccgcctgtccaagatgcggaaaggggtggtggctgggggaaaggatactatggaggtggacaatgacttcttcctggtgcctgtcaagatctctgatcatcagggtccactttcaaccggctttcctatcgagaaccgtggaaaccctgtagcaatgagcgcgctcaagagccacctggatcgtgctaagcatctaccatttgttaagcggatctcggacttccaccttctcctcctggttgctgctttcctagacataaaagcagatgttcctgccctcaccgcttgcgtaaagaaccagagcgtggtgcctgaaggctaccaactgctgatcgagtcattggctggtgcctgaagtctaccagctgctgatcgaatcatttagccagttaggcataatgttgatctctggaagcaaagcacctggtccctttaaatttactgccatatatcatgtgtaacttatggttgtctctggtgtgtaaaaaagtcttgatcaattcataggcgcttaactttacacaagcgcaacatcgtttttt

SEQ ID NO: 1216 - DNA, 1369 bp, Oryza sativa
  ref <308>: DATABASE ACCESSION NUMBER: AK059267
  ref <309>: DATABASE ENTRY DATE: 2001-12-06
agacgccgccgcccttctccttccaggtctcgccgccgccgacgccgacgcccaggagctcgccgtcctccgctagtcccaccgcctctcctctcgctctgcctcccccatcaggccagtagcgcccccatccctctctcgacctgctcctctcctctcgccatctcgccaaatccaacacaggtccacggcaacgccgcgcatctcggcagcgcacacatcggcggcgcatctcggcagcggcaagccggcgacgagctgcagcgcttcaaagcttgattacccaaatactacaacactgtgctgatttcagtaattggatccctcaaattgtgaaatgcttgccaaagggaggaaagttgctggaaggggcggagacatgtctgcacactatgcatttgggccgcaggaagatgatgcgattattaaacataggcttctgaccaggacaacaactaccaggggtgaaccaccacttaagaagcttcagaagaagttcatgtcctttgccactgaggttgagaaggatgcagacaacataagtgactgtgagaggctgtacaaggcctttttacaggaaattaatacttttgagctgcctcttcttaaaagcaaggctgtcgttgatgcaaaccttagggagaaggagagcttcaacgagctgcaggatgagattcagcgacaaatcttgcaagctcagactgatattgaggatctcaagaagcaactggaacagagcaaaattgagaggcagcacaaagaggagtgcgaagcaatcagaaaaatgatttctttgcagcctccacgatcagaaacagaaaagctcattgcggatcttgagaaggagattgctaatttggaggctgagaatactgcatgtataaggaccctggaactaaggaagaagcagtttgctcttcttcttcatgtggtcgaggaactgcagatctcgatcgatgatgagcagaggagcatagcagatgagctgagagctgccactgaagagcagaagatgagcatagaggaagttagcggcggtgcttcagatgccatggctgtagattgatcgacgatcctagcagaaaagcgagttgcattcctgtttccacaaaggcagctctacattatcttggggactatatagcactgaatcgcctagatgactttgtaccctgactcatgattatcatcactcttgtaatttcatcagtagtaagttgtaatcgtgccctttcttgtctgaggtaacagaacatcatggtgttgacatatgcgcctccagattccaatatgtatgattgttattatttactgaacaatcggcaatgatcttctttgatgcaagctgaggtaaaaccgtctgccctgg

SEQ ID NO: 1217 - DNA, 582 bp, Oryza sativa
  ref <308>: DATABASE ACCESSION NUMBER: AK059268
  ref <309>: DATABASE ENTRY DATE: 2001-12-06
atggacctcacttgattatgataaaaaaccaaaggctgttccacaaaagataatccctccagctgaatcggcccagaggccatcatatccttcctcaaaatccaagaaagactgggataaactggaagctgaagttaaaaaggaggagaaggaggagaagcttgaaggcgatgctgcattgaacaaatttttccgtgacatctacagtgatgctgatgaagacatgcgacgagcaatgatgaaatcttttgttgaatctaacggtactgttctgtcgaccaattggaaagatgttggctcgaagaaggtagagggaagcccacctgatgggatggagcttaagaaatgggagtactaagatctcggttcgtgcatgctgtaaattcgttatcgtcgtgagtcatcacttggctggagatttcgcgcatcattgtcaagttggattttgtgtgatgctcttcgttgcgtttccatattgtaagctctctgtgtgacaggctagcttgtctaagactttatcctagttttggaagatacatctggacacaagaatacgttatctgaatctttgctccgaagtgc

SEQ ID NO: 1218 - DNA, 640 bp, Oryza sativa
  ref <308>: DATABASE ACCESSION NUMBER: AK059269
  ref <309>: DATABASE ENTRY DATE: 2001-12-06
ctcgcctcctcttcctcctccccgagctcgagtccgagagcctccgattcggcagcgatggcgctggagtgggtggtgcttgggtacgcggcgggagcggaggcgatcatgctgctgctgctgacgctgccggggctggacgggctccggcgggggatgatctccgtggtgcggagcgcgctgaagccgatgatgtcggtggtgcccttctgcctcttcctgctgatggacatctactggaagtacgagacgcggcccacctgcgacgacgagcaccactgcaccccgtccgagcacctccgccaccagaagtccatcatgaagtcgcagcgcaacgcgctcctcatcgccgccgcgctgctcctctactggatcctcttctccatcacctccctcgtcgtcaggctcgaccagctccagcagcgcgtcgacaagctcaagaagcgggacgactgatctgatcctgctacccctccctgattcagcgcgccgactgacctgaccggtggcttcgctgtttcttccctactcgtttgtgttcttagatatatcatgtgatgcgtgttgctgtgtttttttgtagtatggatatggatgcttgagatcgtgatgcggatttgagcgttctattatttgcttc

SEQ ID NO: 1219 - DNA, 994 bp, Oryza sativa
  ref <308>: DATABASE ACCESSION NUMBER: AK059270
  ref <309>: DATABASE ENTRY DATE: 2001-12-06
accaaggtcaccgaccagcacatctacctcgtcgtcaacgccgggtgcagggacaaggatctcgcccacattggggagcacatggaggccttcaacaagaagggcggcgacgtcaagtggcacgtccacgatgagcgctcgcttcttgcattgcagggacctcttgctgcaccaactctccagttgctgacaaaagaagatttaagcaaaatgtatttcagtgacttcaagatgattgacatcaatggatatgcttgctttctcaccagaactggttataccggtgaagatgggtttgaaatctctgttccatcagagaatgcagttgatcttgcaaaggccctcctggagaaatctgaaggcaaggtgagactgactggtttaggtgcccgtgacagtctccgcttggaggctggcctctgcctgtacggcaacgacatggggcaacacatcacaccagttgaggctggtctctcatgggcaattggcaagaggaggaaagcagaaggcggcttcctgggagcagatgtgatcctcaagcagctccaggaaggcccaaagatcaggcgtgtcggtctcctctcgcaaggaccgcctcctcggagtcatagtgagattgtgagcaactccggggagaacattggtgaggttaccagtggagggttcagcccctgcttgaagaagaacatcgccatgggctacgtaaaatccggtttgcacaaggctgggacagagttcaaggttgtcgtccgtgggaagtcctacgatgccgtcgtcaccaagatgccgttcgtgccgaccaagtactacaaaccctcatagatttgtacaaaggatgctccttcggttgaaattttctcatgcaactctcttgtcgctgcttgttctgcagcaccgcaactgtaacttctgtaaggtctcatcttacagcttgacattttacctctgcccatctaataatatgaaatgtgatatgcagtatggatcctttccc

SEQ ID NO: 1220 - DNA, 1704 bp, Oryza sativa
  ref <308>: DATABASE ACCESSION NUMBER: AK059271
  ref <309>: DATABASE ENTRY DATE: 2001-12-06
actcctaggcgagagaatctgagagagatgagatgagaaaccttcacccaccaatgatgaagatgctcctcgccgccctcgtcgtcgtcgccgccgcctccttcagggcggccgaggcggcgctcccgtcgatggcggtgggcgtcaactacggcgccaacgccgacaacctccctccgcccaaggacgtggcggccttcctcgccgcgcacaccaccatcgaccgcgtgaagctgttcgacgccaacccggccttcatctccgccttcgccaacacacccatctccctcgccgtctccctccccaactccgacctcccttccctcgccgacaagcagaccggcctcgacaccgcccgcgcctgggtccgcgccaacctctccccctacgtccccgccaccaacgtcaccctcctcctcgccggcaacgagatcctcctctcccctgaccccaacctcgtcctctccctcctccccgccatgcgccgcctcgcccaggccctccgcctcgagggcctcaccggagtccgcgtcaccaccccgcactacctcggcatcctcgccccctccgacggcatcccatccaacgcccgcttccgcccgggctacgacaccaagctcttccctcccatgctccagttccaccgcgacacgggctcccccttcatggtcaacccctacccctacttcagctacaacaatcagacgctggactacgccctcttccgccccaaccgcggcgtttacgaccccaacaccaagctcaactacacctccatgttcgacgcccagatggacgccatctacaccgccatgaagcgcctcggctacggcgacgtcgacatcgccgtcggggaggccgggtggcccacgcaggcggacccagggcaggtgggcgtcggcgtggaggaggccagggacttcaacgaggggatgctccgcgtcgtcagcagcggcaagggcaccccgctcatgcccaaccgcaagttcgagacctacatcttctccctcttcgacgagaaccagaagcccggacccatcgccgagaagcacttcggcatcctcaacccggatttcacccccatctacgacctcggcctcctccgccaatcctccgattctggagctccaaacccttcgccgaatccatcacctaaccctagtccgaaacccgctccttctggtggagggaagtggtgtgtccctaaggctggtgcgagtgatactgacttgcagaacaacattaactatgcctgtggctatgtggactgtaagccgatacaaagtggtggcgcatgctttgatccgaacaacgtgcagtcccatgctgcatttgtgatgaatgccttctaccaggccaacgggcggcacgactacgattgcgacttcaagggcaccggcgcggtcacctccaatgaccctagctacgggagctgcaaatacgtctcctgacgggacgcagcaagccatggcagtgcaggtgcagcggcaccaacctcgagtctacctccaggcttaagtcacggaagcgctggagggttgctaatactgcctggcttgcgcctaatttttctctgctcttgtctgacagcagccatgcttctttcttagaagagctatactattcattactctcgtagcaccggggaatgaacctattaaaattgtgtatccgttatcagtcaattcttgctcatgtttggct

SEQ ID NO: 1221 - DNA, 569 bp, Oryza sativa
  ref <308>: DATABASE ACCESSION NUMBER: AK059272
  ref <309>: DATABASE ENTRY DATE: 2001-12-06
gtgcagacagctcctcctcccccatcggccatggcgaccgccgcgagacgtctgctcctcccggcgctccgcaagtccctacccgcggccaacggcgccgcgcgaggcgtctccacggagagggcggtcggcgccgccgccgtcgtcggcagccacaccgccaagtggatgcaggacacaagcaagaagtccccaatggaattgatcaacgcagtacctccgatcaaggttgaaggacgaattgctgcttgtgatgggcgtcaggataaaggtcgtgaaactggttccctcggccatccgatcgaatatatctgccttgacctggaccagcctgctgtatgcaagtactgtggtctccgttttgttcaagatcaccatcactgagaagacaagatgcagtccttcaccacactgaaatttggaattgaatgtgtgtatttggtttaaaatgttccagtcagcgtgtcatgtattctgcctgatggcaagatgatgatatctttgacgatcatcgtactttgaatgacataataatgcccgctttaataacagtggatttctttttcttt

SEQ ID NO: 1222 - DNA, 1181 bp, Oryza sativa
  ref <308>: DATABASE ACCESSION NUMBER: AK059273
  ref <309>: DATABASE ENTRY DATE: 2001-12-06
aaaatgtctctccggcccctctgaatccatccttaaagactaaaccctccataagcctcctctctctctttcttccaggagacaggtgacaagggggatagatacacaacgatactccgcagcgcaggaggaggacacatccttgatttctgccatcggaggagctcctgcctcggagatacacgaagctgctacatcttcttccagctcaatcgtatcgacgcttgcatctcttttgctcagagtgatcgtcgtttttcacagcttgcaggaaaaaaagggcaagaaagactgagagcagcagaagaggaagatgatgatgaccgaggtcgccaatcacagcaaaaggaaccacaatgaaagctacttcaccgggaaagcagcagtcaccagcagctcggaggagtttgggagcatgacatccaagaagccgaggaacacaagcccgagagacgctcccgtctccccgaaggagaagaaggataagattggtgagagagtggctgcactgcagcagctagtgtcaccatttgggaagacggacactgcttctgttcttcaggaggcctcagggtacatcaagtttcttcaccagcagctcgaggttcttagctccccttacatgcgtgctcctccggtgcctggcgctgcgcctgaggatcccgaccactacagcctgaggaaccgtggcctctgcctggttccagtggaccagacgctgcagctgacgcagagcaacggcgccgacctgtgggcgccggcgaacacgaccaggcgcaggtgaacggaggaaccggcctggaggctcgggggtctaagaggcctagaggaggaggggagcacttttgtctgggggcggtgtagagttccaacttccaagtgtctgacccgattcatcaaatctcctaacaaagcaaaaactaataagcaaaccgtgtttcactctcgtcggatctcttgcctgtaatatagtagtagctgcaaccctgcctgcaggtcggtgtgagaccgtgagagtgtgctactgatgagtctgtgttagcgccggacatatgtgtgtaatcatcatacatagcgaggtgatagtactagactacctgatgtgcccatatgtgatatgtaactatgtgtctcttcagtaacatgatagtagcagcatgttgctgctagcaaccaagttc

SEQ ID NO: 1223 - DNA, 565 bp, Oryza sativa
  ref <308>: DATABASE ACCESSION NUMBER: AK059274
  ref <309>: DATABASE ENTRY DATE: 2001-12-06
ttggtcctccagatcaggttgctgaagctcttatacgaaaggttcttgccgcacctacgcaaaagacaaagttaattgaagcaaaagagaatgacgttgacggaagaacttactacacttttgagttcacagctcaagctccaaatttcaccaggcatgcgcttggtgcaattgccattgcaaatggcaaattttacacgttgacaactggagcaaatgaaaggagatgggagaaaatcaaggataggctacatacagtcgtcgattccttcaaaatcgaggtgctccaactggtgtggttcaatggtaaatgtcggaaacatggattttactgatctgttttgttttgagatgtgtgacacgacttcaatttgtacgtatatacatcttcccaatgtcgatcctgatccttctatttgtatgtactggtgaggttaagaaaatatgtaaatgatcctttgaatcgcaatgttgattataagggccatctgtgagagtaaaatctatactgggttttttttttctttaaccacgagccaaatatctggattttattggctcaaat

SEQ ID NO: 1224 - DNA, 800 bp, Oryza sativa
  ref <308>: DATABASE ACCESSION NUMBER: AK059275
  ref <309>: DATABASE ENTRY DATE: 2001-12-06
gatacccttctctctctctccgagctcgaatccaccaccaccaccaccaccaatcggagccaccggagagcggcggcgcagcagacggcggcggctgcggggggcgagaggccgattcgccggaggagagaaggagagagagagagagatggcgttcacgatgcgcgcggtgaaggtgccgccgaactcggcgtcgctggaggaggcgcggcaccgcgtgttcgacttcttcaggcaggcgtgccgcgccatcccctccatcatggagatctacaacctcgacgacgtcgtcaccccgtcccagctccgctccaccatcgccaaggagatccgcaagaaccagggcgtcactaaccccaaggtcattgatatgctcctgtttaaggggatggaggagctgggcaacatcaccgaacacgcgaagcagcgccatcacgtcatcgggcaatatgtggtcggccaaaagggactggtgcaggatatggagaaagaccaagggtcctcagacttcctgaagaaattctacactagcaattactcctaatctgtgctgcaaactcctcctccttcagtaatacccgagaagtgatctgaataagacgctgagaacccacagctttaattgttttatcactggaatctttttgttattctgcttgatccttcaatcatctgcgcagtgtggcgctgttgctagtgaattgtttgtaacttgtagactgtactctgcaaagttgatgttcatgagttcataccgtgtgtcaatgggttcgaactcatgtacccagcacatgaccatc

SEQ ID NO: 1225 - DNA, 533 bp, Oryza sativa
  ref <308>: DATABASE ACCESSION NUMBER: AK059276
  ref <309>: DATABASE ENTRY DATE: 2001-12-06
cacatgccttttggttagcgaatcagcttgcaactgtcaactgtttactgcttataacatcggtggattttacctgcttgtctccaaggatctgttgtagcattaattgagattaataaaagcagttggaataacaagatgtagctgcggctgtgacttcaacttcctgccttcctctaattcaagatgtagctgctgcctgcccacccctaccattaaccataatatagtgctcaagtagcttactgccagaaaaactgtcaaatgtattgtgattcccctaagtagctttctgcttaatttcttttctagtggggataaaagaactctgtactattactttgtattaggacgatcctctggtctgtgttgtgagttgtaagttgtaactcgtgacttggcttttactcacttttcccttctgctgatggcggacagaggactcgacagtcaacattcctgtggctcagtccttcactgaaggtagcttgggagtgtctgattttgcttggttttatatgttttgttgtatt

SEQ ID NO: 1226 - DNA, 1279 bp, Oryza sativa
  ref <308>: DATABASE ACCESSION NUMBER: AK059277
  ref <309>: DATABASE ENTRY DATE: 2001-12-06
gagcccatcagtcgagtcgatcgaacagcacagcaagtgagcagtgacaatggcgtctctggccgtcgtggtggtggtggtggcggtggtgtgcgccgccggtgtggcggcggcgggcaagttcgacgacgtggtggagccgagctgggccaacgaccacgtcgtgtacgagggcgacctcctcaagctccgcctcgacagctcgtccggcggcgggttcgcgtcgaagagcaagttcctgtacggcaaggcgaccgccgacctgaagctcgtggcgggggattccgccggagttgtcactgctttctatgtgactgtcgtccggcggggacaagcacaacgagttcgacttcgagttcctgggcaacgtcaccggcgagccgtacctggtgcagaccaacctgtacatcgacggcgtcggcaaccgggagcagcgcatcgacctgtggttcgaccccaccgccgacttccacacctacgccgtgctctggaaccccagccaggtcgtcttcctcgtcgacgacacccccatccgcgtctacgagaacaagaacgccaccgccgccgtcaagggccaccaccgccacgccgccgccgccaatggcaccagcaacgccacatcggcggcggcgtccgtgccgccgttcccgtcgccgcagccgatgtcggtgtacagctccatctggaacgcggacgactgggcgacgcagggcgggcgggtgaagacggactggtcgcacgcgccgttcgtggccacgttccgcgacgtccgcgtcgagggttgcgcgtgggcggcgaacgccacggactcggacgccggcgaggtggcgcggtgcacggggagctcgtggggcaaggaggggaggtactggtggaaggagaaggacatggaggagctcaccgtgcaccagaaccaccagctcgtgtgggcgcgcgcgcaccacctcgtctacgactactgcgtcgacaccgaccgcttccccgtccagccgccggagtgcgccggacggtgaccgtcgatctcgtcgccggttaggatggatcgatggatggaactgctggtttctttcttggttagcaaatcaaatggcaggtagtttatctcagatgaacttaggtgatggtagttcatcgtaattctgtgtctctgtgggggtgtatctgtaaaaaattgttactcggcttccactgctgttctgctgctgctgcatttcttcagtcttccgatctggacgatgctcacttttaacttcaaatcgaaatgcaaatgcccaatgcc

SEQ ID NO: 1227 - DNA, 1104 bp, Oryza sativa
  ref <308>: DATABASE ACCESSION NUMBER: AK059278
  ref <309>: DATABASE ENTRY DATE: 2001-12-06
aatccccaaatttccccaagctgcagctgcgcatcgcaacctccgctctctcctaaaccccctctctccaatggccggctacccgccaaatcccggctccggctacccctacggcggcgccggcggctacggcgccccgccaccgccgtacggctcctcccccgccccctccgccccgccgtacggcgcgaagcctcccaaggaaggtaagacctcctcctcttccgccccttactacggcggcggaggcggctacggtgccccgccatccacccagccctacggcagcggaggcggctacggcgccccgccctccagccagccgtacggcgcgccgtacggggccccgccgccctcgtcggcgccctacggggcgcccggcgggtacggcagcccgttcgcgtcgctggtgccgtcggcgttcccgcccgggacggatcccaacgtggtggcgtgcttccaggcggcggaccgcgacggcagcgggatgatcgacgacaaggagctgcagtccgcgctgtccgggtacagccagagcttcagcctccgcaccgtccacctcctcatgtacctcttcaccaacaccaacgtccgcaagattggtcccaaggaatttacctctgtgttttacagtcttcagaattggaggtccattttcgagaggtttgatcgtgaccgaagtggtaaaattgatgcaacagaattgcgtgatgctcttctcagtctgggatattcagtttctccaactgtgctagacttgcttgtgtcaaagtttgacaagactgggggcaagaacaaagccattgaatatgataacttcattgaatgctgcctcacagttaagggtctgactgagaagttcaaggaaaaagacacagccttctcgggctctgcgacttttacttacgaggctttcatgctgactgtactcccctttctcattgcataaaatggcagtgtgctgcacagtcgacctttcaggagaccatgcccattgtgttgaaacggttctgtaacgtgtgttcatcgacttgtttttaactgagtttattgtttggatttgaaatgatacaagtgcttccctgatcggacatgttacaagtt

SEQ ID NO: 1228 - DNA, 1628 bp, Oryza sativa
  ref <308>: DATABASE ACCESSION NUMBER: AK104063
  ref <309>: DATABASE ENTRY DATE: 2002-08-28
ctcgatctctccacaactccccccccccctccagctctctccaaagtccaagtctctctcggtgctcacgccgccgccggccaccgccgccccccgtccgtacaccgcgtggcccgcccccgcgcaggtgagggagctagcggccttcgtctgccggcgccggaggcggagccagattgttgggaaacgagttttccgcccgcttctctggtttctcggcggtgtcttttactcctggggcggcgatcccgacgcggggatgcggcgggctgtggcgtgatgtgtggatcggagcatggacttgatcgcgtcgcacggtaggagctgcagcggtcggggtgggagcaggggtcgcgcggcggggtgcggccatgacgatttacatagcgcgggaggcttccaaggtatggaggaaggtgaccacggagacgtcggtggagctctcgctgctgcgcgagaagtggggattgctcctcgccggaattgtgtttcagtatattcatgggctggctgctcgaggagtgcattacttgcatcgacctggtccacttctgcaggaccttggatttatggcccttccagagtttgggcaagacaaaggttatctaagtgagagcatatttgcttccatcttcgcttcctttgttttatggacttttcatccttttatttatcatagcaaaagattctacactgtcctaatctggcgccgggtgctagcctttttagttgcttcgcaggttttaagaatcattacgttctattccacccagcttccgggcccaaactaccattgtcgtgagggctcaaagttggctactcttccaccacccaacaatgtatttgaagtgctcctgattaactttcctcgtggagtactttttggctgcggtgatctgatattttcatctcacatgatttttactcttgtttttgttcgaacataccacaaatatggttcaaaaaggtttgttaagcttcttgcttggttcatggccatagttcagagtcttcttataattgcttctcgcaaacactactctgtggatgttgttgttgcttggtataccgttaatttagtcgtattcttcgtggacaacaaactcccagaaatgccggatcgtacaaatggagtacctttgcttccattgagtaccagggaaaaggatggcaggttgaaggaggagaaagacagcagactgaaggaagagttccataagctattaaacggaaaccatggggatcctactgatcggcgacagcgcgcgcagatgaacgggaggcacgatgaagacatcaatcacgcccacagcacgctctccgacgctgctgtcaatggtggtacatgagccgcggcatctgctttccaccgggagtttgtcttctcgcgtcgaccccgaggagaatcctctgggggcggattgagaacaaccgcccggtccatctgcatagtgcatgcacatcctgaacaagattccagcggcagaggcagcattacacatggtttccttgtcgatttctgctcatccaccatcctggtactatagcatgatcgcagataaaacgaatgaaatgaatggatgatttggtgctctaatcaatcgggcggtagacgctattcaggaatc

SEQ ID NO: 1229 - DNA, 968 bp, Oryza sativa
  ref <308>: DATABASE ACCESSION NUMBER: AK059279
  ref <309>: DATABASE ENTRY DATE: 2001-12-06
actcctcccgccgccgcctccgcctgcctcggaagtcacgcccctcccgccgcagcggcagagagagagagagagagatgggcttcctgtccttcgccgggggggtcctcttcgccgccgccttcctcctctccgcctaccaagagtttagtgaatttggagttgatggtgggccggccgcaaaagctctccagccgaagttcaacactattgttgcaaatatttctacccgtactggattagtggtgcctcatattgaattaaagcatattgttgctgcaatgatttctttgaagggtcttggaggtctcctctttatcctcagcagttcattgggtgcttatctcttgttgtttcaccttgcttttattacacctgttgtccacgacttctacaactatgacattgagagtgcagagtttgtacagctcttcaccaagtttgcacagaattgcgcacttgttggggcgctcctcttcttccttgccatgaagaactccatccctaagaggcagcccaacaggaagaaggcccctaaaccaaagtcgacctaaagattctgaacgtctgaagctacattgtttgcctaattgctggtgccaggggatggctctcatctgggagaaactccacagctagcatttgaggatatggcatttgtgcttgtgcatgctttaattctgaaagcatcccttgatcctgacccatttttaccggattttttttaagggcgcctccctgattacattctaatgtctgattagacgaccagattgtaccaacatgtactcccttttggttcttgattcagtttcttaggaagcaatcgttatttatgtacactccattaatttgctgggaaacatcatcttcttggcacaatctttctgtgtgctttgtgtcatgtttagagttatattgacggcctggtgccaaatggcacattcagcatgcaattcaaagctatg

SEQ ID NO: 1230 - DNA, 1285 bp, Oryza sativa
  ref <308>: DATABASE ACCESSION NUMBER: AK059280
  ref <309>: DATABASE ENTRY DATE: 2001-12-06
ctcctcttctctctctctctctctcatatggtctcccgcggcgcgccccgctactgtccatcctagcgcggagccgcagcttccccacacgtccatggccgccgccgccgccgccccccggttcttgcccgtccgcccgctctttctcctcctcctcctcctcgtcctggccggcgtcgcaagcggcaagacggtcaagagggacgtgaaagcattgaatgagatcaaatcttcgttaggatggagagttgtctactcatgggttggtgatgacccttgcgggcatggtgatctgcccccctggtctggtgtgacctgttctcagcaaggagattacagagttgtcaccgaacttgaagtctatgctgtatcaatagtcggtcctttccctacagcagttacaaaccttttggatttaaaaagattggatctacacaataacaagttgacagggcccattcccccacagattggacggctgaaacacctcaggatattgaacctgaggtggaacaagcttcaggatgtgctcccacctgaaattggtgaactgaagaaactgacacatttatatttgagcttcaataacttcaaaggtgaaattcctgtggagcttgcaaacctaccagaactgcgctatctgtatcttcatgagaaccgctttactgggaggatccctcctgaacttggaactctcaagaaccttcgtcacctggatgttggtaacaaccacttgataggcaccctcagggatttaattggcaatgggaatggtttcccctccctcagaaatctgtatcttaacaataatgatttgactggcgttctgccagaccagattgcaaatttgacaaacctcgagatactgcacttgtctaataataggctgattggatcgatatcaccaaagctagttcatattccaagattgacctatttatacttggacaataacaacttcattgggaggattcctgaaggattatacaaacatccatttttgaaggagctgtacattgaaggaaaccaatttagaccaggaagcaaatcaaaaggaacgcacaaggtgcttgaattacctgatgctgacatcttagtttaacaactgtttattctgtgacgatagcagagcggctaccgttctacatctcctcagcatgcaccaacaaaaatgtatgcatgtttttaggatatatacgatatatgtatcagtagtacagacactgtttctcacagcactgttcgaggacaagttcacacacacaaaaggccacttgcaaaccag

SEQ ID NO: 1231 - DNA, 1232 bp, Oryza sativa
  ref <308>: DATABASE ACCESSION NUMBER: AK104064
  ref <309>: DATABASE ENTRY DATE: 2002-08-28
aatgaacttctgctatgacctcgtcaaggcaaacaagcgttctctgattggtgggctcgacaatatcaagaatcaatacgataatcctgaatgtatcgcctattctatagcctcttgccttgagatagcagacaggattaagacggttcttcagggaaaaaatcccgactccgtaaaagagatagacccaactgccattgttgacatgtttgatggtaagtgcttggccaactgttctgatggcacatcgggaatcggaaaacttgttacaatggcgcttgctgtccaaactgatggcatacaatctaccgatcattcaaggctttacactgctgtagcagtggaaacaattgataagtatgactttgaagggatatgtgccacacttgctgatggcattccgcttgttggtgcgttttactgcggcagcagattggaaaagcttgagtattgccaaatttacagagtgcccaaactatccaaattcctggatagaaatctgattcctactggccatgctgctgttatcattggggctggaatgcgctgcgggatacaatatttgtattttctaaattcgtggggtaacttcttttgcccacgctatgacaaagatggtaatcttgtgaaagctggagttggaaagttgaggttttatgatttgctctgcaatccgattatgttcataacagattctgccaagcgtgttgggttgaataggcagctactgcctatgggcactgggaagctgtcagatcacaacaagagcatgctgatgggccgaaaacaaactgatgttatacctgaagacctatctattggcgtaacctccgagtttgttgggaatcaaccacaaatttcttcaaaaagaaaaatggctaatgccactttggatggtgatggtcaaactcaaaagagaaacaagtgtagaactttcggccgaagttctgtcgatctcaatgaagccaacaacaaacggaatgcaaaggaagatgagatgtgaggtcatggggatgaagaaccctgcagacatacttttgctttgtgaaaaagggcctgatgttttttgctctgagagttggtagggtttgtgagccacctcaccaagcatcaatgatgcatatttttcattatgctacacttggatgtctcaatttaatctactgagactctttttcgttgatgatcactggctcactgctcatgtaaatcctggagagtatttattgttg

SEQ ID NO: 1232 - DNA, 1651 bp, Oryza sativa
  ref <308>: DATABASE ACCESSION NUMBER: AK059281
  ref <309>: DATABASE ENTRY DATE: 2001-12-06
ccctattggatatcacactaaggaaacttacttcccttgagcggaaaaaatttgttgacgaagctaaatctttgtcagaggagatctccaagttaaatgagctcctgtctaacaagaagcttatttttcagcttattttacaagaggcaactgacttaaagaacaaatttgctaccccacgacgttctttcatagaagattcagcaagcactgaagttgatgatcttgatattattcctaatgaggaaatgcttttgattcttagtgagaagggctacgttaagcgtatgaagcctaataccttcaatctacaaaaccggggaacgatcggaaaatctgttggaaagatgcgaatgaacgacaatacatccgatttcattgtctgccaaacacatgatcatgtcctttacttcagtgacaagggaatagtatactcagcacgtgcttataagatacctgaatgcacaagagctgcgactggaactccactggtacagctgctttctttgtccgatggggagagaataacctccatcgttcctgtaaatgaatttggtgaagatcagtatcttgtgatgctgaccgttaacggttatatcaagaaagttcctcttaatgctttctcagcaatcaggacttctgggatcatttcaattcaactggctcctggtgatgagctgaagtgggttcgtcgttgtggggatgatgaccttgttgctttggcttcacaaaatgggatggttatagttaatacatgcaacaagcttcgcgcccttggaaggaaaacaaggggcgtcctggcaatgaagctaaaggaaggtgacaagatggcatccatggatataattccagcaacgtcgcataacatgcctgaaacttacagcagagtcagagatttgagtccgccatggctgcttttcatagctgataatggtattgggaagcgtgtgcccctaaatgcattccggcaaggaaatttcaacagagtgggcttgcaaggctacaagcttccaccagactgtagcttagctgctgtatttgttgttggattttcacttactgatgacggtgaaagtgacgaacaggtggttttagttagccagagtggtactgtaaacagaatcaaagtcaaagatatatccatccggtctcgttccgcaaggggagtcattctgatgaggctggaacatgctgggaagatccagtcagcctcactaatatcagcagcagaagaggaggaagaacaggacccggagtcagcctcactaatatcagaagcagaagagccggaaaaacaagacccggaggtctcagcttaggagtggcgagtgcactcatctattgaaggcctcgctgatgtgattgcagttcggggatgcaatttttgggcggctcagcgatcatgcaagattcattccacgccgaagcacacggctgattcggacagaactctagttgccattaactacctgtgtctagctagatatgtaggatttccttggcaggaaccgaacgtgctcgcaaggctacatctgccatgagcagttgatgcatccagcacctcatgcgctactgctggactggtgtgcttcttctgtgttgagaactactgattcttgcgcatcccccgttgcgttagcaacagtttatg

SEQ ID NO: 1233 - DNA, 1671 bp, Oryza sativa
  ref <308>: DATABASE ACCESSION NUMBER: AK059282
  ref <309>: DATABASE ENTRY DATE: 2001-12-06
gtcttccattatatttctctccccttccaacaaatcgtctcgagaaagaggaggaagaatcgatcttttggtggagtttgcaatggtgaagggagggagggaggcgctgctgggcgggtacgagatggggaggacgctcggggagggcaacttcggcaaggtgaagtacgcgcgccacctcgccaccggcggccacttcgccgtcaagatcctcgaccgcggccgcgtcgtctccctccgcgccggcgaccagattcgccgcgagaccgccacgctcaagctgctcaggcacccccacgtcgtccgcctccacgaggttgctgctagcaaaactaagatttacatggtgcttgagtttgtcaatggaggtgaactgtttgagagaattgcagtaaagggaaaactatcagagaaagaaggaaggaggctttttcagcagttaattgatggtgttagctattgccatgataggggagtctaccacagagacctcaagcctgagaacgttcttgtggaccaaaaaggcaacatcaagatctctgattttggtcttagtgctttacctcaacacctcgggaatgatggattgctgcatactacctgtggtagccccaactatattgctcctgaggttctgcagaataaaggatatgatggatccttgtcagatatctggtcttgcggagtaatcctttatgtaatgcttataggatatcttccgttcgatgaccgaaatattgttgttctgtatcagaagattttcaagggtgacactcagatcccaaagtggctttcacacagtgcacaaaatcttcttcggaggattcttgaacccaatccgatgaagaggatcgacatggcagggatcaaatcacacgaatggtttcagaaggactatattcctgttcttccatatgatgatgacgatgaagatgtacagtttggggcacgtcttcctgccaaagagcaaatcaatgatgagcctggagataagaattctcatcagatcaacgctttccagttgattggaatggcatcatcccttgatctttcagggcttttcgaggatgaggaagtgtcccaaaggaggattagattcacatcaacgcatccacccaaggatgccttcgacaagattgaaagctcagcgacggagttgggattccaagttcagagggggcacagcaagctcaaattaatgcgcaattgcaagggatcaaagaaccctgagtcatttatggtgtccgccgaggtttttgagcttggcccttctgtaaatgttgtagaacttaggaagtccaacggagaccctgcactgtatagacagctctgtgagaggatctccagtgacatgggggcgcgcaacacggagcagatcttcgcaacggcatcgcttgaggatgatcttcagaacagcaatgcagggacgccgctgttcgctttgtaacgaatgctgtgttctgcaaaactgcaatgttgtaggatgatcttaggcaagaggatgtgtaggaacatatttggtcaggcatttggagaagagataagacttgagagggtaggatcatagtagtatatgatacagtgtacagaaccgagtggttcaaaaactagccaccgttgtaaagagaaagaaaggaaagatgaaataaaagaaagaaataaattgccttg

SEQ ID NO: 1234 - DNA, 1253 bp, Oryza sativa
  ref <308>: DATABASE ACCESSION NUMBER: AK059283
  ref <309>: DATABASE ENTRY DATE: 2001-12-06
accaaccgcttccttttccttctgctgctgctgctgctgctgctggtggtggtagacagcgaagccggcgaaccacctcggtttcgttggcatcgtcatcctccaggtccacggccactagctaccatctagaagcttccggaagcttcgggaaggaagccgccccccgcgccgccttgccgggcctcgcaatgccggaggagaaggagtacgcgcccgtgcccctcggccaggcgccggaggcggtggaccccgaggacccggtcaagtcgccgccgcggcccacctcgccggcgaactccacccgcaaggcatgttttgctgttcttcaaagctgggtgtcaagaaaatttatgacaggatgcgtagttcttttccctgttgctgttacattcttcatcacctggtggtttgttaagtttgttgatggatttttcagtccactgtatgcaaagcttggatttgatatatttggccttgggtttttgacttccttgctattcatattcctagttggaatatttgtttcttcatgggtgggttcaactgtcttttggattggagaatggtttattaagaaaatgccttttgtaaggcacatatattctgcatcgaagcaagttagcactgctgtttcaccagatcaaaatacaacggcatttaaagaagttgcaataattagtcatccccgtattggtgaatatgcatttggattcataacatcgacgatgatccttcagactgacaaaggtgatgaagaactgtgcagtgtatatgtgccaaccaatcatctatatatcggtgacatcttcttggttaggtctgaggagattataaggccgaatttgtccattcgagaagggatagaaatcattgtttctggaggaatgaccatgccgcaggtgattgcagcaccaggacaaacaccccataagggtcagagcacccgtttaaacagaatgatgagtgcgtgagtacatcagcttttgtaggtctgcccagagttgctgagagagggcaaatcggtggatgacaaagctggaacaaggtgattgagaagcagcattgctggtagattaggcagatcaaaatacgaaagtcagtgttgactagtccgcatcgcttaggtttgctcgctgagtgaaaagttgtgtaatctttcaatcacgctccaaatgtatatcagtactgtgaccaatagtatttatactcctttcaaaagaaaaaaaaacgatagcatttgtaccttgttt

SEQ ID NO: 1235 - DNA, 566 bp, Oryza sativa
  ref <308>: DATABASE ACCESSION NUMBER: AK059284
  ref <309>: DATABASE ENTRY DATE: 2001-12-06
ccgatccggtcgcccgcggcgagcccgcaaccttcaagatctccgcttccactgataaaactatcggtaaagggaagctggttattgatgtgaaatacttcttcttctatgtccactcggaaactcgtgagctctgtgatgtgacttcctgcccggcaagtggtgacttcttggtagctcatcagcaaaccctgccatcatacactccaccaggctcttacaccatcaccatgaagatgctgggtgataacgatgaggagctgagctgcatctcgttcgggttcagcatcggtttcgctgcatcagaagccaccatctgaatgcatccagaggcagaattcagaaatatcacaccatggatgtaattacaaaagcacctatgtatcttagatcatagaactcaaatacaatgcgcatctgccaacacattgtgttcaactaagacgttttatccagagttgaacatacaataaaaacatcactcactagtgtacctaactccgtttagctgttgaaatgtgttgcattgcatgttgaattgagcctggatgcatcttgatcttgag

SEQ ID NO: 1236 - DNA, 313 bp, Oryza sativa
  ref <308>: DATABASE ACCESSION NUMBER: AK059285
  ref <309>: DATABASE ENTRY DATE: 2001-12-06
aagaggatgtcattgctggatggcgcccaaaggtcatgggttaaattgtagctgtaaaagtaaggcactctgataaactataaactatacatcatactttcttcagtaaagctagaattataccacacacaaacaattttcgtatgattaccacttgttgctgctgaaatatctgggcatttcttttgttgctaatagtttatcggtgagtaagacattccagaaatgatgatgattatgataagatgtaaggttgatacttttctggtcaactggaaatatcggttaatcagtggctttcttagttggcatt

SEQ ID NO: 1237 - DNA, 1396 bp, Oryza sativa
  ref <308>: DATABASE ACCESSION NUMBER: AK059286
  ref <309>: DATABASE ENTRY DATE: 2001-12-06
gtaactctcagcgtcagcgagaagcagccaaagtgaaagcgaaagagagctgaactcagtggaggctggagagtgagcttaccaatggagcttcctcggggtgccctgctgctggtgctgctcgccgtcgccgccgccgcctcctccgccggtgccacactcgccgtcaaagctccagttccagttccagttccagctcctgcccctgcccatgcacctcctcaacctaaagatgctgaaggcctcctcatcaatggcaacttcgagacggcgccgaggaaggtgaacaagacactcatcgtcggccgccactcgctgccggggtggacgctgcgggggcacgtcgagtacgtctccggcgggccgcagcccggcggcatgttcttcgcggtgccgcacggcgtgcacgctctccgcctgggcggccgcgcgtcggcgtcccagaacgtgtccgtgcgccccggcgcgctctacgcgctcaccttcgccgccacgcgcacgtgcgcccaggacgaggcgctccgcgtcgccgtcgcgccgtcgctctcgccgcccgccgacgtcgccgtccgcacgctctacagcgccgacaccgccgacacctgggcgtggggcttccgcgcctcctccgccgccgcgcaggtcaccttctccaaccccggcgtccaggaggacgcgtcgtgcggccccctgctcgacgccgtcgccatcaaggagctcccaacgccatacccaaccaaagacaacctgatcaagaacgagggattcgagatcgggccgcaggtgttcaagaactcgacggtgggcgtcctccttccgccgaagcagaaggacgcgacgtcgccgctcccgggctggatcatcgagtcgctcaaggccgtccgcttcatcgacgcggcgcacttctccgtcccggcggggcagtacgccgtggagctcgtcgccggcagggagagcgccatcgcgcaggtgatccgcacggtggcgaaccgcgcctacaacctatcgttcgtcgtcggcgacgccaagaacggctgccacgggtcgatgctggtggaggcgttcgccgggaacgtgacgcagaaggtgccgttcgagtccgtcggaaacggcgggttcaagccggcgagcttccggttcgtcgccgccggcgtgcgcaccagggtgaccttctacagctcgtactaccacaccaaggtgagcgacggcgtctcgctgtgcggccccgtgctggatcaggtcaaggtccagccattgaaggcgtgatgatccccctacgattcagagctctcctttcggatcatggtttgctaattgctctacttagacgtcgtgtctgtaaaactctgcattggtgatttgggttttggacattgaactttcgtgtgatctagct

SEQ ID NO: 1238 - DNA, 994 bp, Oryza sativa
  ref <308>: DATABASE ACCESSION NUMBER: AK059287
  ref <309>: DATABASE ENTRY DATE: 2001-12-06
atccccaccacgcgtgcgagacgagaccagcgcgacgacggccatggccgcggcggcgacggcggcgggggacgaggagttggagtcgctgctgcgaaacttccaccgcttctcccaggggtacaaggatgcacttgtggaggcccaggctttaagggtgaactgcagctctgaatccgagaggcgtcaggctctcgagtcgcacgttgcagatctcaagagtgataatgagcgattgagaaggctgtatactgaaactttgttcaagttcaccaatcagatgaaatttcacacagagtctcgtaatctgaaggaagaactggaaaaggcaaacacgagattgctatccatggaagaggagtataagagggaaatcgaacaacttaagcttggcagtgtaatgaacagcaatgacctggagaacaagctcagctgcgctgttgttcagcaagcaaccaatgaagctgtgataaagcaactcaatctggaactggaagctcataaagctcacattgacatgctaaatagcaggttggagcaggttactgctgatgtgcaccagcagtataaaaacgagatccaggatctgaaggatgtagtcattgttgaacaggaggagaaaaatgacatgcataggaagcttcagaatactgaaaatgaattgaggatcatgaagatgaagcaggcagagcagcaaagggattccatctcggtccagcacgtggagacactgaagcagaaggtgatgaagttccggaaggagaacgagtccctaaagcggaggctggcgatctctgaacttgactgctcatgagagaatgaaccaattcccctcttcctttgatgctctcacgcactgtacgtaccaccaaaccatcagaggctagaaaattagatcatttggctggctgcaagtcccacatgttcactgggttgatctaggactgcacattcttcagttaaaatgaatgcaaccaattcagtcacttattgc

SEQ ID NO: 1239 - DNA, 834 bp, Oryza sativa
  ref <308>: DATABASE ACCESSION NUMBER: AK059288
  ref <309>: DATABASE ENTRY DATE: 2001-12-06
agacgcggcgaggagaaagaaaaaaaaaatccccaaatcgaaagccgcgagagacagaaaccctagcggagaggagggcggcgatggcggcggtgagcttgaggaagagcaacgcgaggctgccgccggaggtgaacagggtgctgtacgtgcggaacctgccgttcaacatctcgagcgaggagatgtacgacatcttcggcaagtacggcgcgatccggcagatccggctggggaacgccaaggacaccaggggcacggccttcgtcgtctacgaggacatctacgacgccaagaacgccgtcgaccacctctccggcttcaacgtcgccaaccgctacctcatcgtgctctactaccagccggccaagatgtccaagaagtcggacgtcaagaagaaggaggaggagatcaccaggctgcaggagaagtatggcctcggctccaagacgccttcatccgcccccgacgcgtaggattctcatcagaaatcagttcttcagctagtacatgtatttaagaatcgggaattgcttattcaatcttgcagtttgtgctcgtgtgttgtctgtgcaatagtttcctatcaatgaaaatcacacagcggtatgtactttgactgaaagaacaatatgcaatgtgtactttgactgggagatctgattggtagcatctagttgaattgtcctgtgtttttaggccccttgagttgatatgcaattatgtgctcagaattaagttgtggctttgcacctctaatatgtgttacttattggtgagcttataatctatggatggatgtagtcaaaatatgaaagcattttcattattggt

SEQ ID NO: 1240 - DNA, 1419 bp, Oryza sativa
  ref <308>: DATABASE ACCESSION NUMBER: AK059289
  ref <309>: DATABASE ENTRY DATE: 2001-12-06
attttcctctcctccgccacctcttctcctcgccgccgccgccgccgcctcctcgccggatcacgcaaaaccctagctaaaaccctacgcttccgccgccgcgagcgcgtcccccctccggcgagatgaacttcaagggcgcgaagatgccgagcccgccgccggcggctgccgcggggcggctggtgaaggtggggctgctgggcggcgccgccatctacgccgccttcaacagcctctacaacgtcgagggaggccaccgcgccatcgtcttcaaccgcctcgagggcatcaaggacaaggtgtaccctgaggggactcacttcatgatcccgtggttcgagaggccgatcatctacgatgtccgagcccgccccaacctcgtcgagagcacttctggaagccgtgatctccagatggtgagaattggtcttcgtgtccttacaagaccgttaccagagaagctaccaaccatctacaggtccctgggggagaatttcaatgagagagttttgccttcaatcattcatgaaacactcaaagcggtggttgcacagtacaatgccagtcaactaatcacacagagagaggctgtgagcagggagattaggaagatcctgacagaaagggctagcaacttcaacattgctctggatgatgtgtccatcacaagtctcagctttggaaaagagttcactcatgcaattgaagccaagcaggttgctgcacaagaagctgagcgtgcaaagttcattgttgagaaggctgaacaagacaagaggagtgcgatcatcagagcacagggtgaggctaagagtgcacagctgattggtgaggcgattaacaacaaccctgccttcctcgctctccgacagattgaagctgccagggagatctctcacaccatggcaagctcaaacaacaaggtgtacctggattccaaggacctcttgcttgggctccagcagctgaatgtggacaacaaaaacaagaagtgaaacagtttcttgtcatcagatgatcattacagtttctgatcatcagttgatcattgttggtttctccatgggagagtacttctaagaaaatcgcatagtctttagcttatgtcagaaaaggttctggtttaggaagtgagatcaacaggtggcatcctttttcatcgttgcatttgaaggagtactcgcaagtgaagtggaggttatcatttttgctgctgtaaaaaaatataacttgaatactctcttcgatatcttagttgccatggccactttgccagttcgtctttgttattttgagttcggtcgctgtaacgcaggctgtgcctctaacagctggattgctgcacatgtttcctgattcctgtgctaactaggcagcagtgagcatcgaatggctagaacttgactgccatttttg

SEQ ID NO: 1241 - DNA, 1181 bp, Oryza sativa
  ref <308>: DATABASE ACCESSION NUMBER: AK059290
  ref <309>: DATABASE ENTRY DATE: 2001-12-06
gtcattagggattacgagaacatttcaaactgtttgcgagaaaaactcagcaaacttgaaatggagaagaaaatattagatgaacaatccctagatcagaaagatgaacttcaacggttgaaatctagcttagaaagttgtgagaaagctatggaggattgtaatattcaaaatgagctggagaaagatagcattctatcggagctcctaactctccaaaaggaagtcgtatacttgtcatcatcttctttgatgaaagagaaggagtctatccgaaaggaacttgacagaacaaaaacaaagttaaaagagaccgagaacaaacttaaaaattccattcaagagaagataaaacttgagagtgaaaaggctgaggcccagagagaaataaagaagctacagagccaaaggactcttcttgaacgtgatttacggaaacgtgattcgtttactgttgacaaaagacatgaacagagtgtgaagtcgaaggagcttgccggtatctatgatcaagctgtccagattcaggaggactacggaaagcttgagatgcatgcttttgatatggaggctgaaattgcttcgttacaagaagctttagttactaccattgcagaaaaggaagaagcattatctagagtggagcttctcacatcagcagtggaagatcttgaaagtaggttgaattcagcagaatcagagactagttccttgcttgaggagactgctgtcttgactaggaagttagatgcatctgaatctatctctaaaaaacttgaggcttctattagttctttatcaagggaaaaagaagacatgggaattgaacttactgatgttcttctggaaatggagtctgaaagatcaacgtggactgccaaggagaaagcttatcttgaagccaaacaaaaactgaatatctgcaataagaacaattgcaaattatcagaagatttgattaaggtgagacaagaattggcgtgttgcagagaacagtacagtattcttgaggctaaaatgattttctccaagaatgacacaaatgaggagaaatactggttagtcttgtagtaattccatcaatctgacatattgtgcttcagtgttgtatgatcgggacaacaagtaatacaacaaccatgtaggagcatgccttaagctacttttaatatttcttttgc

SEQ ID NO: 1242 - DNA, 1704 bp, Oryza sativa
  ref <308>: DATABASE ACCESSION NUMBER: AK059291
  ref <309>: DATABASE ENTRY DATE: 2001-12-06
cgtaaaggatgcatctcgcactggagttgtttttgatgcatctcagaattgctttaggagctcacagcctattggtggtggatatttagcggaagcattcacagataaaagagaactcaaagcacttgttcgtttatttggtggttatggagtagataggctggataagttgttaagggaacatacatcagctctactaaattgcattgactcagcgcttaggtcaaaccgcgatgccttagagggccttgctggaagtgtaaactctggtgataggattgaaagagatgcaaatctaaagcagataattgacatcgaaacattggctgacttctgtatccaggcaggtcaggcaataacttttcgccggttgttggtagaagctgttggagctgttcttgaagagaaagtacctctcatatattctctgctcaagggattagctatgcagttgccagaagaggtacctgataaaaatgagatcattagactaagaagggttgctagcagtgttggtgtcggtgacaaacatgatgccgagtgggttcattctattctggcagaaataggttctgctaatgataattcttggaccttacttccatatctttgcgctgcatttatggcatccaatatgtggagcgctactgcttatgatgtcaatacaggtggattcagtaacaatttgcattgcttagcaaggtgtgtaagtgctgtggttggaggaagtgaatacactaggatggaaagggaacatcggagaagttcactttcaaatgggcatatggatgagctgcaagagcctgaattactgagccgtgtctcagctgaagcaaatattaaatctgctatgcaactctatgtcaaattgtctgcagggttagtcctggattcatggaatgacactagcaggccatacattgttccaaagctaatattcctcgatcaactctgtgagatgtccccctacctcccaaggagcaccttagaagttcacataccttacacgattctgcgttcaatctaccatcaattatatggagcctcactgatggccacagaaccaatggagccatccccaaggcagtcccctctgatatctctggctcatgcatcaccatcaatgaagcaaaatcgagcagacacaacgcccaggtctcatactttcgagcctggataccacagttcatctgggtcccagtacgatgaaggttatgaaggggatagaagaactggagagaggcaactccgaagcatgaggcgatctgggccactagattacactggaaccaggaaagtgaagtttgtggagggttcaagttctggaagccatggggctggctcaggctcactacagagatttgctgtgtcaagatctggccccctatcctacaaataagatcatgttaacaagtaacaacagcattctactggcaatcatagtttgccagcatcagtatctagcaatttgtatttgagtggactccagtcaatgctcccattcgtctttgtagagcatctgagcatatatgttatttagctcctttgcgtgaagtaatatgtattctagctgtatttacgtacctagtgctcttgtaagtctatatgtatggtacctattgctcttgtaagtaaaccctcctctgttgctacatgaattagcaatgtgctagttgtatgtctgttaatgtaaatggattgtat

SEQ ID NO: 1243 - DNA, 750 bp, Oryza sativa
  ref <308>: DATABASE ACCESSION NUMBER: AK059292
  ref <309>: DATABASE ENTRY DATE: 2001-12-06
gtccgctttgcttcgcctgagccctgagccgccgcctcccgtactcccttgcgagctggggttttagcggcggcggcgagaggagaggaggaggaggagaggggaagatgagccggagcctggggatcccggtgaagctgctgcacgaggcggcggggcacgtggtgacggtggagctcaagaccggcgaggtgtaccgcggcgccatggtggagtgcgaggacaactggaactgccagctcgacaacatcaccttcaccgccaaggatggcaaggtgtcgcagctggagcacgtcttcatcagaggaagcagagtgagatttatgattataccggatatgctcaagaacgcacccatgttcaagcgcctggaagcaaggattaggggcaaaggatcagctattggagtcgggcgtggccgtgcggttgcaatgcgtgcccgggctgctgctggtcgtggtggtggtcctgttggacggggtggtgcacctccggtgaggagatagattgtctgtcatctattatctgcctgaggaagttgatgccttaatttgaaaacattgcttgagaattaaacagccagtgtgcatcttgtctgatcaatccgcttaaaggaggatgcatgcatgttggtggcgtcgatttcatgtatttttaatgttagatatggtaggttgagtatgatatttcaaaggtagaaacattgtgttcgttaacctgatttgaatgacaagaccagtttcccctgtc

SEQ ID NO: 1244 - DNA, 1926 bp, Oryza sativa
  ref <308>: DATABASE ACCESSION NUMBER: AK059293
  ref <309>: DATABASE ENTRY DATE: 2001-12-06
aagcaaagaaaaggccttgccttgctgcatctgtatctgctactaccactgctagtgccactctccaacactccactgaatcattcatcttttgaagatttttttttttacctctcttcctcctgtgctctcctctcaatgcaaaagagcacactcgactcttgccttctcaccacccaatctctcttgctctaagctctagttcttcatctctctttctctatcactttcttgaagacaatgcaggctctggtgagctccaacaggaggccattggccattgtggttgcagcaccagtactccagatgctactaattgctgcattgctccatctgggttcttgcaatggaggagacaggatcgagaggctaccagggcagcctgaggtgagctttgggcagtatgctggctacgttggtgtggatgacaagggccggagggctctcttctactactttgtggaggctgagcttgatcctgccacaaagccccttgtgctctggctcaatggaggtcctggctgttcttcacttggtgttggagctttctcagagaatggcccattcaggccaagtgggcaggtgctagtgaagaatgagtacagttggaacaaagaggccaatgtgatctacctggagacaccagctggtgttggttactcctactctgctgatgctgcatactaccagggtgtggatgataagatgacagcaatggacaatatggtgttcttgcaaaggtggcttgaaaagttcccacagtacaaaggcagagaactgtacatttctggagaaagctatgcagggcattacattccacaacttgctgatgtcatggtggaatttaacaagaagaacaagatcttcaacctcaaagggattgctctgggcaatcctgttcttgaattcaccactgacttcaactcaagggcagagtacttctggtcccatgggctgatttcagactcaacatacagaattttcacctcagtttgcaactattctcgctatgtcaccgagtactatggcgggtcgcttaccccgctttgcgcaagggtgatgaaccaagtgacaagggagactagccgattcgtcgacaaatacgacgtcacattggatgtctgcctgtcatcagtcctctctcagtccaagatcctcactcctcatcaacaagtaggacagcgaattgatgtttgcgtcgaggacgagacggtgaactacctgaaccggaaggatgtgcaggaagcactccatgcgaagctcatcggtgtaaagaattgggcagtttgcagcagtgttcttgagtatgagctactcaatttgcagattccaaccattaacatagtgggatcacttgtaaagtctggcatccgggtgctagtttacagcggtgatcaagactcggtgatcccgctaaccgggagcaggactcttgtgcagaacttggcgcgcgatttgggcctcaagacgtcggtcccgtaccgggtttggtttgaagggcagcaggttggtggatggactcaggtttatggagacatgctgtcctttgccaccatcagaggggcctcccacgaggcgccgttctcgcagcccgagcggtctctcgtgctcttcagggcattccttcagggaaggcctctgccagaaaccttctcatgatagaagagaagaagctgtttttgaaattgcaatgcaatggaagtgcattgctgggagaattgattagagttcttctgtttcatgcttctgcaaggggttaatttggttagctctgtaagaaagttgtttgctgcatttgcctcctgctgctagtataaagccgcgataagggcaatcatttgttcgatctctcaaggtatttgttcccctctttttctcttctgtattagttccaaggcttggcaattgtctaaagtaagttgaaag

SEQ ID NO: 1245 - DNA, 901 bp, Oryza sativa
  ref <308>: DATABASE ACCESSION NUMBER: AK059294
  ref <309>: DATABASE ENTRY DATE: 2001-12-06
gcgcgtaggggaaagcggcggcggcggtggcgacgcagacgcgactgggagtcgacggcgcgacagcgacgcggagctctccccggcggcggtgctctctcctccggcgaccgccccctccgctggccaccttctcaccggtgactaggaaacaagcttttctctgttggatatacctcttctcttgttggaatggaggccaaggttttcaggtttctgaagcttgtcggagttggcttcaaagcaaggacagagcgtgaaggccgtgagttgtttctgaaacttggttacagccatgaggtgcagttcactgctccacctgctgttcgtgtcttctgcttcaaacccaacttaatttgctgtactggtatcgacaagaatcgggtgcacaactttgcgggcgctgttcggaactgtaagcctccagaggtatacaaagggaaaggcatattgtacattgatgaagttatcaagctgaagccagggaagaagcaaaagaagtaatgtagggatgagcctccatattttactttcagtctgctaagatgctgtagcacatttttagtggcgcatatgttcttgtggttttcttgttctggtctgctggatcatctttgccacagtgccatgctggaactggaagacccaataattctcttatgcagtgtatgtgaaattgtgaatcatatgttgagcctgtatgacatacagaccagagggacaaatcaccttccaaattttttttggactggcaacgtgtaaaactttcgatgggtttgctgttctttccactgttctgctctgctatcctagacattgagctcagtgtaaaactggatctgtgcattccaggagtaatgtttttttgtactgagctaaaatctgcagttttatatgcatc

SEQ ID NO: 1246 - DNA, 459 bp, Oryza sativa
  ref <308>: DATABASE ACCESSION NUMBER: AK059295
  ref <309>: DATABASE ENTRY DATE: 2001-12-06
atgcccccgccgctgcttctctccatccgcgccacctcggcacgcctccctccacatctcggtggagcttaagcacgtcgccgcttccagacgacaactgctcctaccggatctaacaatgcctagctcggaggtgccagagcttgccgccgcaagcttggtggttggatgcctggatccagggtggaccagcgaggagaaaggggttgccccatccgcaccaccctagttcgagaagattttggaggtgtcagcggagctgttggcggccggcagtcggatgacgtcggagctggtcagcgctcagctgcttcctggtggcgccgagcaggccttgtccgtgcagcttggtgacctcagccacctcgcctactcccatgccaaccaagccctcttcagcccaatggcccaacatactaaatcatgctttcactctgaataaagctttaattgtggctg

SEQ ID NO: 1247 - DNA, 1440 bp, Oryza sativa
  ref <308>: DATABASE ACCESSION NUMBER: AK059296
  ref <309>: DATABASE ENTRY DATE: 2001-12-06
acaccaccccatcttctactgctcgctccccgccatgatgctgctcgcccgcgccgtcctccgctcccgcctccgctgcccgccgctgtctgctgcggcggcgtcgacggcggcgttctcgtcggccccgtcgccggcggcggcggaggcggagcgcgcggtacgggacgggcccaggaacgactggagccggcccgagatccaggccgtctacgactcccctctcctcgacctcctcttccacggggctcaagtccatagaagtgtccataaattcagagaagtgcaacagtgcactcttctttcaataaagacaggtgggtgcagcgaagattgttcatactgcccccagtcctcaagatacagtacaggattgaaggcacaaaaattaatgaataaagatgctgtcttagaagcagcaaaaaaaggcaaaggaggctgggagcacccgcttttgcatgggagcagcatggagagaaaccattgggaggaaaacaaattttaatcagatccttgaatatgtcaaggacattagaggtatgggcatggaggtctgttgcactcttggcatgctagagaagcaacaagctgaagaactcaagaaggctgggcttacagcatataatcataatttagatacatcaagagaatattaccccaacattatttccacaagatcatatgacgatagactgcagactcttgagcatgtccgtgaagctggaataagcatatgctcaggtggaattattggtcttggagaggcagaggaggaccgtgtaggattgttgcatacactggctactttgcctgcacacccagagagtgttcctattaatgcattggttgctgtcaaaggcacgccccttcaagatcagaagcctgtagagatctgggaaatgatccgcatgattgccacagctcgaattgtgatgccgaaggcaatggtgaggctttcagcaggacgagtacgtttctccatgccagagcaagcgctctgcttcctagctggggccaactccatcttcgctggtgagaaacttctaacaaccacaaacaacgactttgatgcagaccaggcgatgttcaagatccttggtctgattcccaaggctccaagctttggtgatgaagcaccagctgcagacactgagagatgtgaggaagctgcatcaatgtagaacaccaatagaaactcttgagaacacgttcggtgcaaaagtagcaccattatttccggttagcgcattgtattgtagagattacaatatcttgtagtaagttagaaaaagatcgacccaaataaatagggaattttctgtatcattgttcttgttgtgccattttgtgacatttcaatcagcttcaatctcagttttcctttttcctctttgatgctacactgaagtactgatcattatcaaatgaacctacattgtg

SEQ ID NO: 1248 - DNA, 1029 bp, Oryza sativa
  ref <308>: DATABASE ACCESSION NUMBER: AK059297
  ref <309>: DATABASE ENTRY DATE: 2001-12-06
aatcccccctcctcccgctcccgcaccaaagagttgcgccgccttatcctttcgccgtcgccgccggaggagaaatggcccggtcacctgctgctcctccactccttgaaggtgaagaactcatggacattccggtagagaagagagcaaggaaatcgatggtcgtagtccgtgccgccaatggtgaatattgcagcggatgcgtgttgaaatcaaagggaaagtacacttacgtgttgacccaatcgtcatttgcatcaggcagagaggataccctcaagatctgtttctttgatcagatcgaacgggaagcctcggcttttgcttctggggatacgttctgtctcttaggacgaaaaggcacacagactgcagaccaatcaagaagatgcgtggtcaggttatgcccgaacctattgtcgtttttgccccttcttcagcaacctctgcataccacatcccaggctttgtcatatcagaatcaaccgctgcactcgaccttcgacgcaaccatatcaatggttctgagtgctacttcctgggaacgtgccactatgccgagaagggtttcaatgggcattgcagattagtgggttctccggtcttcagcctaaaaggaaaagttatgggactaatcgctgggacttgtgtgaaagagctcaatttgtaccttggtggctatgagatcaaggtggcactgttaacatctcatatggatggtatgctgaatgcgatgctgccgaagtcagatgcagccaagaagaagattgcttcaaggaagaagggagggaagttcccataggcagcaacgcccatcctaagaaggagcaaagcaaatgttacaagttcccttttttgtggcttgagaaacagcaggccagcagcaacattttggtgattttcaccgcagattagtagcaatcataggctcaagtaagatttttggtgacctttactgctgattagcaccattcatagactcaagtaagttcttttttggtggtttacttgagcatcggtatttttgag

SEQ ID NO: 1249 - DNA, 1139 bp, Oryza sativa
  ref <308>: DATABASE ACCESSION NUMBER: AK059298
  ref <309>: DATABASE ENTRY DATE: 2001-12-06
aaacttgtcacatataaatggccaacatggttgcacaaacagaaagagaagcagcgaattatatgggcatacaagatcttgtttctagatgtcatatttccactttcactgaggaaggttatttttgttgacgcagatcaaattgtgagagcagacatgggagaactgtatgacatgaatctgaagggtcgtccccttgcgtatactccattctgcgataacaacaaggagatggatggctatcgattttggaagcaaggtttctggaaagatcatctgcgaggaagaccataccacatcagtgctctttatgttgttgatttggccaaatttcggcaaactgcttctggagatactctacgggtcttctatgaaacactcagcaaagaccccaatagtctctcaaatcttgatcaggatctcccaaattatgctcagcatactgtgcccatattctctctccctcaagaatggctatggtgtgaatcttggtgtggaaatgccacaaaggcaagagcaaaaaccattgatctttgcaacaacccaatgacaaaggagccaaagcttcagggtgccaaaagaattgttccagagtgggttgatcttgacagtgaagcaaggcagttcacagcacgaatcttgggagataatccggagtcaccaggaactacttccccgccatctgatacaccaaagtcagatgataaaggcgcaaaacatgatgagctatgatacaccagccgctttggaggcaaggattcttcacactgactgtagttctctggtgtcccagcagttaaaatcatattgctggttcagggggcaatgaagtgcagataccataatgtgcgaatcaatcgatgatcaataatcaatggtggtgccattttgcattttgtagggctaactgccgaaaataggttcacgaaggggtctagttggtagtttttcaagaacttgtatacatagaacactgtaatcccaattcgtgtattaagatgttcttcctgggacgctgtaaagtttattggcaactgccagttgaaagctagtattagcaatctggcagcccgagaattttgtaaaagttggcacccaacaaagctcgagaatgtaagatactttggtgttggtattcc

SEQ ID NO: 1250 - DNA, 752 bp, Oryza sativa
  ref <308>: DATABASE ACCESSION NUMBER: AK059299
  ref <309>: DATABASE ENTRY DATE: 2001-12-06
aaaagcttagctctgtgaactgtgattctactccacttcgaagtccaaagcctctgaggcagaacgccgccatggcggtggtgaggcagctgctggtccacaggctctcctgcagtggcctgcctgcttcccgctgcaagaccagttgctggagcagcggcgagaggctccctggcttgaagtcaagggtaaggttgttggccgtggccatcaagccaccgcgcgccgccgcggggaaggacgagattgtgcgggcggacgacgacgacgacggcgtcagcctcggcacggtgaagctgcccgccaacatcgacatagctcggttcgagacgctgctcttccagtgggggaacagcctctgccaaggcgccaccctgccgctcccggtgcccctgagggtggacaaggtggagggcggtgtccggctaggattcatggcggtggacgacggcgtgacgcaggtgctggtctacatcgactgcctggtgtcgccggcgacggccgcctctgggccggtattccgagcgatcaggaacggtcctatgaaggaccaggagccacctggggagcccaggatcatgagaagcctactcgaggcgctccaaaaatgtatccagtatgcacaagtttgagtgtccaagagaggcgatgcaagcccattatctgaagaaacttggaattctaaattggagatgtaaattccctgagggaaatacacgatacagtaccaaattaaagtttattttcccttt

SEQ ID NO: 1251 - DNA, 721 bp, Oryza sativa
  ref <308>: DATABASE ACCESSION NUMBER: AK059300
  ref <309>: DATABASE ENTRY DATE: 2001-12-06
aaaaaagaaaaaaaatctcatcttccaatcccaacctggtctggtggaattcctgaatccgggtcgatcgagagctcacgatgtcggccatggagaccgacatcaacgcgccgccgccccccgcccccgcccccgccggcgccggcgagggatcctcctctgccgccggcccctcctcccgcaagcccaacaagcgcttcgagatcaagaagtggaacgccgtcgcgctctgggcatgggatatcgtcgtcgacaactgcgccatctgccgcaaccacatcatggatctatgcatcgagtgccaggcgaaccaggccagcgccaccagtgaggagtgcactgtcgcttggggtgtctgtaatcatgcttttcacttccattgcatcagcaggtggctcaagactcgccaagtgtgcccgttagataacagtgaatgggaatttcagaaatatgggcactagacaccacctgctgtctgcgcttgtttgttgccacggctgcgctacaaacacaggccgtatcatctgccgaacagctccatcgttagcttcttttgatgccttacatctatcgctggacgtttatcgtgcgtacttgtcccatacagggattgtgtttggatgatttgtagagagggtactgtatggcataagatccttcatattaatgttctgtgggtcacatatcaacttgctattattgtattcagcggttctctctc

SEQ ID NO: 1252 - DNA, 1394 bp, Oryza sativa
  ref <308>: DATABASE ACCESSION NUMBER: AK104065
  ref <309>: DATABASE ENTRY DATE: 2002-08-28
acaagccacctcgatcgatctccattgaaatcaaggcaccttaataatttctagtaccatattaagctaagaacagtagtgtacatggcttctcgtagaagtgcagcagctagtccggccatggcagcagcagctgcggtagtagctgtatctgtatacttgctggtgtgcagtgctccggcggcggcgacggcggcggcggtggcgaagaagccgtcgtacccgccggtggcgaaggggctatcgttcgaccactacaagaagagttgcccgcaggcggaggccatcgtgttcagcttcctgcgcgacgccatcggcaaggacgtcggcctcgccgcggcgctgatccggctccacttccacgactgcttcgtccagggctgcgacgcctccatcctcctcaccaagacgcccggcgggcccgacggcgagcagcaggcgatacccaacgagtcgctgcggccggcggcgttcaaggccgtcaacgacatccgcgccctgctcgacagggcgtgcggccgcgtcgtctcctgctccgacatcgtcaccctcgccgcccgcgattccgtcaaactggccggtgggccgtcgtacaaggtgccgctcggccgccgtgacggcctcacatcggcgacgccgtcacaggtgctgggcgcgctcccgccgccgacctcccacgtccccgagctcatcgccgcgctggccaagctcaacctcgacgccgccgacctcatcgcgctctccggcgcccacaccgtcggcatcgcccactgcacctccttcaccgggcggctgtacccgaagcaggacggcaccatggacaagtggttcgccggccagctcaagctgacgtgcccgaagaacgacacggccaacaccaccgtcaacgacatccggacgcccaacgccttcgacaacaagtactacgtcgacctgcaaaaccgccagggcctcttcacctccgaccaggacctcttcgtcaacgccaccaccaggccgctcgtcgccgagttcgccgtcgaccagtcggcgttcttccaccagttcgtcttctccgtcgtcaagatgggccagatccaggtgctcaccggctcgcagggacagatccgggcaaactgctccgtccgcaaccccggcgccgcctccgccgacgaggagctcccgtggtccgccgccgtggagaccgtcgtcgaggcggccgagagcatcgtgctctagacacacaattgtgcgcgccatggacgcgtacgtcagtacgtgtaccgtacgttgaatgtggaaagagacgacgacgactgtggatatatgttggttactgccatgtcgaataaatgcatgacgtcatgacaacctcctttatgatcaatatatatggatgtggattttcatcttgc

SEQ ID NO: 1253 - DNA, 1828 bp, Oryza sativa
  ref <308>: DATABASE ACCESSION NUMBER: AK059301
  ref <309>: DATABASE ENTRY DATE: 2001-12-06
cctctccctctctagtctctctctcctcccccttctcgaagcacgctgccgccgcctcctctccccgcgccgcgcgcctcgccgagttagggttccggcgagctcggggcctttctccggcgacggcgccctcctccggcccgagggctcgcttcgcggtgagatcaaatagcagcgatggaaagggacacaagctctagtgatgtttctgcttctcatgtaggacgtgccaggcagcgaagacgtcctactgaggctactgcagatgggaatagaaccaatggaccagctttgcttgtcaatgatcagaataagtacaagtcaatgcttatccgtacatattctacagtatggatgattggaggctttgtgttgatagtttatatgggtcacctctatatctgggccatggtggttgttattcaaatattcatggccaaagagctttttaacctactcagaaaatccagtgaagaaaaacaactaccaggtttcaggctactgaattggcacttctttttcacagcaatgttgtttacttatgggcgttttcttagtcgacagcttgttaacacagtaacttcagatcacttattgtataaggttgtcagtggtctcataaagtatcagatgttcatttgctattttctttacattgctggatttgtctggtttattttgactctgaagaaaaagacatacaagtatcagttcaaacaatatgcctggacgcacatgatccttttaacggtttttgcacaatcttcttttaccgtggcaaatatatttgaagggatgttctggtttctgttgcctgcttctctcattgtgattaacgacattgctgcctatctatttgggttctttcttgggagaacacctctgatcaagttatctccaaagaaaacttgggaaggttttattggtgcatctgtgacaactatcatatctgcttttgtgttagcaaatgtaatgggccgtttccaatggttgacatgcccaagaaaagacctgtcgacagggtggcttcgttgtgaccctggtcctatgtttaagccagaacattattctttgggagaatgggtgccaaaggggttcccttggaaggaagttgttcttttgcctgtgcagtggcatgctttagcactaggtttgtttgcatcaataatagcaccttttggaggtttctttgcaagtggcttcaagagggcctttaaaataaaggattttggagacagcatacctgggcatggtgggattactgaccgaatggattgtcagatggttatggcagtttttgcatacatatatcaccaatcattcatatcgccccaaaactactctgttgagctaatcttggaacagattctaagaaatctaacctttgaggagcagaaattcttatatcagcagcttggggaaatctaccgtgaaaggcaattaatgcagagctgagaactagtttgcttatgatgaagcatacagtatgttgtttttgagcgctcggttccatgtatagcagcatagcttctctgtacggcgatagagcaacgtccctttccaaaccattgtacagaatagagtgtggatggggtttagcgatttaggtacttgattcgctctccacttacgttgccttctctggcgatcggtttatccttttacgctaattctcatcatttctgcccttgtaacaagggaaccggaaaaggttgtattcgtgtatatcacttcgtgtgttggcctcacatcaaatatgtgcaagatgcacaagataacacaggaaatgaggaaaatttattccccttttaaaagatattttcgtggt

SEQ ID NO: 1254 - DNA, 1265 bp, Oryza sativa
  ref <308>: DATABASE ACCESSION NUMBER: AK059302
  ref <309>: DATABASE ENTRY DATE: 2001-12-06
aaaaacacccatcaccctcccccgacgaagcaagagaagcttccactagaaaatggcccaatcccgtcgcccccttcccctcctccgctcctcccaaacccaaatccgccaaatttgactcgcgcgaggggcccgattcgtggggcgcgcttccccctgctgctgctgctgctgctgctgggattcggacgagctggtcgcgttcgcgttcgtgtgatctaggggggggatatggggtacttgagctccgtgatccccacggatggatcgccggtcagcggcggcggcctcagccagaatggtcatggtggtgctaaagtagctgagtatgttaaacagaatctcttcagtcatcttctaaggcatccaaagttcatcagtgacaccaaagtggcaatagatgatgcttataaaagtaccgacagtgaattcttagaatctgacagcagtcaaaaccagtgtggatcaactgcatcaaccgctgtccttgttggtgaccgtctctttgttgcaaacgttggagactctagggctatcatatgcagggggggaaatgctatagctgtttcaaaagatcacaagcctgatcagacagatgagcgacaacgtatcgaagatgctggaggttttgtaatgtgggcaggaacatggcgtgttggtggtgtgcttgctgtttctcgcgcttttggtgacaaactcttaaagcagtatgtagttgtggatcctgagattcgggaggaagttattgatcactctctcgagttcctcattcttgcaagtgatgggctgtgggatgtagtaaccaatgaggaggctgtcgacatgaccagatcgattcatgacccagaagaagctgcaaagaagctcttgcaagaggcctacaagagggagagcagtgacaacataacttgtgttgtcgtgcgcttcttgcatgggcaagggagtagtggatatgcttaaaaaacaactggtaaaagttacccaatgtagttgtgtaccaccatgtatacatgtcttaattcaaatctcacggggttaaatggagagaaactcggagtaggatacgtgtattctgatggctgaagtaagctgaagggtgagtatgcctcaggttaacaataagtttgctggtgaccgatcaccatagttcgttgcttttgaccctggatttgatggtcgtgttgtattgctacgggagactggatcgtttccctaggttcaatgtacgtggatattactcctctatttatttgtttgtatcctcc

SEQ ID NO: 1255 - DNA, 1054 bp, Oryza sativa
  ref <308>: DATABASE ACCESSION NUMBER: AK059303
  ref <309>: DATABASE ENTRY DATE: 2001-12-06
actgccatcgagaggtcgtcgtcgtcgtcgtcgatcacctcgtcgtcgacgcaccaccaaagcaaaggcaaaccaaaactcctctcctcctcctcgtcttcgccgcctgcgcgcgtcgccgtcgcgtccagccggggcggagggagggggggttcttgaggatggtggaggtgggaggaggagcggcggaggcggcggcggggaggaggtggcggctggcggacgagaggtgcgacctgcgcgcggcggagacggagtacgtgaggcggttccaccgccacgagccccgcgaccaccagtgctcctccgccgtcgccaagcacatcaaggcccccgtccacctggtttggtctctggtgaggcgttttgatcagccacagcttttcaagccatttgtgagccggtgtgagatgaaagggaacattgagattggcagtgtaagggaggttaatgttaagtctggcctgcctgccacaagaagcactgagaggctggagctgttagatgacaatgagcacatactcagtgtcaggttcgtgggaggtgatcataggctcaagaattactcctccatcctgaccgtccacccggaggtgatcgacggccggcccgggacgctggtgatcgagtcgttcgtcgtcgacgtcccggaggggaacaccaaggatgagacatgctacttcgtggaggccctgctgaaatgcaacctgaaatctcttgcagaggtttctgaacgcctggttgtcaaggaccaaaccgagcccctcgaccggtgattgttgccaagattccaagagctattttgtgttgcaaatgcttaattagattgtgcagagttgctattctccaatggagcccttaggttctttttcttcttgttgttgttgaatggttcatgagagacttgtgagagagtgctgctgctactgctgtgctatgttcaaaccaaaagagaagaaaaaaaaatattgtgcctcctctttgagcctctgttgctgttctttaccaccctagtatgtcacaagggcctaaaaaaaatattgtgtgtttcgtt

SEQ ID NO: 1256 - DNA, 1631 bp, Oryza sativa
  ref <308>: DATABASE ACCESSION NUMBER: AK059304
  ref <309>: DATABASE ENTRY DATE: 2001-12-06
agagagagagagagagaggggaagcgtcaacctcccgaatccatcgccgccgccgccgccgccggcgatgtctccgccggccgacaccgccgcgctcgcctccacgtccggcgccccgctcgcgcccctcgtcgccgcccagctcaacttcgtcctctcccaagccaacctccccatcagggtggggcagatctggtccggatgccgcgacggccgctacgccgatcgcttcacgctcgccatccccttctgcctcgactacgtctactgggacttcctgtacaatgcgctgtcgccgaaggtggcgccggatgtggtgttcggcccggacgacgaggggtttcagccgctagtcgatttcgatgagaccgggagtggggagaagagctgcttggcaaattgggattgccgggacacctcggccctcctctctctcatcaaagagctccgtgaattttatattgaataccaaaagaagcgggcagccgaggttgatgacgcaagactgaaatttgaaataagcacagttctgtctaaggaggggattgaagtctgcacggtatcgtccaatggtagaccagatgaggtgaaatttgctgtcccacttctggatctggaccttgccaaactggttcctggatgtccttggaaacttcctcaaaagatccatttgcaggctgtttttccaattagcagaagttactcctctgttccttctgcaccacgactcaaattagtctcaaccccagatttgaagtcatttttctcagttgatgatgttaaactccctccatggttagatggaatgtgcatggctgagtatcttcctaacttggaagaaaatcttaaaatccaggttgtggaagcatcagcttcaattggttctagaagacgtttcattgaagcattggctcctacttttggaaggccattagaggctgatccgattttttgcagaaaagctacgattctttccatctcagggattttcacttttctggtccactttgtcattcccctccaattccctaagcatcaacctgtgctgacattagagagttctcagcacttcaatgcccaggggttacctatcatgtcagctccagtaaatgactatccctggagccctagatgggatccaacagaaatggttgaacgcatctatgactttttggttgacgagtgccaaactttcaagaagttttgcagcgattctatccctcaacagaagtagctgataaggaagcatctctgttactgccggcttgctcggtctgctcgcaagttgcaacctgtattccccaacctggcaagtaaatttgtaagctcaagaagaagcctagtcaggcagtagaatccataagatttgggtaggtgcgcttctgtctgacaagtaaattgtgtacactagagcaaagctgggcatatgttttgttggttaaccccattgctgctggtcctagactcctaccttgtgattgctgggataaatggcaacccaattgctcctgccatgtacatacagataccgcacgtttaccaccggccgtttctttcactgtaaagtttgatgcaagtgacctctggctgctatggtttactgtacttaatgatttactagtactacattc

SEQ ID NO: 1257 - DNA, 1322 bp, Oryza sativa
  ref <308>: DATABASE ACCESSION NUMBER: AK059305
  ref <309>: DATABASE ENTRY DATE: 2001-12-06
acacaccattattactactcctcttcacccactccacgccatctctctcgcgctctctccggagccaaggcgaggaggcggcggcggcggcggcggcggcggtgcgagacgagatcgtcgagtccggcaccccacccccgtccttcgcttcacacgaaaaggaagggaggaagatgagctccgagtctgaggcggcgcccgggaccgggaagctggtgtgcgtcaccggcgcgtcggggtacatcgcgtcgtggctcgtcaggctgctcctcgcccgcggctacacggtccgcgccaccatccgggacacctctgacccaaagaaaacactacacctgcgtgccctggatggagccaacgaaagactccatttgttcgaagcaaatctgctggaagagggctctttcgatgctgcggtcaatggttgtgattgtgttttccatacggcttctcccttttaccacaatgttaaagatcccaaggctgagttacttgaccctgcagtcaaaggaacccttaatgttctaggctcctgcaagaaagcttccattagaagagttatcgtgacatcatccatggctgctgttgcctacaatgggaaaccaagaactcctgatgtagttgttgatgagacatggttttcagttccagagatttgtgaaaagcatcagcaatggtatgttctgtccaagaccctagcagaggaggctgcttggaagttttcaaaagataatggatttgaaatagttacggtgaacccagcaatggtcattggtcccctgctgcagccttcactgaatactagtgctgaagcaattctgaagctaatcaatggatcatcctcgacatatcctaatttcagctttggctggataaacgttaaggatgttgccctggcacatatccttgcatatgaagttccttcagcaaatggaagatattgcatggttgaaagagttgcgcactactcagagctcgtccaaatcattcgtgagatgtatcccaatattcctctgccagacaagtgtgcagatgacaagccatcagtgccaatctaccaggtatcaaaggaaaagataaaaagcttgggcctggaactgactcccctgcacacgagcatcaaggagaccatcgagagcttgaaagagaaaggatttgttacttttgattcaagcaacctgtaaaacaacagagctccatacacatgaacttgcttgtcatagctagtactctagcggtaactttgcatgaactactacagatgtggtctgtattctgtactacgatctgaaataaagtggaggcaaattgcagtgttgatt

SEQ ID NO: 1258 - DNA, 1800 bp, Oryza sativa
  ref <308>: DATABASE ACCESSION NUMBER: AK059306
  ref <309>: DATABASE ENTRY DATE: 2001-12-06
atcctccgccgcacgcgcacgcacacgcacacctacgcatcgccgcctcctcctcttcctcccactccgcggaagcgcgtaaccaccacctcgttcgttcttatctccaaagccgaagacccaccgagccgatcccgacgcttcccccatggctcctccgctcctcccccgcggcgcggccctcctcctcctcctccgctccgccgcccgacggccggcggcggcgtcctcccgcggcttcctgtcgagcgctgcggcgggaggccgcgagggggcgctggccgccgccgcggtggcggtggtggggtccggcctgggtctgtggctggtgcccccctcgctcgcggactccggcgaggcggtggccgacgccccggcggtacagatctcggtaggctccggctccggcgcggtaggcgccgtggaggagcgaggccggaagaggaggttcctcctcggagactcgttccgcagaagggtgttcttcaattacgagaaacggatacggctgctcagccctcctgaaaagatctttgaatatttcgcgtctgtgcggaacccggaaggggaagtattcatgttgcctgctgacttgatgagagcagtagttcctgttttccctccatcggagtcgaacatagttcgggagggaagattaaggggggaacgcaatcctggagagttgcactgtgctccatcggagttcttcatgctgtttgacacaaacggtgataggctcatctcctttgccgagtacatcttttttgtgacattgctcagcatccctgagtcaagtttcagtgcggccttcgaaatgtttgacgttgaccacagcggggagatagacaaagaagagttcaagaaagtaatggcactgatgcgatcctataacagacaaggagccaaccatagagatggcttacgtactggactaaaagttggtcagcctgtggaaaatggtggagtggttgaatacttctttggtaatgatgggaacgaacctctacactatgacaagtttacaaattttttgaaaggattgcatgacgagatcattcgtctggaattcagtcactatgacgtcaagtcatctaatactatcccagcaaaggatttcgcattatccatggttgcttctgctgacatgaatcacatcaacaagctacttgatagagttgataatttaggcaatgatcctgatctcaaaggagtgcgcatcaccttcgaggagtttaaatcctttgctgatttgcgacgaagattggagccactggcgatggctatctttacttatgggaaagtaaatgggctgttgacaaagcaggatctcaagcgtgcagcgcaccatgtttgtggtgttgacttaactgacagagtagttgacatcattttccatgtgtttgatacaaatcatgatgggaacttgagctcggaggaatttgtgagagcattacaaagacgagaaactgatgttcgtcagccagcgacaccaggctctatggggctgttgtcttactggctaaacttcaacaagtgttcttcgcttacacagatgctgctcaagtagattgttttgatccttgctagattcttcttggttggatttccgtcacggagatgccgaagcgattttgctgtaaatatcgtgtgggttgtcaaagggtgccctgtcacatagcagctgtaaatattttatagcgcctttcttgcaggggtagattaatcattcttgtaaattaaggcctatgcaaaatgtaactgatactctgataagacttttgaaaggttaaaaccaacttt

SEQ ID NO: 1259 - DNA, 1235 bp, Oryza sativa
  ref <308>: DATABASE ACCESSION NUMBER: AK059307
  ref <309>: DATABASE ENTRY DATE: 2001-12-06
tccaagccatcagagcgcgtcacgcagctgtccaccgtcccggctacatagctcgtgcaggcaagcctggtcagctcgctgctccacctccaccacgtggcttgccgtcgcggcgctaccgccggtgcagggctgatcacccgtgctgccacgacgcgcgccatgggccgtcatgccatcacggttgctgcccccctcaccatggcaagcaagcgtgcaccagctgccggggacaacattgctgcaggccaagaacgcaagaatctcctgcgccgcggcggccggcggcggcggcggcaaaggaggtcgtcaagcggcgggcgccacccaggaaccattgccggccggtgctcaagggcgcgccgttcatcatctgctccagctgcttcaagctggtccaggtgcccgccgacttcgccgtctcgaccaagacggtgcgcaagctgcgttgcggctcgtgctccgccgtcctcagctactcctaccgggaccccgacaggaagaagcacggcgatcagtacagcgccgacggctcaccggcggcgccgcgcggccacgggcggcgaggcgacaagttcgcgttcctggacgacttcggccacgtcgacgtgagctactccacggaggacgagcagccgctgcacgtgtcgaggaactcgtcgttcaacaccgtcgacgagatggcggcggcggcgacgcagcagcatggctccagcctgcaccggctgatggggtacggctcggcgagcgacctgctgttccggcagcactcgcctgacctgtacgagagcttctccgagaggacgacgccggaggccgccgcgctgtacgaccggaaagggaaaggcgtctgcgtcgacctcgacgacgacggcggcgacgatgactcagacgaggattgcagcggcgcgctgaagaggtcgaggctgagagggtccggttggccattgccggggatactcaacagcaaggggacgactggaatgggagcaatcaggatcaagtcatagtagtgtagagaactagagatagattcaggtgctggaattttgacagaattttcagtcgttggaattcttataggtagagtgaatttcattcggattcatttaggtaggtttcatattggtggatcaacaggttgtttgttttgttcattttcgggtgtaatggtgctgcatctaaatgtaaatacaacactttacgatcccggtgaaaaggaactttcttttggt

SEQ ID NO: 1260 - DNA, 435 bp, Oryza sativa
  ref <308>: DATABASE ACCESSION NUMBER: AK059308
  ref <309>: DATABASE ENTRY DATE: 2001-12-06
atccccatcctcatcctcctttgcaccttcgcgccgcctcttgaccgcatcagcgtgcgcctctcgcctccgcctccatcgccgcccgtgcgccgcctccaaccagcctacctccgcggctccgcctccatcgccatgcgccgactccagccgggccgcctccacctccagccggcgcgcctccacttccatcgccgtatgccgcctccagccgacccgcctccgtctccatcgccgtgcgccgcatccagccagccggctgcatcccggcctcggtggtggtcctggtggaagatgacagccatggccatgagaagctgatttcttttctaaatcgtgttcgatttgcttcttttcttgtctaaatcgtgcttgatttgatggtgcaccaatttgtagtgtgtcatctgcgatctaattgtttgattcatcgat

SEQ ID NO: 1261 - DNA, 1121 bp, Oryza sativa
  ref <308>: DATABASE ACCESSION NUMBER: AK059309
  ref <309>: DATABASE ENTRY DATE: 2001-12-06
ttgcaccccctcgcgcctccaccacacactcccacccaggtaaggagagggaggaggaagggaacctcgaaggcggcggcggcggcggcggagatggtttccctcaagctgcagaagcggctcgccgccagcgtgctcaagtgcggcaagggcaaggtctggctcgaccccaatgaggtcaacgagatctccatggccaactcccgtcagaacatccgtaagttggtcaaggatggattcatcatcaagaagccccagaagattcactccaggtcccgagcacggagagcccatgaggctaagcagaagggacgtcactctggctatggtaagcgtaggggtacaagggaggctaggctccccaccaagatcctgtggatgaggaggatgcgtgtgctcaggcgtttgctgcgcaagtatcgtgaggccaagaagattgacaagcacatgtatcatgacatgtacatgaaggtcaagggtaacatgttcaagaacaagcgtgttcttatggaaagtatccacaagtctaaggctgagaaggcaagagagaagacactctctgaccagtttgaggctaagcgtgccaagagcaaggcaagccgtgagaggaagattgccaggagggaggagaggttggctcagggcccaagagagccagcagctcctgcagcggcagctcctgctcaaactgcagcggcacctaagaaggcaaagaagtgaacacctggcttgaagtgtggtcgtcttagtgaaaccagtggaggtgttagctgaattttgaaatacgaaccgtttggcctagtatttaagtatcttccaaagtctgataccttgaacattatgtttcatgctgctggatgtagtagatgcttatgcaaagttgttttttcaaaggttgatggtgatcttaaccttataatttgtttgcttcaatttcttcatgcctgatcagaaattaacgtctttaccatccggtagtgtaccaatgctaagtgattgcattagtggccgtaaaattccggacagacgttgcttggcatggggtgtttgattggtcgtcatgttcttaacctgaatctttctggagccttggggaaagtgtatccaggaacacgttggct

SEQ ID NO: 1262 - DNA, 1098 bp, Oryza sativa
  ref <308>: DATABASE ACCESSION NUMBER: AK059310
  ref <309>: DATABASE ENTRY DATE: 2001-12-06
cagtggggaattttccgcaatgggcgaaagcctgacggagcaatgccgcgtggaggtggaaggcccacgggtcgtcaacttcttttctcggagaagaaacaatgacggtatctgaggaataagcatcggctaactctgtgccagcagccgcggtaagacagaggatgcaagcgttatccggaatgattgggcgtaaagcgtctgtaggtggcttttcaagtccgccgtcaaatcccagggctcaaccctggacaggcggtggaaactaccaagctggagtacggtaggggcagagggaatttccggtggagcggtgaaatgcattgagatcggaaagaacaccaacggcgaaagcactctgctgggccgacactgacactgagagacgaaagctaggggagcaaatgggattagagaccccagtagtcctagccgtaaacgatggatactaggtgctgtgcgactcgacccgtgcagtgctgtagctaacgcgttaagtatcccgcctggggagtacgttcgcaagaatgaaactcaaaggaattgacgggggcccgcacaaccacagtttctccccaagttggctccaaagagaagagcacccacattgaccctagcgaagctcaagaagcagcagcccctactccagctccagcagcggcgattgctccttcccagcaagaggcaggtgttgcagttgcaagcagccctcatgaggcccagaaaaccgccgccgcggcggcggcttctcaactcacccgtagcagctcatcgagggcgatggagagcactggtcaggatggcggtagaggaaacgacggcacggcttagctttgccccatgtctactggctgctagtaggctaatttctgcagtgtgtgtgtgtgtgtgtgtgtccatgtgaatatgtgtgacctgtgtggctgtgtgactgaccccctcctaatgttgatgtctcacaacgctgatgattaccgtcgcaggaaaatatgctgtacagttattgaaaacctgtaacagacagtagtggcatgcttattgtcactcaatttacctaccaagatataggtggaaacataggtcaagtgcgaataggtt

SEQ ID NO: 1263 - DNA, 2105 bp, Oryza sativa
  ref <308>: DATABASE ACCESSION NUMBER: AK059311
  ref <309>: DATABASE ENTRY DATE: 2001-12-06
catgtctgtgaagatgcggactacctgcacctggacagaaagaccctatgaagctttactgttccctgggattggctttgggcctttcctgcgcagcttaggtggaaggcgaagaaggcccccttccgggggggcccgagccatcagtgagataccactctggaagagctcggattctaaccttgtgtcagacccgcgggccaagggacagtctcaggtagacagtttctatggggcgtaggcctcccaaaggtaacggaggcgtgcaaaggtttcctcgggccagacagacattggtcctcgagtgcaaaggcagaagggagcttgactgcgagactcacccgtcgagcagagacgaaagtcggccttagtgatccgacggtgccgagtggaagggccgtcgctcaacggataaaagttactctagggataacaggctgatcttccccaagagtccacatcgacgggaaggtttggcacctcgatgtcggctcttcgccacctggagctgtaggtggttccaagggttgggctgttcgcccattaatgcggtacgtgagctgggttcagaacgtcgtgagacagttcggtccatatccggtgtgggcgttagagcattgagaggacctttccctagtacgagaggaccgggaaggacgcacctctggtgtaccagttatcgtgcctacggtgaacgctgggtagccaagtgcggagaggataactgctgaaagcatataagtagtaagcccaccccaagatgagtgctctctcctccgacttccctagagcctccggtagcacagccgagacagcgacgggttctccacccatacggggatggagcgacagaagcatggaaataggataaggtagcggcgagacgagccgtttaaataggtgtcaagtggaagtgcagtgatgtatgcagctgaggcatcctaacgaacgaacgatttgaacctcttctctcgtcttcgccgccgccaccgccgccgctgctatccgcaacagccgcgccgccgccgaagacgaccccagaatggacggaggctccggggggccgtacacctcccgcacggccgaggaggtcttccgcgacttccgcggccgccgcgccggcatgatcaaggccctcaccaccgatgtggagaagttctaccagctctgcgacccagaaaaggagaacttgtgcctttatgggtaccctaatgaaacatgggaagttaccttgcctgctgaggaagttcctccggagatccctgaaccagctttaggaatcaattttgctagggacggcatgaatgagaaagactggttggcactagttgctgtccacagtgattcatggctactggctgttgcgttttatttcgcagcacgatttgggttcgacaaagaggccaggaggcggctcttcaacatgataaataacttacctacaatatttgaagttgtgactggcgctgccaagaaacagaccaaggagaaggcgcccaacagtaccaacaagcccaacaagcccagctcaaaaatgcaaccaagaccagagtctcattcaaaggctccaaaaccacctgcaccccccaaggatgatgatgagagcggcgatgagtatgcagacgaggaggaggaggagcgcgacaacaccctgtgcggatcttgtggaacaaatgatggcaaagatgagttttggatctgttgtgatagttgcgagcggtggtaccatggaaagtgcgtgaagatcacacctgctcgagccgagcatatcaaacactacaagtgcccagattgcggcaacaagagggcaagggcatagagacaagcacaaacaagcagcagtcggaacggaaaccagcgccaaatcgttgagatgtctgcagatatggcctagctttgtagcccgtagacttggttttccatttcaaatcaaaacactgttaatttaatcgtgccccagctgttcgtgttgctctgactttaattgtgcttaaaactcttggtcgctgtagtaatattagcttcatttccctggtgcggctgcctctgcagacatatgtcaaagacgttcttgaattgaaggactctctgaccattgtttcttc

SEQ ID NO: 1264 - DNA, 527 bp, Oryza sativa
  ref <308>: DATABASE ACCESSION NUMBER: AK059312
  ref <309>: DATABASE ENTRY DATE: 2001-12-06
agctcgctcctccttttggcacaaattctctcgagaaggagagcgaatatgccgtctctgcggccgatcttgctcgccgccgccgccgccgtcgccgtcgtgtctctgtggccggctgcccgcgtggtggccgacatcgatccgtcgtctgggatgccgtcgccacctgcgaccacctcgccgttcccgttctgcccgacgacgccggcggggatctccacgcagccgtttccctgggcggagccgtctccgacgacgacgaccaccatgttcccgcaggatccagggtttcttgcatcggcggcatgccatgcgaggacggcggcgctggcatggattccggtggtgtttgtgttttctgctttcttggtgtttttgcagtgaatcgtactcactgccattgatgttgtatgtatgagttgaattcagattccatgatgtttctgaatattgcagctggtgtgatgccatgtaacatggtaatttgatagcctttgtattgtatcagatatatagttgcaaacact

SEQ ID NO: 1265 - DNA, 1629 bp, Oryza sativa
  ref <308>: DATABASE ACCESSION NUMBER: AK059313
  ref <309>: DATABASE ENTRY DATE: 2001-12-06
ctgaaggtgattatcccaggacgacgaaggatgttcattcttggtgatcagggaaattcactttattgctataaggctgttctcttggatgccagaaagcgaactgagacctttgtatatcattgtggagtttttattgtgcctaaggttcgagcacatgaatggctttttgcttcagaagaaggacagtggcatgttgttgaaagtgcaaaggctgctcgtctaattatggtattcttggatagcagacatgcaaatgctgacatggatgttatcaagaatgatttatctccccttgttaaggatctggaacctggaaatcctgaagaggaagctcgtataccgttcatgatggctggtgatggtgtgaagcaacgagagattctgcaagaggtaacttcagaaataactggtcctatggttgtggaagatgttgtttatgaaaataatgatgaagaccaaagttctatgactgaaaagatgttccggcgccttatatttaaaagaaattctggcttagtgcaatctgaagcattgcttgtcaaagattccaccagtgacaaggcagatgaaaacaacaaaaaatcaccttcagcatccaaaaaaaggaggaaccagaaaaaaggtccctcaggatccaagaccgttctgaggattgatcatagctaccttggtagctcttatcacagcagtatcatatctggcttttctttaattgcatctgctctggattctgctgcagtagctggaacaaaagttagcacaaccgtcatagggcttggagcagggactttaccaatgtttcttcgtggatgtctccctttcctagatattaaggttgtggagttagatcccttggtagaggaggtggcaaacaaatattttggcttttcaacagatgagcaattgcaggtgcatttgggagatggaatcaaattcatagatgatattgctgttgcaaacagtagggctaccacccagcagctcatgtctactggcaatgagaacaatgcagttaaaattcttattgttgatgttgattcatctgacgtgagctctgggttgtcttgccctcatgcaaactttgttgaggattcttttcttctggcggtgaaaaagttccttgatgaaggtggtctgtttatcatcaatttagtctcgcgatcatccgcagtcagggaaatggttgtttcacgactgaaagcagcctttgagcacctatattcactacatctcgaagaagatttaaatgaagttttatttgcaaccccaagtgaaagatgcctggataacaacaatatggatgaggctgtggccaaactgaaggccatgctgaaattcccagtgaatgtagaatcagatatgaagaagttgcagaagctgcagtagtcggctcagctgcagcgaaatgccattcattttgtcctcagcgaactcaggaaaatgctggtgtaacttccttcaactataggaccaaattacctgtaccaaaggcataggtacaccttccttcgtgttgtattgccaaattttgttcttgtcaaaccgtgccgcgatctgtatagagctacaataggcgagaagatgtctgtcagttttggtctccattgctgagagcctttctaaatc

SEQ ID NO: 1266 - DNA, 834 bp, Oryza sativa
  ref <308>: DATABASE ACCESSION NUMBER: AK059314
  ref <309>: DATABASE ENTRY DATE: 2001-12-06
ggaacaggaacatctctgccggtgtactaggcggtgccactgcgacctggatcctttttgaattgcttggctaccacctcctgactttcgtttgccatgggctcatattctctttgggtcttctctttctctggtctaatgcctcatcatttattaacaagtctcccccgcggatcccagaggtgattattccagaagatttggttgtcaacattgctctatctacacgttatgagatcaacagggcctttgccaatcttcgtcagattgctcttggccgggacatcaagaagttccttattgtgattgctggcctttggttgctttctgttcttggaagctgctgcaacttcttgaccttggtttatattgtgtttgtggtgctgcacacagtcccaattctgtatgagaagtatgaagatcagattgactcatatggtgagaaggggtgggttgagattaagaaacagtatgctgtgctcgatgctaaggtcctgagtaaagtaccaaggggccccttgaaagacaagaagcactaggaagaggtgatgcagtgcctcgtggcaggtgatagtagtggttgggttgtggttcttgagatgcactgctgtcacctattgccttgtgttgtgtatggctcttttgttgtctgatcttgatgggagtagctgagtagcttgcgctacgacagtatgcagctgcagcgcatgctttgctccatcgctgtttgatttttgatctgtaagatgtcgcatgcatattgtttatgcgatattgttttgttactaagattgctgcattttggaatttggtgatatttatgaaccaatgttg

SEQ ID NO: 1267 - DNA, 293 bp, Oryza sativa
  ref <308>: DATABASE ACCESSION NUMBER: AK059315
  ref <309>: DATABASE ENTRY DATE: 2001-12-06
gaaaaccgagcgaggatacatgaacagtatctctgagatgaaaaaaagaacttgtcctcgcgacacacacaagtggttcttcaacgaacaatgaatccagagttgtacatttggcactaacagtacgccctttgcgggcagcagcagccgtctcagttgatactgattgtgcatgcatgtgagcttaattttaaagctttgttactactaaccttaggctcttgttgtggcaaattcacatgttctttttcatggttttggcttttgctttggacaggaagcttttgttgagg

SEQ ID NO: 1268 - DNA, 1334 bp, Oryza sativa
  ref <308>: DATABASE ACCESSION NUMBER: AK059316
  ref <309>: DATABASE ENTRY DATE: 2001-12-06
atcgcagccatttttacccctagccccctccgcttcctcctttttacatccaaacccctcttccactcccctcgccgccgccgcctccgccgtcggggaggatgggaggggcgcacttccccggtgagggcgaggtggtggccggggagggcgacgccgtcgtccccctccgcgacgtgggcaagatggagcacgggtgcgagcattacaggaggagatgcaagatcgtggcgccctgctgcggcgaggtgttcgcttgccgccattgccacaacgatgccacggcttcaggtgatcggcataccatttgccgccaggatgttgaaaaagtagtatgtctactctgtgatactgaacagccggtgtcacaagtgtgcataaactgtggtgtcaatatgggagagtacttttgtgatgtatgcaagttttatgatgatgatacagagaaagggcagtttcattgctacgattgtggcatatgcagggttggtggcaaggaaaactacttccactgcgcaaagtgcgggtcttgttatgctgttgctctgcgtgataaccatcagtgtgtggagaactcaatgaggcagaattgcccaatttgttatgagtatctatttgattcattaaaaggaacacgagttctcgactgtggacacacgatgcacatggaatgcttttctgagatggtggaacataacaaatacacttgtccaatatgctccaagacagctcttgatatgacacatcactgggcattgttagatcaagagattgaagcaacaatcatgcctcccgtctaccgttacaaggtttgggtgctctgtaatgactgcaacaaggtctcagaagtggacttccatgtgattggccacaagtgcagccactgcaactcgtacaatactcgatcgacatcacggcctgcggatttatcaggaagcagttctccctcgacgtcagattcgtccgaaaacaatccgtagataacatgccatgttggtgcccaacaagatctacagtttagacaatcaagtcccagattcatacatatacaagtagtagaaggaacattgttttgcggctagcctatccaagtgcctacccaattcttcaagattcaattgattccttgaatcttcatgtgttggaactgctactagacaaaagctattgtgatgataccatatgttgtgttgaatctttaatcacagccatggctgttatcagtgtgggtgaaagtgaaacccatcatgttatccaggagctgaatgttgatgattgcaatccatggaaaatgggtatgcgtactctacatgttgatgattgtatgttggttc

SEQ ID NO: 1269 - DNA, 408 bp, Oryza sativa
  ref <308>: DATABASE ACCESSION NUMBER: AK059317
  ref <309>: DATABASE ENTRY DATE: 2001-12-06
ctcattcaaattaatcattttttagcaaacacttcacttttgttatccttgagcaaccaagtttacaattatgtcgttttgagaatgcaagattatttgagaagacttgcttgattttcatggatatgtagttagacacaggtgcttgacactttgagaagtgtaagttggcacttgacagtttcctactaggcgtccaaaaaaaactagcatgcacacaagtcttgcaaaatctgaaccatatagcttagcaactaatttttttcatgcaatgcttaggtatcgaactatttgatgcctcacaacttctttcgtcatgttctgtaatgctatatttttcctttgccattacttaaagaatactcaattttcgtgttcgagaaagaaaaaagaataccttttcttgtc

SEQ ID NO: 1270 - DNA, 1622 bp, Oryza sativa
  ref <308>: DATABASE ACCESSION NUMBER: AK059318
  ref <309>: DATABASE ENTRY DATE: 2001-12-06
atgtaactcagagttatgcgtcaggagcagggattaatcgcctacagtagttattaatcttgttgttttgttcttcagaaatcaggaggagaagccatgatgcagaaatatctgtggatacagatttttgtgttgctctcgagcttctccttctcggttgagacggattacgcctccatttttagcttcggagattccttctccgacaccggcaacatcgtcctcatctacggtccggcgagaaccgacctcgtgatgaccaaaccgccgtacggaatgacattctttgaccatcccagcggccgcctctccgatggaagattgatcatcgatttcatcgccgaagcgctggggctccctctgcttccgccgtcgttcgcggcgaaccggagcttcgagcatggcgccaacttcgcgacggccggcggcacggcgctggaccgcgcgttcttcgtggccaacaacttcacggtgatgtccccgttcaacatctcgctcggcgaccagctcgggtggctcgacggcatgaaaccgtcgctctgcggctgcaagccaggtgggtgcgagggttacttctccgagtccctgttcttcgtcggcgagctcggatggaacgactactccgccgtgctgctcgccggcaggggcgtcgacgaggcgaggtctctcacaccccgagtcgtcggaaccatccgcgcggccacacagaaactcatcgacggcggcgcgaggacggtgttcgtgtcgggaatcacgccgatggggtgctcgtcagcgaacctcgtgctgttcgcgggctcaagcgaagcggactacgagccggacaccggctgcctgaggagcctgaacctgctgtccatggagcacaaccggcagctacgccacgccctggcgcagctcggcggcgcgaggatcatctacggcgacttctacacccccctcgtcgagctcgccgcgacgccgcgccgcttcggtgagccgcgccatagctcagacctcagagctaattaagcttctggattttcatgtcaccggaacatatatatggcggcgcagggatcgacggggaggagggcgcgctgagagcttgctgcggcagcggcggtgggcggtacaacttcgagttcaacatgagcgcgcagtgcggcatggcgggggtgaccgtgtgcggcgacccgtcggcgtacgtgaactgggacggcgtgcacctcaccgaggcggcgtaccaccacgtcgccgatgggtggctaagggggccgtacgcgaacccgcccctactcagctcgtcgtgttcggcgcgagcgcgatagccgcggcgagttgaggccttctcccttcttcggcgtgggccttctcgtggtcgtctctttacatgttggtagtaggaataagttcactccaggtccctcaatttgtcgcccagtctgattttcatcctcagtgcagaaaaccggatacaacacatcccttaacttataaaactgtacagaagaggtccctcgacagtattgtggccggttttggatgatgttgcatatacgtggctccctttgactaggtcctcatcccacgtggcattgacgtggcgttttgatccgaaaagaaataaaggagtaaaattg

SEQ ID NO: 1271 - DNA, 839 bp, Oryza sativa
  ref <308>: DATABASE ACCESSION NUMBER: AK059319
  ref <309>: DATABASE ENTRY DATE: 2001-12-06
agaaaacaccatatttcttccttgtgatcacgagctaaccttgcatctctcattgtctttggcaaggatcgatgggccaggctgctgccaaggcgaagcaaggtggcgatcaggcagagaacaagactggcaaggacgagaaggttgcgaaacctaaggatgccaaggatctcaccgacttcatggaaaaaaactacgactcgatcaaggacgtgacaagcttcgaagatttctaccatgccttctacgagctcatcgaaaaattctgtgaggaacgtgggcaattgcagtacaggataccggaaaaagcggaacttcagaagcagtacgagagggtgaacaagagcccccagaaggggcagaacctgagcaggaagcagttcatggagctggccgggcaggtgatcaaggtgaacagcttcaccttcggcaaggccaccatggacgtgctggtcgtcctcttcggcgcccccgtctgcgccctcctcgccaagagggtcgtcccgggcctcaagtccttctccgacgacgtcgtcatccccgtcgccacctccggcgccgtcgtctacctcgccaagaccaacaagctgtgatcgaggtgaatcgatcgttccagaatcatatccagactatggctaacaaattatcgcgagaataaaggtgagggagaaaaaacgtacgtggtgtcatgtcgtataaagtttgcgttgtggccttggttaaatttcgcccaaattgtaaagattatttgagagtggatttttatattcactctcttttatatgtcttcactgttcacacctgtgaaatctaggagaaatctgtataataatattcgt

SEQ ID NO: 1272 - DNA, 573 bp, Oryza sativa
  ref <308>: DATABASE ACCESSION NUMBER: AK059320
  ref <309>: DATABASE ENTRY DATE: 2001-12-06
tagacaacctagctttttctgaagttcctgaggaacctacagtgcatgaaggtgatgagaacctttcagatggaagttatcaagaacagagaagagcgcatttcaactgtgttgttaatgtcagtcctgggacatgcgagctggtggcctctgctgcgttgtacctgaagatcgatagcgcgaaagatgaccacggagaacagaaatcactggtgaagaggatcatccagtgccagcgtcgcgaggatcacgcaggcgttgagctactgatggagagctgcaaggattcgagggacctgacaatcatgaagccggtgcacctgaggctgatgctggagtgtgccgatcatcctgctgggaccaccaacaaggagaccatcagctcagagtccagctttgagataaacatctctttagattagtttccaatgatacgcatagcatgatagagcagcagagtagtttgatttgttcgctagagagagaaattcaacactttcagatagttttgtatctcgatggtcctgttccacatgaaaattttcagttgagaaactggttcatggagcactt

SEQ ID NO: 1273 - DNA, 974 bp, Oryza sativa
  ref <308>: DATABASE ACCESSION NUMBER: AK059321
  ref <309>: DATABASE ENTRY DATE: 2001-12-06
gagcagtgagcacaaatcacagacacaaatggaagcagcagtggctaccccttccttgctcttctctagcccaacacccaggaggccttcctcctgcttgtcactgccgcctccttgcagcagcagctacgcctccaatggggcgaagctgcagcagccgcggctgcagttcgtcagtcagctaaccagcagaaacagcaacgggagcggcagaagaagcatttccattttgtcgctgaggtgctcttccagtggcactgacagcgcgtcttcttccgccacttcagaaagatgggttcttgagcctgcaggagacggcgattggcgtcatatcgggtaccgcgtcgcgcgacccggcggcttccagatagcatccgaggcggcggtgacggtgggtcgtgttcctgaacaggctgacatcgtcctgtctgtcgcaacagtttctgggacgcacgcacggctggagaagaaagaggggagcctgttggtaacagacctggagagcacgaatggcacctacatcaacgagaggcgcctcagcccgggtttccccactcccatcgaccccggtagcctcctcatttttggcgacatccacctggccatgttccgtgtttccaagatggtcgtggatgtgcccagtgacgccagtggagctgagcaggaagcagctgagacggctcaagtatcagctgcagcccaacagaccaattaattagcgacctccatgtgctgcttgatgcatcaagacagctcaagaagaactagcttatcagtgctcccaaaggccgacatgaagtgcatatgttacgatcgacagtctcccttgcaaataagcgcatacatatgttgtgtgataggaatgtcacagagcaacaactctggatattattaatagagggagcgcacataatggtagccccgtgatcaacttaaaatgcatttatcaagtaccaaagatgccaattacaagt

SEQ ID NO: 1274 - DNA, 1474 bp, Oryza sativa
  ref <308>: DATABASE ACCESSION NUMBER: AK059322
  ref <309>: DATABASE ENTRY DATE: 2001-12-06
caaatatcttgatgttcgactcggtgcacgcgaggacctgcctccaccacgcggcgtactacggccacgtcgactgcctgcaggccatcctcgccgccgcgcagaccacgccggtggccgactcatggggtttcgcccggttcgtcaacgtcagggacgaccacggcgccactccgctgcatctcgcggccaggcaggggcggccggggtgcgtgcaggtgttgctggagaacggcgccattgtgtcggctttgacaggatcatatggcttccctggaagcacgtcgcttcatttggctgctcgtagcgggaacttggattgcatcaggaagctgcttgcctggggagctgatcggctccaaagggattcggctgggagaattccctattctgttgcgctgaaacggaaccatggagcatgtgcagctttgctgaaccctacatcagcagagcccatggtgtggccatccccacttaagttcatcagtgagcttgaaccagaagctaaggctctcctggaagcagctctgatggaagccaacagggagagggagaagaaaatcctgaatggcacaaagtactccctgccatccccttcgcccggtgatgacagtgccgatgacgatgcatgctcagaggtgagcgacacggagctttgctgcatctgcttcgaccaggcttgcaccattgaggtgcaagactgtggacatcaaatgtgtgcaccgtgcacgctggcactgtgctgtcacaacaaacccaatccgacgaccctgacaccgccctcaccggcctgcccattctgccggggcagcatctcacggctggtggtggcccaaacaaggtctgcttgtgatcctgacaagccgtcatccctgcagctcacccggaagcggtcgcgtcgatctcacaacctcagtgagggcagcagcagcttcaaagggctaccttcggccatgggctccttctcaaagcttggccgtggctcgagccgcatggcggacagtgacagcagcaacctggacaagcctgagcacgatctatgaaagcagaacaacgcacggacaatcgccgcatcatcctcaagacatccgttggtatcagaaacccagatgaaaatccaatggctaatttggagcaactttgatccatggaaagttaaatagatagggactaaataagtagaaccctccactccccattgtctgtgtgcccaccctatttttcggcttgccgggttaagcttagcatatgcataggagctctgaaagaccagagagagagtgagtgagtgagtgagagcaattcatcatcaatcacacagtgagtgttggtgtggttaagggatgcatgcagcagagatgtgaaacggggttcatgttcgtcacctctaaagttagcctgccatggcatgtgagctctgcgccggcctgacccctcctcctctgtgtgatgaatcatgcccccatttttggcc

SEQ ID NO: 1275 - DNA, 842 bp, Oryza sativa
  ref <308>: DATABASE ACCESSION NUMBER: AK059323
  ref <309>: DATABASE ENTRY DATE: 2001-12-06
atgcaaccactgcctcacctcctctttcccctcttcctgatccaaaccgtagccctccccagtccccactctcgccgcccctcgctggcgccgccgtcgtgccgccgccggtcgtccacgcgcacccagatcccagccggcaggctgttgctgaatatccccgcagctaaccctgcttggtgaatccggcgagcaaccagagatcgtgtaagcgcggaggatcgggatggagattattgtcattctctcgcttgtcgttcttctggttcttggagctctatttgtactaccgaaatcccgtaacaaaggtaaagcgaaggaagccagttcaaatgccaaatcagtgacatttaggagctatacaaaagaagagatctcagcacacaacacaaggacggattgctgggtcatcatcaaggataaggtttacgatgtcacctcttatgtggaggaatatccagggggagatgccatcctaaacaatgctggtggtgattcgacagaaggattttttggccctcaacatggcttcagagtctttgagatcattgaagatttctgcatcggcgagttgaagcactcatgattggagggattttgtattgcatccacgattctctcattgaaatcgaatttcgagagtgtagattattcaagttcaagtcttgcaatcccaggcgttgggacgcagatgacagggcaaaaacatttttagcgattatgatctaaaagctgccctaagcttccggatgtaatttcgtttttttttcagctggcaatttgtagacatcattctgatcaggagctgtcctatgaatgtatttcggaacatgttcttcctc

SEQ ID NO: 1276 - DNA, 1236 bp, Oryza sativa
  ref <308>: DATABASE ACCESSION NUMBER: AK059324
  ref <309>: DATABASE ENTRY DATE: 2001-12-06
aggtgcatatgatgatgaagaggctgcagcaagagctatgaccttgctgcattgaaatactggggagctgggacacaaataaactttcctgtctctgattatgcaagagatcttgaggaaatgcagatgatctccaaggaggattatcttgtgtctcttcggagaaagagcagtgccttttccaggggtttaccaaaatatcgcggccttcctaggcagctccataattccagatgggatgcttctttgggacacttgcttggcaatgactacatgagcctagggaaggacatcacgctggatgggaaatttgcaggaacctttggcttagagaggaaaattgatctgacaaattacataaggtggtggctcccaaaaaagacacggcagtcagatacatctaaaatggaagaggttactgatgaaatccgtgctattgaaagttcaatgcaacggactgagccttataagtttccttcccttggcctccattctaactcaaagccctcttccgtggtcctatcagcatgtgatatcttatctcagtctgatgccttcaaaagcttctcagaaaaatctacaaaactatctgaagaatgtacttttagcaaagaaatggatgaaggaaagacagttaccccagtacctgcaactggacatgacacaactgcagttaacatgaacgtgaatgggttgcttgtgcaaagagctccatacacattgccctctgttactgcacaaatgaaaaatacctggaaccctgctgatccttctgcggaccctcttttctggaccaacttcatcctgccagcaagtcaacctgtcacgatggcaacaatagcaacaacaacgtttgcaaagaatgaggtgagttcaagtgatccattccatggtcaagagtgaccgtacgagcttaccaaagtgcatgcaggatttgctttttggcttggtgggtgataacatcctgcacgtctatgggtttccttcttcctagcttttgaggtgacccgtgaacaaataccctttgtatccatagttcataagccatgaatagaaggtaagagaagtacaaccatagttatgtaatatatacagtgcctagtggcctagtgccccgttaatgatatttagttatagagctgtctgtacatatcgcggttcttatttcagctacttggttggttctatagaatgaagagaacagaagaacacgaatttttcaaagcttaattgttt

SEQ ID NO: 1277 - DNA, 1858 bp, Oryza sativa
  ref <308>: DATABASE ACCESSION NUMBER: AK059325
  ref <309>: DATABASE ENTRY DATE: 2001-12-06
acacaccacaccaagctctcaccaagctggacatatatatcttgccattttgctgatccattttctgcttaattgctcggttaatccctgcaaggggagtagaactgaagcaggagatcgagcagctatcttcttcagagaaagctgatcagctgagaccatgggggagaacgtggttggcacgtactactacccgccttcggcggccgccatggacggcgtggagctcggccacgccgccgccggctccaagctcttcgacgacgacggccgccccaggcgcaacgggacgatgtggacggcgagcgcgcacatcatcacggcggtgatcggctccggcgtgctgtcgctggggtgggccatcgcgcagctcggctgggtggccgggccggcggtcatggtgctcttctccctcgtcacctactacacctcatccctcctctccgattgctaccgctccggcgaccccgtcaccggcaagcggaactacacctacatggacgccgtgaacgccaacctgagcgggttcaaggtgaagatctgcgggttcttgcagtacgccaacatcgtcggcgtcgccatcggctacaccatcgcggcgtccatcagcatgctggcgatcgggagggccaactgcttccacaggaaggggcacggcgacccgtgcaacgtctccagcgtgccctacatgatcgtcttcggcgtcgccgaggtcttcttctcgcagatccccgacttcgatcagatctcctggctctccatgctcgccgccgtcatgtccttcacctactccgtcatcggcctcagcctcggcaccgtccaagtcgtcgcgaacggagggttgaagggaagcctgaccgggatcagcatcggcgtggtgacgccgatggacaaggtgtggaggagcctgcaggcgttcggcgacatcgcgttcgcctactcctactcgctgatcctcatcgagatccaggacaccatccgggcgccgccgccgtcggagtcggcggtgatgaagcgcgccacggtggtgagcgtggcggtgaccacggtgttctacatgctctgcggcagcatggggtacgcggcgttcggcgacgacgcgccggggaacctcctcaccgggttcggcttctacgagcccttctggctcctcgacatcgccaacgccgccatcgtcgtccacctcgtcggcgcctaccaggtgttctgccagccgctcttcgccttcgtcgagaagtgggcggcgcagcggtggccggagtcgccgtacatcaccggggaggtggagctccgcctctcgccgtcgtcgaggcggtgcagggtgaacctgttccggtcgacgtggcgcacggcgttcgtcgtcgccaccacggtggtgtccatgctgctgcccttcttcaacgacgtggtcggcttcctcggcgcgctcggattctggccgctcaccgtctacttccccgtggagatgtacgtggtgcagaagaaggtgccacggtggagcacacggtgggtgtgcctgcagatgctcagcgtcggctgcctcgtcatctccatcgccgccgccgcgggctccatcgccggcgtcatgtcggatctcaaggtttaccgcccgttcaagggttactgataactgatcggatcacgtacgcacccagaacgacacgtcaaaaaaaatcaaaattgcccttctcgtagaaggaaaaccaaattcacttcacacgattaaacccaaaacgaaaaaaaaggagcagtgatcagacgctaagggaaaaaaaagtgtaagtgcgtgtcactgttgatgtactgtaaaagataatttatgaaggaaaaagataaggaaatggaagtgcctctctgt

SEQ ID NO: 1278 - DNA, 673 bp, Oryza sativa
  ref <308>: DATABASE ACCESSION NUMBER: AK059326
  ref <309>: DATABASE ENTRY DATE: 2001-12-06
tatcctgatggaggaggagcctatttcggtagtttttcaagtgagtgcaaatggtgttggactactagatcctggcgctgaaagaaacagtgttgaaaagggtgctaaggtggaccttccattttggcttgcacatgggctgctgtctctggaacaagcagtttcaataaatgtacctccttgcttcacccagaaaacccggaaggagatccaagctgatgcagcctgtgttgatttgaggattcgttgcccttacttctatgagctaggatgcaagatagtccctttggtgaacgacaggagcattggactgttcttgcgctatgcattcactagtaggtacaaggagatactaagcaagtcacacagctcttccatgatgacagtgcccaagtttgttccgcgccttacaaaagaagaagctcaagtgttcgaatctgctagggactcgatgaccgctttcaagaagtggcgcgctggcggtgtgaggctgcagaaagcgtccattcttggtaggaaaaggaagacaaaactgcctgatggaccttctgcaccttgaaccatgttttaggttcttctgtatggaaaatcgtacttgagctgatgtatgtatacttcattaatatgtcgctgtaagagaagaccaaaagtgaaacaattccgttcggagatc

SEQ ID NO: 1279 - DNA, 1760 bp, Oryza sativa
  ref <308>: DATABASE ACCESSION NUMBER: AK059327
  ref <309>: DATABASE ENTRY DATE: 2001-12-06
tacgcagtcacgcgcactctcactcacacggagagagagagagagagagactagactagtagtaccaattaatggcggcgctctcctcctgcttactcgccgccgtccgacctcatcctccacctccacctcgaccgctctccccttccttcatcccctctgccctccgccaccgccaccgcctcagccaagcgccgcccctcgccacctctctcccacgaccacgaccaccatggtgccgcttctccgcctcctcgccgccaccgccacccgacgaccctgacgactacgagctgttggacacgacaggaaattgtgatcctttatgctccgttgatgaagttagctcacagtattttgaagctaactacaagccaaaaaatgatcttcttaaagctttaactataatagcaacagctttggctggggcagctgcaataaaccattcctgggttgctgaacatcaggacattgcaatggtgctagtgtttgctctcggttatgcaggtatcatatttgaggaatcactagcgtttaacaaaagtggagttggattgctcatggccgtttgcctatgggttatcagaagtatcggggctccatctactgatgtagcagttcaagagttgagtcatacaaccgccgaagttagtgaaatagtctttttcttgctcggtgcaatgaccattgttgagattgttgatgcacatcaaggatttaagctagtgactgacaatatatctactcgaaatccaagaactcttctctgggtgatagggtttgtaactttcttcttgagttctatccttgacaatttgacttccactattgtgatggtttcattgcttcggaaactagtacctccatcagagtacagaaaattgttaggcgctgttgttgtgatatctgcaaatgctgggggtgcatggacaccaattggtgatgtgacgaccactatgttgtggattcatggtcagattacaacgttgaacacaatgcagggcttgtttcttccctcagttgtttcattggcagttccactggctctgatgtccctcacgagtgaagcaaatggatcttctcagaaatcttccagcttgctgtcatcagagcagatggctcctcgaggacaacttgtatttgctgttggccttggagccttagtgtttgttccagtgtttaaagctctcactgggctgccacctttcatgggcatgatgcttggtcttgcaattctttggatcctgacagatgcgatacattatggggactctggaaggcagagattgaaagttccacaagcgctgtcacggattgatacacaaggagttctatttttcttaggaattcttatgtcagttggcagcttggaatctgctggcattttgaggcagttggcgaactatctcgatgccaatattccgaatgccgaccttattgcaagcgctatcggtgtagcatcagcaattatagacaatgttccacttgttgctgcaacaatggggatgtatgacctgacttcatttcctcaagatgcggacttttggcagcttattgcgttctgtgctggtacgggtggttctatgcttatcattggctctgcagcaggtgtggctttcatgggaatggaaaaggtggatttcttttggtatttccgcaaggtgagtggttttgcccttgcaggttatgcagctggtatcatcacttatctagctgcacaaaatctccctctatcccttcccacttcactagccgagatc

SEQ ID NO: 1280 - DNA, 376 bp, Oryza sativa
  ref <308>: DATABASE ACCESSION NUMBER: AK059328
  ref <309>: DATABASE ENTRY DATE: 2001-12-06
gaagaaatgcaacgccttcaggcagagcagcgtgcagcgatgcaggcagcagagaagctgcacagggagaaattggctgcagaaaaagaaggggagaaagaagaggagactgataccaatgcagaccccatggctgcagcagaagctcaggccttgaaacagagctcttaaatccttgtgtattaatgttagaacaggtagtactgcaggcatgtccatttgtcaaatgcatgctattctaaatccgtcggtgcaactaacatgctattctctgcggacttgctaagctagttgttaagttggagctttctgttcatactgcctgtgtaccactagtaacatggattttggggctatgaaaaattgatttgtgttt

SEQ ID NO: 1281 - DNA, 1237 bp, Oryza sativa
  ref <308>: DATABASE ACCESSION NUMBER: AK059329
  ref <309>: DATABASE ENTRY DATE: 2001-12-06
attctactcactgcaaagccagggagccatttctttctctcaagttggcatgcgttcctttttcttagttaaatcataaattaacaggcccaacttaattatcatggaataagccacagcaattttacccacctaaggtcactctgtgcattcatttcaggacaatgacaagcattgggatagacaaggcagtagattctcaatcaattggtgctgtctagtaggtgaagagtgacaccgaagcagggatggatgccgagccagctcggctcggctcggctcgacttgctctagctcgtttagataacgagctggctcggctcggctcattatctaaacgagcagaaaacgcagctcggctcggctcggtcagtagctcgagctagctcgtttcggctcgcgagctggagagggcaagatatcagacatcaagattagaagagctaggacaacggaacgtgagccgacgagcggcctgcagcggcgaggacgagcacgacggtcgacggcaaggcagacaggcagaccgcagcggcgagttcgagtgcgatgaccgacgacacaaaaatctgcggtgccaaggtgacagcgcacgcgacggccaagctggggcaacgccgcgacgaccgacggtgctgcagccctcagcgcagattggcagatggtcgcgacagggaggtggcgatggcgcaagcactagagaccgggaaggaaggggcagcgcggcgtggccgcgaggtgtatgctgggcgatgagcggcagactggcggcggataggcagagtgaaaaggagagatcgagactctcgagaggcaggtagggtttgtggtatagtattagtactttacatgctctgatgggcctcgtggtcttgtgtgggctttgtggcctcgtggccttgtgggcttgtggactgggattgctgttgcctgctgggttgtcaaatctcgttacggctcgcgagccagctcgagctggctcgttatctctaacgagctaaaaggctagctcggctcgttaggaaaatgaaacgagtcgagccgagcttgtcgcaagtcgagcgagctaacgagctacgaattttcgtccacccctacttgggtgcatagcgcttcttggcatgtgccatcaataaatgtttccaatattaattactgttgttatacctgaattttgtaacaaacctagacaattcttgaagaaagcatgaataagttcaggtagtttttttttctt

SEQ ID NO: 1282 - DNA, 423 bp, Oryza sativa
  ref <308>: DATABASE ACCESSION NUMBER: AK059330
  ref <309>: DATABASE ENTRY DATE: 2001-12-06
tacgagatggagttgacgcccttcagtgacttccatttggctcttgataaggcactcggcaaacatggaagccaaccaaagcaggttctcaagttctaagataatgcaaggacaacggatgagagagagcttgtattacaaaaacaggagtagaaaaaaggatgtaaacagtgcatgtgtgcgtggctaggggatcggtggcctctttcagtagtagttaccaggctgacttgggaagcggcaatatgttttgcggtgattgcagcggatctctgtccaataatggcggatcacttcacttgagagtagaaagacgtagtatatcacttcacttcaatccccccgcgcaatatgaccttgtgtggttgtaagttctgaagtggtattgattaccgtccgatctggagaaagaaagttttcact

SEQ ID NO: 1283 - DNA, 623 bp, Oryza sativa
  ref <308>: DATABASE ACCESSION NUMBER: AK059331
  ref <309>: DATABASE ENTRY DATE: 2001-12-06
aaggtcaaaaagggtagtactcgtagtagagaccaagattttcttacgaaagcaagaaaagaaaagaagacgatgatatgcatgcaaggagaaggagaagtagaagtagaagcagagagagtgcctccttggtcttggcctggatgtcgacgacggcggaggaggaggaggaggaccaggcggcgaggtgggagcgcatgaaggcgtcgatcttggggaggaggggggagcggatcatggcggggcggacgagggagagcatggcgccgcgcatggcgcggtggagggggccctgcacggcggcgatgttgttccgccccaggatgtccagcatcgactgcgggtagcccgggacgaacccgcgcccttcgctggccagcgcccgccggttcagctccgcctccatacacaccaccgtcgggcaccccaggatgtgcgtcctgaacacgctcccgtacctgcaaaatctttcgcttttagtactactgctactattgctgctactgctagtggtattagtgtttgattagttttctcgttgataataaaaggaaatggaggaatgaatgattgtgatggatgaatgctgctgctagtagtacagattctgcaacaaggagaag

SEQ ID NO: 1284 - DNA, 1250 bp, Oryza sativa
  ref <308>: DATABASE ACCESSION NUMBER: AK059332
  ref <309>: DATABASE ENTRY DATE: 2001-12-06
cctgtttcccacactgtgtgctaagccaagtgggaatccccagacgagagatttagttctgcagttgctcgaaagaattttgtctgcccccaaagctcgaggcatcttactgaatggtgctgttagaaagggggaacgcctgattccccctgttacatttgatctgttcatgagagctgcatttcctgtttccagcgctcgtgtaaaggctacagagaggtttgaagcagcctacccaacaatcaaggagttggcccttgctggtcctcctggctcaaaaaccgtgaaacaagcagcacagcagcttttgccattgtgtgtgaaagcaatgcaagaaaataacgcagacctcaccggggagtctgctggtgtattcatttggtgcctgactcaaaatgcagagtcctacaagctgtgggaaagacttcatcctgaaaatgttgaagccagtgttgtagtccttagcactatagtcacaaaatggagcgagctgtctcataagctcagtgctgaatctcttaaggtgactctgaagaacttaaggactaagaatgaggcggccctagaagcagcaacggactctggaaagcaggcatctatcaaggccgcggacaagtattccaaggagatccttggaaggttgagccgcggcggagcctgcctgaagggcagcctgctggttatcacgcttgctgttgccgcaggctttgtgctatctcctaacctggagatcccatccgactgggacaagctccaggccatggtggcgtctcacctgtcgttctagaggtatatttgtccagcagttgataaaagcttatacagagaatccaaaggagatgaagtgaagattctaggagtgaatgaagaaggctaataagaagggatagatcctagaaaagaatacagttacctttttcgcatcttttcccaagcccgtagttggggggagatgcaagcaactttgcagagatagagagttaaaaagttttaatcgggttagactgatcggtcagaagaaggaaaggttgggccaaatggttcggcctgaggactaacaccacctttgctctatctcgtttttctgcatctgcagcatctcagatgatgagaaacatttttgcttcttttgtttttcctttttcttctgaatcttgtttgcttttaccaacatgccatgtgtgatattattgctgaatcatctgtacttgttggtgttgatgatatcatatcctgctatgttgtggtgt

SEQ ID NO: 1285 - DNA, 1144 bp, Oryza sativa
  ref <308>: DATABASE ACCESSION NUMBER: AK059333
  ref <309>: DATABASE ENTRY DATE: 2001-12-06
aaggtggaacctcaggagagaggagtacaaactcaacatgggtgatgtagctagcataattagctgctggttcaggtttaaccgcaggaagcttgaagcgctggaagcagggatccatgagcttcgtcctggccaaggtgactctccaatgtttgttgatatattagttaaggatcttagaagccccacacatgagactggtctcagtgccaattatagaggtttctacaaaaattgtagtgctctgagatcttgttcggcccacatgaatttgttcacctctttggacattcgtaaggacttcatggttggttctgctgattggggtaattttgtcaaggctttgggtgatatcaaacttccaggctggtatcgtactgctatgcgatcacctgaaatgaggaaagtactcttctttgagtttaatgatccacatactggggagttacgaggcaaaagatatcgtgccttatcagttttttcatggcttgaatttgcgcggatatttattaagcacatgaagaaagggctgtgtaccgataaacaggcaacagcacttctctgtgtgatattctcgaatattgtacctgttgtggagaagaaacttacttacagttacaggccaccagctaaggagaagagcaatgaaagctttacagttgaagaaatcctggacccatcatagtcatagatgtcggaggaaagacagaatgttgctgtaagctacaaatctcagtatggttggaggatgactctgcaaaggttggagtatgtatgacaaagcgcgaagaaaaagctttcaaggaaagggtttctgaagtttttattggtttgaacagatcctggaaatgaattcatatggatggggagctatatcagttgtagaagttctttttttccttaagttttctgtgtttgtcagtttagcctggtagtgatagactgatagatcctgatgatgtagctgtgtgttagtttgaacgattttctgtttttaagctttttgttcgatgccctggaactgtccaggcatgagtgaccttgtagaaactttcacatttcttttaatagaaatggaggggtattgcccttttgataaagaaaaagggatataatatgttgggctggtattcctgttgatttc

SEQ ID NO: 1286 - DNA, 1476 bp, Oryza sativa
  ref <308>: DATABASE ACCESSION NUMBER: AK059334
  ref <309>: DATABASE ENTRY DATE: 2001-12-06
gagcaaggtgaattcccctccagttgaagctgcaattgaacagttcacaaggcaccttgtcacagagtgggtaacagatctatggtactcccgtgtaacacctgacaaggaaggtccagaggaactcatcaatatagttaataatgtcctgggagagatatcagtccgggcaagaaacgttaaccttatcgctctgctaaccagggatctgattgatcttatatgcaaaaatttggagctttatcatttatgccaagccaagattggaaaagagaagtttgttaatctctcgacggagcgtcgtgatgctgaactaaaactgacccttataaccgaaaacaagttgcatccagctttattttcagccagtgctgagcacaagatcctacaaagtcttgctgatgggttgatatcagtaacagcaaaacctcaggatctgcagtgttacttcttccgatgtactgcacgagaacttcttgcatgtgcagtcatgagacctgtcgtgaatttagcaaacccaaggtttataaatgaaagaattgaattgttggctctttctcatgccaacaaggcagaaagaggagttgcagaatcattggagcatgctacaatggttaagcaaagggaacctcctatgccaactgttgatgaacttgctgcactaatagatcccacgagttcaggggttgaacttgtgcgatttagtcaggatcagtccaaagctgcaccagatacgcaactcagtaatactagacatccatctaacctcaaaccaaattcctctagtacttctttgaccaatagttcacatccacttgagtctagcattttatcttccactacccatggtcattcgaattccagtatgtcattgcattcccaaagtagtggcaggacaactgcagaatgttatgagggagaatgggcacagaccatggatatcagctcccagcaaaaaagtcaagccctagcacctgagcaccttgagaacatgtggactaaagggaagaattacaaatcagaaaatgtaaaacatgttgcgagagtaccttccaaatcttcttctctaggcacttctccagtgcagcagtcagctccttacagcacttctgttggtcattatcctagtgctccacaaaggcagacaactatgtctcgttctgatgaccaacatttgattaaacactcaactactgctgcatacttaaatggcaccaatcatctgaggatggctttatccagagaaagtgcagatcatgccagccaagaagactttggagtggacagtgagagttcatatgccactgaggaggatgagaataacaatgtgactgggcttgactctccagtaacgagagtttgggacagcaaaagtaaaggaaatgccacctcatcacatatacaccatccacttgaatctccaggtttccataaagcaaagaagaacagaagtcatattggcaagttgaaaatgac

SEQ ID NO: 1287 - DNA, 1555 bp, Oryza sativa
  ref <308>: DATABASE ACCESSION NUMBER: AK059335
  ref <309>: DATABASE ENTRY DATE: 2001-12-06
attgcaaaacaagctcaagttttcaacaacgtaatggctcacagcttaccccttgatgtatggggttggatcaccaacctgcctccgttctcccaatggcgctccaacgccatgtccctttgcatctgccccacaccatcagcatcagaatcatcacagccatcggtgaacctatcagttgtcaaaacccctcccacccagccctcctttgtcaccttctccatctttgcaaattaccgtgtgccaatctctctgtggacgtcaaaaccagtccacctgaaatcatacacccagcagtctctagacgaacaagagatgttagagttgtttgttgacattgtggactgggtgctgagatccggaccaaacaaaaagctgtcctttcagtttcccagggcacagattcatggcaatctaaaggacgtgtttaacatagttttcttgtccctggccttcctagtttgcatctatgaggctccccatgctcttcgctgtcgatgcctcgaatccctgaggactcagctgactgggccaaagtgcaaagatgctgcaaagacctttgtcagaatgttgggagcaaaccttgaggagcaatggatgcagacaatgaatcttgcagtgactaactggattgttgagcaacgatcctcacaccattcatttggggtgccatcgccactgttctcatatgctctttcagcaagtgggctctggaaggtccagctatactgcccactcattgccatgagcatggaagatcctgcagtgccaacacaggatgagcgccttctcttctcgcttacttatcagcaacttgaaggtgtgattcagctcgcctacaaaacaatcagaagggacaactggattgatgtcgagataaaggtggacaacataaggtgtgatgtggactctttggtctccgagatcctcatgactgaacgtggacatggctctgaggagaagcactttccatcacgtgttatgctgcaaatcacacctatgcaacaatcagatgtcctgtcggtttcagtcagcaagtcctccgacaaccccacgcatgagtttggccttgagaagggcattgaaggttcattcgaccccccaaacacatttggactaaaggcatcggtcagcgaaagcctcacactgaccatgaaaccctggaaatttgaacagtctgtgcatggaaacactacaaccttgaactggtttctccatgatggtgtaaacggaagggaggtttattcttcaaagccttccaagctctccctgcttcagccacgggcctggttccgtgacaggtactcgaccgtgtatcgcccattcacgaagaagggtggtgtcattttcgcacgtgatgaatatggagacagcgtctggtggaagatctgtggtgcagcattagggaagaccatggactgggagattagaggctggatttggctgacctactggcctaacaaacagaagacctttcacagtgaaacaaggaggcttgaattcagagaatgtctgcaacttccccttatgaaatctccatgatgtatcttttggt

SEQ ID NO: 1288 - DNA, 1858 bp, Oryza sativa
  ref <308>: DATABASE ACCESSION NUMBER: AK059336
  ref <309>: DATABASE ENTRY DATE: 2001-12-06
ttgttttcagatgatcctagggaatctgttgataatgtactcatgatgtttgatgcactgcggcggaggctcatgcagttggatgaggtgaagcaaggagcaaagcagcaacataacttaaaggccgggagtatcatgatgagtgctgaacttcgtgcaaataagaacaagaggattggagaggttccaggtgtcgaggttggtgatatgttctacttcagaatagagatgtgtctggttggactgaatagtcagagcatgtctgggattgattacatgtctgctaagtttggtaatgaggaggatcctgtggctatcagtatcgtgtcagctggtgtgtatgagaataccgaagatgacccagatgtgctggtttacactggacagggcatgtctggaaaggatgaccaaaagcttgaaagaggtaatcttgcacttgaaaggagtttgcatagaggtaatcaaatcagagttgttcgtagtgtaagagatttgacttgtcctactggtaagatatacatttatgatggcctttataaaataagagaagcatgggtggagaaaggaaaaactggctttaatgtgtttaaacacaagctgctcagagaacctggtcaacctgatggcatagcagtgtggaagaagactgaaaaatggagggagaatccttcctctcgagaccatgttatattgcgtgacatatcatatggtgcagaaagcaagcctgtttgccttgtgaatgaagtggatgatgagaaaggtcctagccacttcaactacacaactaaactgaactacaggaattctctcagctcaatgagaaagatgcgaggctgcaattgcgcaagtgtgtgccttcctggtgataacaactgctcttgcactcatcgaaatgccggtgatcttccatacagtgcttcaggcatacttgttagccggatgcctatgctgtatgagtgtaacgattcctgtacatgctcacataattgccggaaccgagttgtacagaaaggttctcagatccactttgaggtgtttaagacaggagatcgaggttggggacttcgtagttgggatccaattcgggcaggcacatttatttgtgaatatgcaggagaagttattgacagaaacagtatcattggagaagatgattacatctttgagacaccgtcttctgagcagaatttaagatggaactatgcaccagaattactgggtgaacccagtctttctgactcaagtgagacacctaagcaactgccaataattatcagtgcaaaacgaactggaaacatagctcgctttatgaaccacagctgctcaccaaatgttttttggcaaccagttttgtatgatcatggtgacgagggatatccacatatcgcattctttgcaatcaagcatattcctccgatgacagagcttacatatgattatggtcagagccagggtaatgttcaactgggaatcactatgaagcagcagggtgcattcagtgtttcaagatgccatgtaataaggttggccttcgtctggatgagaatgcaaaagagggtatttattgcagaaagcattggcattgtaccaaactttattggaataactagtatttagcgtagcatctgaattccgagaaggttggaaccgtgttactatgttcttgtagtgtagttgtttctcctgtttaagagaactttaccaactgtagaatgccatgcatatggttgcatcgcaagatcttcctgggcttcgcatgccagtcgtgcactcgccgtatgtttttctgtaatattaatggctacataatgcatcctgtaataatcatggtagtagctccagtcatctgctgaggttg

SEQ ID NO: 1289 - DNA, 328 bp, Oryza sativa
  ref <308>: DATABASE ACCESSION NUMBER: AK059337
  ref <309>: DATABASE ENTRY DATE: 2001-12-06
gaatttgcttattgttcgctgcctattaccagcacattaatttgagtcagttactctggctcattttctgtcataagtctgttgtgtcatgtactggtatgcaacataaaaaaacatgaatattagggaaggacctaatatcaaataaatagaagaggtgaggcttcgaacccaagccggctagcccatcaccttgtggagctagccggaagaccctaggcgtttctctactgatatgtaacatggatccattcttcttatatgtaaatacagtgaaaccttcaacttgttgaattccaaatctaatatagtatcttttaagtggttc

SEQ ID NO: 1290 - DNA, 893 bp, Oryza sativa
  ref <308>: DATABASE ACCESSION NUMBER: AK059338
  ref <309>: DATABASE ENTRY DATE: 2001-12-06
atctcacacacagcaggagaaaccaactcatagtagcttagctaattaacacgatggcctcctcttcttccttgtatctcctagctgctctgcttgcgctggcctcatggcaggccattgcttttgatcctagcccactccaagatttttgtgttgctgacatgaaatcacctgtgagggtaaatggattcccttgcaagaacccaatggaggtgaactcggacgactttttcaacgcggccaagtttgacatgcctaggagtaccatgaacaaggttggatccaacgtcaccaacctcaacgttctaaatttcccggggctcaacaccctcggcatctcgctggcccgcatcgactatgcgcctttaggtgtgaacccaccacacattcacccacgtgctaccgagctcctcactgtgcttgagggaacactctatgttggctttgtcacgtctaacccaaacaggctcttctctaaggtggttcataagggtgacacatttgtgtttcctaaggcaatgatccacttccaaatgaatttagaccacaataaaccagcagttgcccagtcatcactcaacagtcaaaaccctggagttattacaattgctagtgcggtgtttggatcaaagccaccaatctctgatgatgttctgaccaaggcatttcaagtggaaaagaaggtgattgattggctcaaatctcagttctgggagagcaactactgattatctcatactgattctccctaatcaattgatgcaagtatgatatatatgaaacctgtacttcattgtagtatgtagaataaatgggcttttgtcctatcaaaaatgtcataatatgttgtacgtgtgctttcttgctcatgtttaataaatgttatacaatgg

SEQ ID NO: 1291 - DNA, 1897 bp, Oryza sativa
  ref <308>: DATABASE ACCESSION NUMBER: AK059339
  ref <309>: DATABASE ENTRY DATE: 2001-12-06
cgatgagaacctttcccagtattctgtaattatgcttgatgaagcgcatgaaaggaccatacacacagatgttctctttggcttgctgaaacagcttattaagcgcagatctgacatgaggcttattgttacttctgctaccctggacgcagagaagttctcagggtattttttcaattgcaacatcttcacaattcctggaaggacgttcccggtagagatactctacaccaaacaaccagaaagtgactatttggatgcagcattgatcaccgtgcttcaaatacacttgactgagccagaaggtgatatcctcctttttttgactggtcaagaggagattgatcatgcttgtcaatgtctttatgagaggatgaaagggctagggaaggatgttcctgagctcataatattgcctgtttatagtgctcttccgagtgaaatgcagtcgaagatctttgacccagctcctccagggaagaggaaggttgttgtggccaccaatatcgctgaagcttctctaaccattgacggcatatattatgtcgtcgatcctggttttgccaaaattaatgtttataattcaaaacaaggactcgattcattggtcatcactccaatctctcaagcatcagcgaagcagagggcagggcgtgctgggcgtactggccctggcaaatgctatcgtctatacactgaaagtgcataccgcaatgaaatgtctcccacaacaatcccagaaacaaaggattaacttggggtctacagttctcaacatgaaggcgatgggaatcaatgacctattatcctttgatttcatggaccctcctgcacctcaagcacttatatctgcaatggagcaattgtacagcctaggtgctcttgatgaagaagggctccttaccaaactggggaggaaaatggctgaatttccactggatccaccactttcgaagatgcttctagccagcgttgaccttggatgcagtgatgagatactaactattatagctatgatacaaactgggaacattttctataggccaagagaaaaacaggctcaggctgatcaaaagagggccaagtttttccagccagagggggatcatctaactctgcttgctgtatatgaggcgtggaaggcaaaaaacttttcagggccctggtgttttgagaactttgttcaatcaagatccttaaggagagctcaagatgtgaggaagcagcttctcactatcatggacagatataaattggatgttgtctcagctgggaggaacttcacaaaaataaggaaagcaatcactgccggcttctttttccacgctgccaggaaggatccccaggagggatacagaaccttggtagagaaccagccggtgtacatacacccgagcagcgcattgttccagcggcagccagactgggtcatctaccacgaacttgtaatgacgacgaaggagtacatgcgggaggttaccgtgatcgacccgaagtggcttactgagctagccccgagattctacaagtcagcagacccaaccaagatgagcaagaggaagaggcaggagaggattgaacccctgtacgacaggtaccatgagcccaactcctggcgtctcagcaagcgccgagcttgatggctctcacctgtacaatgttctgcatgttctgcggcgctggttcgatcaaattccaaactggaaattttggtgtagctgtaaatattaatgtgactgttgtctcagctgtgtttcttacatgactgttgttagctgagcaggtattgacacatgtaatgtagccggactctgtcctttgttgagacagttcccatgaatttttccgtttgcctaaatgccaacgttcatcattaagtgatgcaattttctgagat

SEQ ID NO: 1292 - DNA, 1448 bp, Oryza sativa
  ref <308>: DATABASE ACCESSION NUMBER: AK059340
  ref <309>: DATABASE ENTRY DATE: 2001-12-06
ctcgagcgcagctgcgcaggtcgacgacccgggctccgccgccgccgcctcgcctcgccgccggcgcgctcgctcgctcggctggtccgcgtagtgggctgccttccatagtcggctctggaggagttttgagggagggaggcgcaggcatgggcgaggaagaagaagaccccgactggctccgcgcgttccagccaccaactacatcgacggtgatgctttcttcgggctccgatgattctcctgaaaacagtcctacacggactacaccatctggagaagaacaaaagggggaaaacaaggctagttcagaccatgcaggggatggagatgctgctgcactaaataagggcaaaaaggcaacacctactaggaggaaaacccctactagtcaagaagatgctttcgacaaagatgagaaaccaaccatggaatcaaatcaagataagcctccaaaacgctcgactccaaagaagaagttggttaaacccccatctggttctaatgcttcaaaggttactggaccaaaagctggtccagatcaaatagatgataccttggaacatcaagaagagggagttgctgaagaagaaatgcaggataaacttacagagcactctgtctcccagaggttgccattaatcattcctgataaaattcagcgttcaaaggcattgattgaatgcgatggtgactcgatagacttaagtggagacgttggagctgttgggaggataataatttcaaacagtcctaacggaaatcaggaattgttattggacctaaaaggaacaatatacaaatcaacaattgttccatccaggacattttgcgttgtcagtgtaggacaaacagaagcgaagatagagtctatcatggatgactttattcaattggaaccccaatccaatttatttgaagcagagactatgatggaaggtacccttgatggattcacatttgattctgacgaggagggtgacaagcttcctgaaccgcatgcttctcaaaacgatcaaaataatgaagatggggatcaacctaaggcaaaaaccaaaagaaaagctgagaaaccggcagggaagggacagaagaaggcgaaggttgcaggaaaggccactaagaagggtacaaggaaaacccaaactacgaagagaacaaagaaggcgaagaaatagacctgttgcgaaaccgggacgctaccagtaaagactagagaatccaactccaaatggatcagacttgagaaattccaaatgttgtatgatctgggttatcagtgtagcataatgtacttcttttaggcgtagaatgaaattagaagggatacacatgattgcaaaatccatttttatgtctatgaactctctgtctatcctcatttgtatgttgtataactatcaaatagccaaatttgaaaaagtctggatatcaaacacttgccattc

SEQ ID NO: 1293 - DNA, 1371 bp, Oryza sativa
  ref <308>: DATABASE ACCESSION NUMBER: AK059341
  ref <309>: DATABASE ENTRY DATE: 2001-12-06
atccaatagacgttatccgccatacttgttttttttctgttgctgagctgtcgcgccctgcagtgcgccgcatgatacccccccgacccatacttcctaggtactaagctacccgatcgcctgactggcgtgctgcaagaagcaagataatagagttgctccccggatttttgtcattgagatcttttcgtaatgtcaggtgcggacaaggtagagaaattctccgatttctcaaatgtccaattctccagacccgaattttcagatgcggaggatgatcctggaaaggatgaatatgaaggcggatacacacaacaatcactaatgagagtgcctacagcacctacaccatcacagccactttcaaagaaagacaggaagaagttgaaaaggcaagaagagaaggccgctgcagttgcagaagctgcctttgtgccacctccagcaccagaccctccagcagctccagcgccagcagatgatgaatccccagcagccgcaacgtccagcaagaagaagaagagcaagaagagcaagaagaaggaaaaggagtcaaagtctcttccagttcctcctcctgtgccagctcccccacctccaactgccgaggagagcaaggaggcggggaaggtagaggaggaagcaaaggaggagactgaagcacctggattgactggaacacaggacacggccaataacaaagactcaccaactgcggaagaagaagaagttgtcgagacagagacaacagcagaagatatggcgtcaaagaaggaggagtcacccagggaacaaacatcccctgaggaggttcccccttccaatgaaacatcagctgctgaggctgaagagacgcccgtcaaagaagaagcccctgctcaagaaggcgcactcaaagaagagggagaggcgccccaaccagaaggccccgccgacgatatatcaaatgatgaaccggcaagcgaagaaggcatctcgggtgagaagtccgcagtcgatatccccgagtcaaaagacctttcgattgagacaccaaaggatgatgccccaatggcaggcgaggcattaatcaaagaacatgaacctgcgccaaaggaagctcccgaagagcccacactagcggagaaggctacagaagactctcctgtaacggatccctccaagaaagagtttctggtgactgaggaaacgccctccacagagggagtacctggaacagaggaggctcctcccggtgaagagtctccagctaaggaccaaacctcagttgagccagaaaaatccggggcgccagagaaggatggcgatggtgatgacaagcctacagctgctaccgaaacaaagtctctgaacaagagtcagaagaagaag

SEQ ID NO: 1294 - DNA, 323 bp, Oryza sativa
  ref <308>: DATABASE ACCESSION NUMBER: AK059342
  ref <309>: DATABASE ENTRY DATE: 2001-12-06
gaatcggtgctgggtgaaagatgaccatgccgcggcctgtattgatggtcgatcagaggcggagactgcaatggtgggcgtccatcgatcatcattcccacccaccaattaagtagcagaagcaagctccccgcaaaaaaaaaaaaaaaaaaaaaaaaaaaagaaggtagcagaagcaagctaagatagactgcgagaagatttgtactacaaccaacaatagggatatatatagaatggagcactgtgatgttagatgtgcaaagtagcttgaactagggactcatattaagctgcttctctccgatgaagcttgcaaactc

SEQ ID NO: 1295 - DNA, 597 bp, Oryza sativa
  ref <308>: DATABASE ACCESSION NUMBER: AK059343
  ref <309>: DATABASE ENTRY DATE: 2001-12-06
cgaggaagaaaggcaaaaaatgcacctaagaaaataacatccatcctttgcccagaatgccagggtactggaatccatgttgagggagatgaactggaaaaaccaaccatttctttatctgagatgtttcgctataagctgaaagccattgaagcacacaaagcatggatgaagagccctgaggtgcttgagaactgttccactggacttcatttccctgcagagcaaatagagaactctgaggagcaggtgattccactgaagtcggttgctttctatgcagctgacgggtgagatgtcctgctaaggccatggaccgtgcctcgtcgctgccagaaacgagagggattctgccagggacgttgtaaatttactagagcagctgtaaataagcttgcttgacgatactgttagagatgctgacagtgtagttcgcttcggtttagcctgtaattgcgttgtacctatgttaacctgtctgtcctgagatacaatgacagccagtagatggaactccagcagaactgtataaagactgggtgttgtaaccgtatatgtactgtccgtatgctttgttaaaacaagttcttgtgtttt

SEQ ID NO: 1296 - DNA, 1035 bp, Oryza sativa
  ref <308>: DATABASE ACCESSION NUMBER: AK059344
  ref <309>: DATABASE ENTRY DATE: 2001-12-06
atctcgccgcccattaaggcccgagagcccccattccgccagatccatgacggtctcgtcgccgtcggcggaggagccgttccgggtgttcgtcggctacgacccgcgggaggacgaggcgtacgaggtgtgccgccgcagcctgctccgccacgcctccatccccgtcgacgtccgccccatctggcagccggatctccgcgcggcggggctctactggcgggagcgggggcccaccgagagcaccgagttctccttcacccgcttcctcacaccctacctcgccggctaccgcggctgggcgctcttcgtcgactgcgacttcctctacctcgccgacatcgccggcctcctcgcctgcctcccctcctccgaccccgaccaccgcctcgccgtcgcctgcgtcaagcacgagtacgcccccgccgaggcgaccaagatggacggcgccatccagaccgtgtacccgcgcaagaactggtcgtccatggtgctctacaactgcggccaccccaagaacgtcgccgcgctcaccccggacgccgtcagcacccagaccggcgccttcctccaccgattcgcctggctcgatgacgacgagatcggcgagatccccttcgcctggaacttcctcgtcggccacaacaaggtcgaccccgccgacccgtccacgcagcccaaggccatccactacacctccggcgggccgtggttcgagaggtacaggaactgcgacttcgccgagctctggatcaaggaggccgacgagctcaaggccgacaaggagaagcagaagcagcagcagatcgtcatggccaacggcgagaaggagaaagacgaggaggggaattgaatcgaatccaattgaattcattgtgccgcattgcgttgcaattttgcatcgaattggttcaaatctgttgtttattgggttggggttgggtggtaggctatgagtggatagctctagtattggtagtagtacgcttttgtgtagcggcaaatcaatctatctatgagtcctcaatgttcagg

SEQ ID NO: 1297 - DNA, 815 bp, Oryza sativa
  ref <308>: DATABASE ACCESSION NUMBER: AK059345
  ref <309>: DATABASE ENTRY DATE: 2001-12-06
agaaaggtgtcggcctcgagctccgtggctcgcagtaccaccttgtgccaagatgggttactatcttccgccgaattttcaactggagactagccaagctttccacaggagagttttcagaagcttatgtcctgagtcagcatctttatcagacaccggcagctgattcacttccaaatggaggaacccagcatgatctctctgccagcagcaacaccacggatgaggcggcacccattctggaggatcgcggcatggcgccttccgtgtcgtcccgcctctccctagatgagatcatcgagatcagctgcgatctcgatgccgtcagcgccctgccaccggcgaaaccgttgccaccccaaccgcccacccaggttcgctatgaacctcaaccaccgggtggggtgaacggtgtgcttggagctggtgatggcgtgcggatgccgagaaggacggagcttagagatttggtgcccattgagagggatgacaagcttgcgaggctactggagcagtgcagcaagctgcaagacaggatcgacggcacgctctccatatacttctgagtcatgagccttcttttttgtttgaaggccacatatacttcctaaaggtttgaaggggcaactagaactagctgtagctgttacgctcctgccttctttgttgtaagctgctgtaacattagtatcatgctgtgaaaaaccatttttacggccatatgagtgggcccagagtagagtagggtctacatgtaagagattccaaccgtactaaagagaattttttttttaatttggcgtgatccaattatc

SEQ ID NO: 1298 - DNA, 1371 bp, Oryza sativa
  ref <308>: DATABASE ACCESSION NUMBER: AK059346
  ref <309>: DATABASE ENTRY DATE: 2001-12-06
ctaatcgttcgttggctacgtccctatccgcatccggtagccaccccgcaggccgcggcgacaagatcaaaggatgctctcgttgcggccgccttgtactctgtcgcccgcaccgtggcggagacggcgcaccctccacggagccgcggggaccccgcagcgcgtcagcgtggcggcgccttccgccatcgtagaggccgtttcgccgccggcgaggttctctttcccgatactggtgaatggatgcactggtaaaatggggttatctgtggctgaggcagtcacttcaagtggtcttcacctagttcctatttcattcagtagtagagatacgctagacagaacagtacgggttggtcatacggatgttcggatatatggtccttctgcaagagaagatgttctatcatctgttattgatgaattcccagatgttgttgttgtggactacacagcacctgactctgtgaatgctaatgctgagctctattgcaagctcggtttgccatttgttatgggcacaactggtggagataggcagttactctataaatcagttcaagattcaaataactatgcactgatatctccacagatgggaaaacaggttttggaatcccatcaagctggcaagctggacatatctggtacagctaaagctgtaattgcgtgttttgagaagttaggtgtgtcatatgacatgaaccggatggttaagattagggatcctgagcagcagcttgagatggtgggtgtccctgaagaacatattgaagggcatgcattccatctgtaccatctcacttctcccgatgacagtgtttcatttgaattccagcacaatgtctgtggccgttcaatatatgctgaaggatctgttgatgccgcaatgtttctgcataggaaggtacgctccaatgattccaaaagaatttacgatatgattgatgtcttgagagaaggcagcatgcggtgaagttgatgaagtccgcatgaacaatatgtttagtctgggaggactattggactatagcatgatcatctgatgaaattagtaagtagctatctcatagtggagaagatgatgttccagtcaaactttcccagtgaacagtttgaagcaacccattgcagtaaagtttcttctagatcactgctttcaaaattgagtattaggcccctacatctccatggtaagttgatgatcgcttatcaccgttttggttactatcgattgtataatgttttctttaaaaaagttaaccgaatttggttagctgttagatgtgcttggatgtaagtattcttcagctccaaatgttgatccgactgaaactttcgtccctgacgtagaaatctattttctgtgtc

SEQ ID NO: 1299 - DNA, 1410 bp, Oryza sativa
  ref <308>: DATABASE ACCESSION NUMBER: AK059347
  ref <309>: DATABASE ENTRY DATE: 2001-12-06
tcaaatggctggggatttagctgaggctgaggatctggctgagtgtgggatcactcataaactgcatattctctcaagaatagggttgcttattgtcaaagaacttgataagcactgcaagatgtcagattctccacgtcactttcccttgccctcatcttatttcagagtgtctggtagcgcaagaaaaacagatagaatccttggggctcatggaccagtacacccggatgatacaaaatgttctgataatgctgagagggtatcaacagaagttgctcctgacaaggaagctcgttcctcattaagcaacatcggggaacaaaatgcaagttgtcatgataaaggcaaaaggaacaaaaaacaggatcagactactaatcatagtttggaaaaagagaaggtgtcatcttgtggttctgctggcacgaagttgtcatctccagcctctttgggtttagctaaggaagctgattctatagacagcatctctctcttagaaaaccagaatcgtccagagagtagaagctccactggggaaactagagcttcggagacagatcataactattctaatcgccgagaaactgtgatgaaagatacaggcacggtgcttgttgggtgtcgcattagattgtggtcagcacgtgatatgtgttatatctgtggaactgttgagacatatgatcagtcaaatggctttcacaagattatctatgaaaacggcgataaggagttagtgcgcttggaatgtcagaagtgggaattcattagtgacacaatttcaacagtaaaggacattcccaactcccatcccagatgctgttctttcaagagagttcgtgggaagggttcagctgattctcaaaacaaaaggcaagagatgttgcttcctggctcttctattgtctgtgatcctgatgaagatggtgatattgacgacaattttgtgaagcagcctttttcaaataacagaacaggagtcgctggcctcaagaaaaacagcaagagagcgttggattcgagtaatgcacagaccagctctggattaactgcttttaacccggtagataacgttcggtgtactagatcaaggaaggtgcaactgtaagtctaaacatagctgatttgtgtagaatatttattctcaggtcgggaatacctgttgtgcatcagataatgagtattgtggcgtttacaaaaaatcttgtttgcatcaccatatcaccttgtaaatacaaaatagatagtcagatgagcatatatatcatttgttgatctttaggcgatttgccattgacaaaggcaacactggtttgttacttcgttttgttctggatcggccactggaaaaagtggcacagccgttcagcatagtcagtaaaagtcagagcacgtgttttaactttg

SEQ ID NO: 1300 - DNA, 1209 bp, Oryza sativa
  ref <308>: DATABASE ACCESSION NUMBER: AK104066
  ref <309>: DATABASE ENTRY DATE: 2002-08-28
cgcatttgggtttgtccacaagatagcaacctttgagaaggctgctggtttccaggcacttatccaatatactgatgctccaactgcactagaagcaaaaaattcgttggatggaagaagcatcccgagatatttacttcctgaacatgtccccacctgtcacctgcgcataaccttttctgcgcacaaggatttgaatatcaagtttcaatcacatcgtagcagggattacacgaatccatatcttcctgtgaatccaacagcaatcgagggaatcgcacagcccactttaggccctgatgggaagataaaggagcctgagagcaatgtgcttttggcttcaatagagaacatgcagtatgctgtgacggtggatgttctacatactgtgttctctgcttttggtactgttcaaaagattgcaatgtttgagaagaatggtggaatgcaggccttaattcaatatccagacatcacaacggcagcagttgctaaacaagctttggaagggcactgcatatatgatggaggttactgtaagcttcatctgtcatactctcgtcatactgatctcaatgtaaaggcacatgatgagagaagcagagactacactgtttcatcagatcctagtgcacaaatgcaagctgcagcgcaagccccaggtcctagcactccaggagtggcatggcaaaacaccgcacccagtgcttccttttatggcagcactgcggcagcgactcctgttggacaagtgccagcttggaatccaaacatgcaggcaggtgcttttggatcggcatcgtctgcatacccaacccaaccaatgatgccaggatcagttccacactatcaggaattggatccagttccggagcactgccagtatcgttccaggcctcacatcagatgccacagtatggtgtacccccagctgctccacaccatgctccaccggctggccaaccaatgtatttcccgaaataatctatctttatccgatgtacaagcaattagagcaattgcaaatgttgcctgcaatactcgggtctgggtatcttctcttcaaattttgggttgtaactcgtctatgcagctattcatattgtaactcagtgagctccctgtcgcaaatgtgcctctgcgtcagtcgctgtctgtaaactgtccggcaattagaaattcccatccttagcatgcctggtattgttc

SEQ ID NO: 1301 - DNA, 635 bp, Oryza sativa
  ref <308>: DATABASE ACCESSION NUMBER: AK059348
  ref <309>: DATABASE ENTRY DATE: 2001-12-06
gatgctgatgaggaggaagaggaggcggcattagaagatttcaggatttctgaggatgatgaggatgaggatgaggatgaaggggaagatgaagaagtggagcattttggcttataaggtgactgaacgtagcgtttacttgacggtgtttaggagaacctagtcatgcctggtgtttctttccaggtgattaaaacggaaatgaaattgtcaatatcatatcagtaggggtggctgattgctagtctgtaaatcgactcttctctgggtcaatctcgtatgctcatgtcggcaatgtatgccacgattctataaaacttgatattgaacttctgtttcctacagctgcaatgcccaaagttcatcgcaaattcttggcgagagaaggaaagctaaaaatctgttcggttgtagttccatataaccttagccggaagaggaccctctgactttcttccttctgactttgagtcactgatacgtgagtttattgggtagagggtccacatatcaatgatataagttaaatataagtaggttagagcatctctaacagtctatccaaatttgactgtccaaatgtctatttggccaactctccatttaatttagcaagtcaaattgtcttttactcc

SEQ ID NO: 1302 - DNA, 1309 bp, Oryza sativa
  ref <308>: DATABASE ACCESSION NUMBER: AK059349
  ref <309>: DATABASE ENTRY DATE: 2001-12-06
atcgaattcaggcgcaaaaacctccaaaacctttgcaatattcctcgtaaatcgtaattccccctcgcgatcgagctcgcgacgcccatggcgatggagagaaacgcggcgccgcgcgtctcggcctcgtcgtcggcggcggcgtcgccctccaccgtcggtgcgctcctctcgaaggcctcggtggctgccgctcccgcacgcgagatcccctcgccgcggtcgctgctgtcgcgcatcctccataggagtggcggcggcggcggcttcgggtgtcgccttcgcctcccccgatactgctccagcggcgcggccgccaaggaggacgccgccgccgagtacgtggaggttgaggttgaggcggaggctgcggcgccgaaggtggtgggccgccaagcggttgatcgcgagtcgcctcggagctcgctcgggaagaaggcggcggaggaggtgtcgccggcgagcctggggctgggcgcgagcctcatgctgctgctctccaagagcgcggcggagctgaacaggatggcggagctccgcgcccagatggagcggctggtgctcgacaccaagggggaggaggaggcgcggagcagcaaccaccccaacgcgtccgacgatcacgccgacatcaccaaggaggagcccaccgccttctccggcggcgcattatcccgctgctcacgcacggccgccgccccgggaaacgcagggcaccacgccgccgttccaatggaccagatggaagcggagctcgaggcggagctgacgctcctgcaatgcgcgactcctcgtcgggatcgtcaactcgagatcggcgacgacgaggaggagtccacggacacccacgcggccaccttcgccgacgccgacgatgacacggacggtgctgacgacgaggaggaggaggaggaggagagcggggcggcggcgcagggcggcgtgtcggcgagggagctggagaggaggctgcacgagctgctccagtggcggcacgaggagcggatcgcggagctggagacggcgctggagcgcgccaggaagaggctgcaggagaaggagcgcgaggtttgctggtggcgcaacaccgccaagctcgtcacccgccacaaggacgactcccgcctcagatagcaagaattaatccgccatgagatgagatcaaacaagaacaagatcaagatcgatcatctcgcctcgcagtgatccgttttgtactctggtgatcatgctgcaactagactagaagaacaaattccaaccagaaaacattgattgcataaactaactgggatcacagattcacagg

SEQ ID NO: 1303 - DNA, 1976 bp, Oryza sativa
  ref <308>: DATABASE ACCESSION NUMBER: AK059350
  ref <309>: DATABASE ENTRY DATE: 2001-12-06
aatctctcccccaatccgtttcgtcctcctcgcgagcgatccccacctcgccgcagttcgccgacttttcgccgccgcgtcgcgctcccccgaggtccactcctctcctgccggagaagcgggcctaggcgaagagcagcgccatggcgaccgcttcggtgtcgtttaagtctagagaggatcaccggaagcagctcgagctcgaggaggcgaggaaggctgggctcgcgcccgccgaggtcgacgaggatggaaaggagatcaatccccatatcccccagtacatgtcctcagccccatggtatcttaacgctgataagccgagtttgaagcatcaacggaattggaaatcggacccgaactacaccaagtcatggtacgataggggtgctaagctttttcaggctaacaagtacaggaaaggagcttgtgagaactgtggagccatgactcatgacaagaagtcatgcatggaacgacctcgcagtgtgggagctaaatggactaacatcaatatagcaccagatgagaaagtggagtcatttgaactggattatgatggaaagcgtgatcgctggaacggttacgacccatcgacgtacacccgtgttattgcagattatgaagctagagaagaggctaggaaaaagtatctgaaagagcaacagctcaagaaacttgaggagaaggatggtgaggagggtgacgagaacgtggctagtgaggaggaggatgaagaagatggtttgaagatagatgaggctaaagttgatgagagtgctcaaatggattttgctaaggtagagaagcgtgtacgtacaacaggtggtggaagcactggaactgtgaggaatttgcgtattagggaagacactgcaaagtatcttctgaaccttgatgtgaactctgcatactatgatccaaaaacccgctccatgcgtgaagatccattgccagatgcagaccccaatgataaattctatgtgggtgataaccaaaatcgacttagcggacaagctctggagttcaagcaactcaacatacatgcgtgggaagcttttgataagggacaggatattcacatgcaagctgccccatctcaagctgaacttctattcaagagttttaagatcaaaaaggagaaattgaaatctgaaaacaaagataagattatggagaagtatgggaatgctgcatctgaagaaccaatccctcgggagcttcttcttggacaaagtgaaaaagagattgaatatgaccgaactggtcgaataatcaaaggacaggatgtagcccttcccaagagcaaatatgaagaggatgttttcattaataaccatacaaccgtatggggctcatggtggaaagatcatcagtggggctacaaatgctgcaagcagactatccgaaatagctactgcactggcttagctggaattgaggctgctgaagcatcggctgatttgatgaaggcaaatatggcccgcaaggaagctgcagaagatgagcctgtacgacatgaagaaaagcgactggccacctggggaactgatgtgcctaatgatattgttcttgacaagaagctgcttgatgaagccctaaagaaggagggtgcgaggaggaaagaggagatggatgaaaggaagaggaagtacaatgtgaaatggaatgatgaggtcaccgcggaagacatggaggcttaccgcatgaagagaattcaccatgatgatcctatgagggatttcctccattaggccttgtatgctccatagttgctcatatatgagcacaacactctgccttgcagtgtcacttgtgtaatgtattagctgtggctatgtcttcctctaactggagtgataatttagagctaagagctctctacttctcttccagatgttaccatcctcttgtccggatggttgtgtttgtattgctgatctttctataaatgatatggaaaaaaggagttgcat

SEQ ID NO: 1304 - DNA, 694 bp, Oryza sativa
  ref <308>: DATABASE ACCESSION NUMBER: AK059351
  ref <309>: DATABASE ENTRY DATE: 2001-12-06
aggagagtagagcatgttgaccatgctcgcaaatcagccgagcaggccgtgaaggcgatcaaggcgaaggaggccggcgagtcggtgccggagtacgactacctgccctacttctactcccggtcgttcgacctctcgtggcagttctacggcgacaacgtcggcgaggatgtgctgttcggcgacaacgaccccacggcggccaagcccaagttcggctcgtactggatcaaggacggcaaggtcgtcggcgtcttcctcgagggcggctcggcggaggagaatcaggtcattgccaaggtcgccagagctcagccgccggtggccgacgtcgaggctctcaagaaggaaggactcgacttcgctgccaaagtctgaacctctctatgcacacgcatttcattttgtggacgctgtgatgctgccatcttttcgattctgagcttcgtagtgattttgttagctccgatcctatatatggaggatttgttttgttctcattgtgaatttgtgatgtagtcactgtggcgaggtcccaataatgtctgtactctgtagcttctgtgattggttgttttctttttaaaaaaacctgtgtatcgtctgtgtttcttttttttttatcacggattaggctgttctttgctagttacttaagaagatttgacaaatgaaatcagaacagttttaggcc

SEQ ID NO: 1305 - DNA, 788 bp, Oryza sativa
  ref <308>: DATABASE ACCESSION NUMBER: AK059352
  ref <309>: DATABASE ENTRY DATE: 2001-12-06
agagagactcggtgaaatagacatgtctgtgcagaaaacatgaagtccaacagaaggctaactccaaagtcagacatatatgctttcggcatcctcctccttgaacttatcagtgggaagcctccgcttcagcactcagtattggttgcaactaatcttcagacctatgtccagtctgcgagggacgatggagtggacgtcgaacgtctctctatgattgttgacatagcatctgcctgtgtccgatcctcgcctgaaagtcggccaactgcctggcaagtcctcaagatgattcaggaagtgaaggaagcagatactgccggagacaatgacagcgatcttactagcaattcctagtcatggatgggtttatgtcggcaggattatctgaattctgaagtgatccattcgatgttgcatgcattgatctgctcagaaaaaaaaagccagtagaacagttcctaatgtaggtgaatggctgcggggtcatgatctctctgactagttcgcttccagctaagaattttagcatgctgtaaaatgttttcgtgattttaaacttagtttcagcatgctctttgtctgttggtagtcttactaaagtagtactggaatacccagtgcttagaactctgagaacttatattttgaacatggctcctctgtgcagtgagggtttgtttatagtgcttgtaatgatatggccttgcatatcgaaaaagatcgtactcgcactactactaccttgtactcctcctagtacatgttgaaggacttcattttcagat

SEQ ID NO: 1306 - DNA, 623 bp, Oryza sativa
  ref <308>: DATABASE ACCESSION NUMBER: AK059353
  ref <309>: DATABASE ENTRY DATE: 2001-12-06
aagcaaaaggataggaaggagccaagaacaccaagaacttgttggagctgagacagcagcaccaagcaagaaaccggatccaatccatccatccatccatagtttccaatggctggcaagtacatcgccgctggtcttgttggttcctttgccatctcatatgtttgtgatcattttatcgctgagaagaagatatttggaggcaccacaccacataccgtgtccgacaaggaatggtggcaagcaactgacaagaagtttcaagcctggcctcgcactgctgggccaccggttgtcatgaaccccatcagtcgccagaacttcatcgtcaaggatctcgagtcctaagattgtagtgggagcatatatgctgaaggttgcgccgtgactaagatggcgatggctgtggctacaaactacctacctatgccgtactcccgaaccagtacgtgagtacttggtctcaataaaacagaactattttgcctagtgcagcctgaacagaacctgaagcatatctgctttagacattgtcatcttggtgattgttcttatgcagtaacaacctctactttgtgcttgtgctattgtgagtgaatggaactatctgtctgtcacactgg

SEQ ID NO: 1307 - DNA, 1216 bp, Oryza sativa
  ref <308>: DATABASE ACCESSION NUMBER: AK059354
  ref <309>: DATABASE ENTRY DATE: 2001-12-06
accgcacaattaatctcatcactcttcacccgccgcgacctccggaagcaaacgccacacgcgcctctccgccatgcttcctcctagggttgccccggccgccgccgccgccgcgcctacctatctcgccgccgcggcctcgacccctgcttccgtctggctgcctgtgccgcgtggtgccggacccggggcagtgtgcagggccgccgggaaagggaaggaggtgctcagcggcgtggtcttccagccattcgaggagctcaagggggagctctccctcgtcccccaggccaaggaccagtctctcgctaggcaaaagttcgtcgacgagtgcgaggccgccatcaacgagcagatcaatgtggagtacaatgcatcgtacgcgtaccactcccttttcgcctactttgatcgtgacaacgttgctctcaagggattcgccaaattcttcaaagaatccagcgatgaggagagggatcacgcagagaaactcatcaagtaccagaacatgcgtggaggcagggtgcggctccagtccatcgtcacacctttgacagagttcgaccatcctgagaaaggggatgccttgtatgctatggagttggccttggctctcgaaaagcttgtaaatgagaagttgcacaacctgcacagtgtggcatcaaggtgcaatgatccacagctgaccgacttcgttgagagcgaattccttgaggagcaggttgaagccatcaagaagatctctgagtatgtcgcccagctgagaagagtgggaaaggggcatggggtgtggcactttgatcagaagctgcttgaggaagaagcttgaatggaggagactgtgtgaagggcagtagtaggtttcgtttcttccatccatgggatcatgcagctaaagaaagaaaataagtcgagtctgtgtattcatcaaattaagcacgcagtagcaatggagtgaatgaaccaaccaatttggtcatgaacttccccctgtgtctaggtcagtagagcttcagaatcatgtgtatgtcgcgcgtcctcgcagaaaaggaacatggcgccgctggctgtagcgatacttgtgatattgtggctatgcatggagtcatggtgatggtgtattttgggggcatttacacgtttgttgctagagagattttgctggcagccaataaggaacaatatgataaaccattgtggtgttaatgcttgtttc

SEQ ID NO: 1308 - DNA, 795 bp, Oryza sativa
  ref <308>: DATABASE ACCESSION NUMBER: AK059355
  ref <309>: DATABASE ENTRY DATE: 2001-12-06
aatgcatctatgtatctcccaaaccagatgatggtactattggaagaaagattctggaggagattgtagtgggaaaccatcggccaccacgtcctccaatggattgtagtacctatcccaactatttgtcatatttctgggctaacagcaacaacacacgggaaaatcttggaataaaaaagggaactgtggatgagtgggtgaggtgccatgacgatggactaccttattctcaggacatagagagcagtattaagtaccatcaaaatcttacatctagaggctatcgtgtcttggtatacagtggcgaccatgattccgtggttccatttttgggtacacaagcctgggtaagatcactcaactacccaattgtggatgactggagagcctggcatatcgatgggcagtctgcaggattcacaatcacatatgcaaatgacttgaccttcgctacggtaaagggtggtggacacactgcaccagagtaccagccggagaggtgtcttgcaatgtttgggagatggatttcagagaaatcactttgacgattgtgtatatcagttatgatgagagctgctttgattattatctaatgaatgatacatcccttggccagttcattgggcaaggaggtagctcaggtgaggcgcattatggtagaacatgccacagaggaccagaacaagctttagatgattactaaagtgaatatgaaaggatacaaataatcctgagatctctcagtgatactctcttcgtttttttaatagatgacaccattaacttttaaac

SEQ ID NO: 1309 - DNA, 1675 bp, Oryza sativa
  ref <308>: DATABASE ACCESSION NUMBER: AK059356
  ref <309>: DATABASE ENTRY DATE: 2001-12-06
tacacttgctgctttaatttatttaccttacattttgctactcacataaactttgttccagaaacattgtttgaaaatatggtgatttttttaactattgttgataaaaacttggtgctgttatggacctggcctgatctgtggtggcgaatgagtgaggggatggcatcactctatatatgcgaaaagccgaaaacagccatgtgttctgctctttgttcctttttgtttaagttttgttgctgggataacactttgtagcctgcctctcatgaatcatgatggaaatggaaggggtctccctcttctggctataatacatttgcttctcaaatattacagtacatttctaaaggaaagaaaaaaaaagatatggtaaattgaaacttccatgcctttttccatatctatttataggttttgcacgtgttgtccaaatgtgatcctttatagaggtcacacctttatccaggtttcttatccgagctaatcgaaatccaagaacaaaaatactactgtggcaaaaaagaataaggaagaacataaggaactcccacatgtccaaaaatggaagcaattagtttggtttcaatacaggccacaaaagaaatggtcagctcaactcctacggttgaggctcacacctcattcaccctgtcctgagcaatcctttttaggctccttcctgcaaggctgcaactatataggccgatgaggacagaagggggaaaaaacacaggcgcattctaccgagaggcacaggggttgcaagaagtcgcctaattctcctattgaattaggcacatcttcgcccccacattgcctctcattgtaaaatagtatcaactgataatccacaggaactaaacaacaattaaatccaattatggacggattggtaggcctcttgaaaatacgggtggtgcgtgggattaaccttgcctaccgcgacacaagaggcagtgatccatatgtcgtccttcgcctcggcgagcaaaaagtgaagactagtgtaaagaagaaatctgtgaatcctatttggcatgaagagctaactttgtcgatcatgaaccctattgcaccgattaagcttggggtgtttgacaaagacactttcagtagagacgacccaatgggagatgcagaaatagacctggagcccttcatggaagttctgaacatggacccggagaacattcggaatggttccatcataaaaacaattcgaccatccaaccagaactgccttgctgatgagagtcacctattctggaggaatggtaaatttgtccaggacattattctccgacttagaaacgtcgagagtggtgagctgcaagtgcaactgcaatgggtgaaaattcctggcaggcactaagtgtctcatggccattgggagatcttggctactgagatatcattgacatttccgaatgccaaaacatatattgtgcgaaatggatcatgtcaaccattggggctgtaaatactgtgcaaaaaatgaatcatgtcaagcacgttttgatgtggaggttgtgaccagcaaagggttcatcaggttagtcaatgtctgtaggaaaggaaaatgatgttaaaatgttgttgccgaaatgtattgggagcatgatcagtaaagcttgggatgacataatcaaatagtacaaacgataggacc

SEQ ID NO: 1310 - DNA, 1453 bp, Oryza sativa
  ref <308>: DATABASE ACCESSION NUMBER: AK059357
  ref <309>: DATABASE ENTRY DATE: 2001-12-06
tgtgttgtcaaggattctggtaggtattggagaaggtgtatcaccatcagctgctacagatttgattgcaaggtccatccctgttcaagaacgatcaagagcagttgctgttgtgtttggtggtttgagctttggaagcgtattaggactattgttcgccccacctattattcagaaccttggctgggaatctgtcttttacatatttggacttcttggaattatttggtgtctagggtttcaatctcttaaagaacaacagttaaggggcaatgaagatatacaagtaatacaagatttggggcagagtccttctggatcaagtgacctcatctcgtcctctgtgtctccaaaatcatcggagtcatcattgggagagctgatgaattcactaaaggatgttccttggagagaatttttcaaaagcaaggcagtgtgggcaatgatatatgctcacttttgtggaagctgggggcactatacttgcttgtcttggctaccaacattctttagtgaggagctggacctgaatttgactgaagcatcatgggtgtcagtccttcctcctttgggctcaatgatcattacatctattgctgcaccttttgcagacaacttgatatcaaatggagtagacaccacaaaggtacgaaagatatgtcaaacaattgcatttctgtcacctgcaactttcatgatgctttcctctgtggatcttggtgtgccaccgtgggaaattgttgcttttcttacaagtggtctggcactctccagcttcgcattgtcaggtctttattgcacccatcaagatatttctcgtgagtatgcaagcattctgctgggcatcacaaacactgtaggtgctgtacctggaatagttggcgttgcactaacaggctatcttcttgatacaactcattcttggagtatatcacttttcgcaccttcgatatttttttacctgacgggtactgctgtctggctagcatttgccagcagtgagcctcaggagttttcgaagtcagaaccggagtcgtcgtgagtcatgacttggatggcaaatagtatatacagttcccagaggggatcagttcaggaagaattttgtcagatgtagtttccctggcaaagcgttggatttttggacattggacaggagaatacagctcattggatattggcaaatttttggccaattttagtttaggcttttgtgtagcgagtgtcatttcacgttctgacacgatttccttttccattacggggagttgcgttgttttctgcagtagtatcccaggtaacggtagaagaagtaaatttgttgtatcatatgacatctttgggcatatgtgatgattgatggagttcattacgacgtgatccttgaccatgtatttagtgaattcttgccagttcgatattatggataaagttagtgttttcgttttttttc

SEQ ID NO: 1311 - DNA, 1270 bp, Oryza sativa
  ref <308>: DATABASE ACCESSION NUMBER: AK059358
  ref <309>: DATABASE ENTRY DATE: 2001-12-06
acttgtctcgcttcctcctccgactcgcctcttcccaccaactccttccccgatggagtccctcctcgccgcctcttcctctctccccgcggccgccttctcgccgccgtcgtccctctcttcgacctcctcgtcgccgcacgccctacggtcggccgtcgccggagccgcccgcgcggtgcgctgctccgccgccaaggattcgatcctgtacgcgctggagcacgacgagatgtttaactcggcggaggtgatccagtgggagagcggcaagtccatcaactccatcgccgccgcgcagggcatccgcatccgccgccgctgccgcccacgctacccctccgagggctccggcgccgacaaagccgtcccccgcaacatgctcgagcagatcatctgggacaaagaggtcgaggtgtcccagaggaaggcgaagaagccgctgcagaaggtgatcgagtcgagccagcacgcgccaccggccagggacttcgtcggcgcgctaacggcggcctacagccgcaacgtcgcgccggcgctgatcgccgaggtgaagaaggcgtcgccgagcagaggcgtgctccgggaggacttcaatccggttgagatcgcgcaatcctatgagaagaacggcgcggcttgcctcagtatcctgaccgacgaaaaacactttcagggtagctttgagaatctcgagaccgttcgcaattccggagtaaagtgccctcttctttgcaaggagtttgtgatagatatctggcaaatctattacgctcggtcaaagggtgcggatgcaattctgttgattgctgccgtgttacctgatctcgacatcaagtacatgcttcgcatctgcaagaacctcggaatgacagctctcatagaggttcatgatgagagggagctggatcgtgtgctcaaaatagatggcgttcagcttatcggcatcaataaccgaagtttagagacgtttaaggttgatacttcaaacacaaagaccctgttggagaaacgtggtgacctcataagggataaagggattctggttgttggtgaatctggtcttttcacgcctgatgatgttgcatacgtgcagaatgctggtgtttctgcagtaagtttactgattacccgttttcagctaagttggtcatacatgtgcttcaaatttccagctgaaatattgtacggaacgtctgaaatggattaagaatatctgtaattggacttaatatttatccacgatataacaaataacactaattctggg

SEQ ID NO: 1312 - DNA, 960 bp, Oryza sativa
  ref <308>: DATABASE ACCESSION NUMBER: AK104067
  ref <309>: DATABASE ENTRY DATE: 2002-08-28
gagaaggctgtgttgacagaaagtttcaagcagaacactgtaaaagatgtatcagtagtgaacataatggacttgtcggatgatgagtatgatgatcctgactacatgcaagatcgaggtgatgtggcacaacctgtagatcaccctcgggccgtgaaaacgggtgattcatttttcaccaatctcataaagaagagcttcaaaattaacaacggaatgggcaatggcagagcaaaggttttcattaatggctatcccatctctgatcgggcggtcaggaaggctgagaagatagctggaccaatctatcctggtgaatactggtatgattaccgtgctggtttctggggtgtaatgggacagtcttgcctcggcatgataccgccatatattccagaactcaattatcctatgcccaagaaatgcgctgctggaaatacaggtgtatttgttaatgggagagaacttcaccagaaggatttggatttacttgtgggtcgaggactcccagattctcccggtagatcatacagagttgagatgtccggtaaagtgtcggatgaagtctctggtgaggagctgtattgtctcggcaaacttgcaccaaccgtcgagaaaatgaagcgcggatttggcatgagagtccccagaatcatcccttgagatcagtgattcttcggcacaactgtagaattcaagaccccattttggatgctgtttcggttcttctgcgaaatgctttgatgcttgttggttgttgattgtccagccgtctgtttgcgtggtctcatgatctgagatgtataatctgtggttgctttgactggtgcttgtctgaaaaattatccaatggaaattttgcaatgtgaagtttgttttgtgctatgaaaccgggccatgctggaagtatatataaaaaatgtcaattggtttttgaccagttaaatttggccaaacttt

SEQ ID NO: 1313 - DNA, 528 bp, Oryza sativa
  ref <308>: DATABASE ACCESSION NUMBER: AK059359
  ref <309>: DATABASE ENTRY DATE: 2001-12-06
ctacttcctgattcactatctatttgcaagccaaaccggacatgttggagctttatactcggcatttctggccatgcatgtagcagctggtgttcctcgagtgctgtcagctcttgctttggcattcaacacaaatctgtttggtgcactaactcattatagtagcggacaggctgcagtgtactttggagcggggtatcttgagcttccagatgtattcaggatgggtttcgtaacagccttgatcaatattctgatctggggtgttgttggaaccttctggtggaaacttttggggctctattgatagcggctgcctgtaaattgaccaaagttttccattggagctcactgaattcggaagggatgtttcttttgtggcctgtcgatgagagttcaataacagaataactttgttccttcaaaatgatcagctcggccgctcggttagctcagctgtatagtaaatgtaaattagggaactaagagagtaatggaaaatcaggtcaatctgattacctcaaaaag

SEQ ID NO: 1314 - DNA, 303 bp, Oryza sativa
  ref <308>: DATABASE ACCESSION NUMBER: AK059360
  ref <309>: DATABASE ENTRY DATE: 2001-12-06
ttgctgcgtgacatccagtcctacacaatcttgatgaaaacgagttccatgggttgcaaaattactatcctttaattttgctatatacatactatccataagaccttttagagatgcccagactctactgcggtgctagattgggcatctcttaaaactttgaggtgtgtgtatgtatgtgtgagggttatcagatgcacattcggataaatgaacttctgattgtaattctagccctccgtcctgtgacattctgtgatgtagtcgttattcagtgatataatgaatctcacctattgatat

SEQ ID NO: 1315 - DNA, 382 bp, Oryza sativa
  ref <308>: DATABASE ACCESSION NUMBER: AK059361
  ref <309>: DATABASE ENTRY DATE: 2001-12-06
acaggaagatcaggcaggccaagacgaagacagataactaagaaccacctacatatccaacatggcatctgctttgacagctggagagctacgcaattcattccatagctgaaagcagctcatcgatccccacattggagtgctcaataaataaaacccatatgattattttctgtgcctgactccagatgaaatttgtgctatggagtggaccacgcatttaattttaatatggcaatcggtaacaacttagatgcgatggttatttgtgacctccagttcccttgcagagatccacttggacactttgtcgagtctaaggaggagcaaaccatctgacgtttctatcggatcatgaatgctaaatctttactctactact

SEQ ID NO: 1316 - DNA, 1302 bp, Oryza sativa
  ref <308>: DATABASE ACCESSION NUMBER: AK059362
  ref <309>: DATABASE ENTRY DATE: 2001-12-06
tcgccccctttggggaccttgcctttgtcgccgccgtgcgcacacaagccttgcagctcatatcattcggcgatgctatctcttcctccagccgcgctccggagcgcctcttccgagtggtggacatgtacgaggctgtgcgggaccttctccctgaccttgatcctgtgttcgccgacccgtactctgctgcgctccgtgcagaggtcacggcggtgtgcaacaccctcggctcatcgatcaaaggcatattcatggagttagaaaatctcatccgccgtgatcctgctcgagttgcagcccaaggtggaggcatacatcccatcactcggtatgtcatgaactatctccgtgctgcttgtgggtcgcggcagacattggaagaggtgatggaaggtgacttcggcgctgttggtggagcggctgctgcagttgaccctgatcgtcccacctcgtcgcttgctgtgcacatagcatggatcatggatgtcttgcacaagaatttagatataaagtcgaagatataccgagatccatcactcgcttgcgtcttcttgatgaacaatggcaagtacatcattcagaaggtgaatgatagtgaacttggtgttttgcttggtgacgagtggatcaagcaaatgacaaacagagtgcggcgttggagcatggattaccagcgggtaacatggggcaaggtcacaacagtattgcagactggcggtcctggagtaggtggactccctgccacggcaatgaagcagaaactccggatgtttaatacctactttcaggagatctatgaagtacaatcagaatgggtgatagcagatgaacagctgcgggtggatgttagggcagcagtggcggaagctgtaatgccagtatatacagccttgatttctagattgaaatcatcccccgaagccaggcatgacttgtacatcaaatacaccccagaagatgttgaggcatgcatccagcacttgtttgaaggagcagctaagtgatcagttgatcagtacgttatggtactggcgtgctgcagcctgcagcttctactacagggtttgtggagttctatcatggatcctggtgaatatctgcgtcccattattggtgattttcatagcttaacctttcatcctcattgtttgtattttgtcctccatgaagaaaccatgaggtaagacaaatggtgtacaactgtacatgactactgtaggtgtatctgtaccaattagtaaggtgattatcttgtaacaatcaggactatttttccatttgtttcaactatttcagatt

SEQ ID NO: 1317 - DNA, 1236 bp, Oryza sativa
  ref <308>: DATABASE ACCESSION NUMBER: AK059363
  ref <309>: DATABASE ENTRY DATE: 2001-12-06
aagggaaaagagttcccacttcccccaccaaactccgctcggatcacccaccggcggcgaggctgcggagatggccggcggcgaggacgaagggtggaggaggagcggcatcgaggtgagcgcactgcagttcgactacgacgggcagccgccgctcttcgcgcggttcaatctccgcatcgcccccggctcacgatgcctcctcatcggcgcgaacggatcaggcaagaccactctcttgaagattcttgcggggaaacatatggttggaggaagagatgttgtccgtgttcttaatggttctgcttttcatgacacacagcttgtgtgcaacggtgacctttcctacttaggtggttcatggagtcgggctatcggttcagctggtgacgttcctctgcaaggcgacttctctgctgaacacatgatttttggagttgatggggttgatcctgttaggcgagagaagcttgttgatctactagatattgatctgcaatggcgcatgcataaagtctcagatggacaacgccgcagggtacaaatctgcatgggtcttcttcatccatacaaggtactcttgcttgatgaaatcaccgttgatcttgatgttgtgactagaatggatctccttgacttctttaaggaagagtgtgaacagagagaagcaaccattgtctatgccactcatatatttgatggattggaatcatgggctactgacattgcatacatccaagaaggtgaattgagaaaatcagcaaaatactctgacgttgaggagctaaagagtgccaaaaacttgctgtcagttgtcgagtcatggctgcgatctgagaccaaactccctaagaaagaacatccccgtcctgagacccagcccaggcgctcctctccatttgatgcttcaccgttccgatcttcacgccacatggcctactaccgttgatgattgttcccacctctgcacctattctggtgctaattaatcatacttccacaatttgtttctgttctgtttctcatccctttctacggcattgtacctaatatataaataaagcgaacttacccttgtgccgatgagcagtgagtacccatcaagttcatttctgtacttctttctgataatctaatactacatgaattcagtccctgtcattctttagaaaggcttgatgtacattaagaaatggccccatttatcacgagaaagtaatgtgtacctgtcttctc

SEQ ID NO: 1318 - DNA, 1889 bp, Oryza sativa
  ref <308>: DATABASE ACCESSION NUMBER: AK059364
  ref <309>: DATABASE ENTRY DATE: 2001-12-06
ttcagttgtggatccaataagagtggatcaaacagaaagttgcaagttgcagccttgtctcctttctggtggacgagaagggggctttgcgaattgcaattttgcaatgcttcttgcttgtgattgtgacgacgatgcacaaaccgcagagaatggcaacgccccgatgctcagcaactaccgcgcccagcctgcgccaccgctcgccgagcccctcctcctcgacaagccacagcgcgcgcactggctcaggcagctcaaaccgtggcgccgcaatgccgccgacgaccacctctccgccggaatcgccatcaactggagctctgtgcgttcggcgaccaaggactggatcaccaaccccatgaacatcgccatgctcctctggcttctctgcgtcgccgtctccggcgccatgctcgtcctgctcctcctcggcctgctcgacggggcgttccccacgccggcggcgaggaaccactggatcgagatcaataaccaggttctcaacgcgctcttcacgctcatgagcctctaccagcaccccgtcctctgccaccacctcttcctgctctgccgctggcgccccgccgacgccgccgacctccgcgccgcctacttcaaggacggcgccggcccgcgccacggcgagcgcgcccacatggccgtcgtggtcgcgctgctccacctcaccgtcgcctgccagtacgtgctctgcggcctgtactgggggtacaccaagaagacgcggccggagctcgtggagaatgggttcttcgtgctcggcgtcgtcgcgccggtcgtcgccgtcgtgtacaccgtgtgcagcccgctcggaaaagacaactacggcgagctcgcgtgccccaacgccttcgactcggtgagccaacacaaatgcacgggacacgccgtggtcgagccggagtgggccggcggcatgttcgactgcggcggcgacgcgacggcgtggtggctctccctgtcgtgcaccttctgcgccttcgggtggaacatggagcggctcgaattcggcagcatgttcgtgcacaccgccacgttcgtgcttctgtgcttcgcgccgctgtgggtgatgggcgtgtcggcgctccacatccacgacgtggtcatcggcgacatggtcggcggcgccggggccctgctctgcgtgtgcggcctgctctacggcggctactggaggatccagatgagagaacgcttcgggcttccggcgagcacggcgtgctgcggctcgccgtcggtgacggactacgcccggtggctcttctgctggccgtgtgcgctggcgcaggaggtgcgcacggagagcctctaccacatcgattgcgagacgttctacaagaagcttcctgttgtcgatgacgttgaagacgagaagaggctaccgttgctggcgtcacaccatgtccaattccatgaaccaccggacacgatgatcatggcagcatcagagggatcaaatgatcatgtggtgattgttcatgaggagatggttccaccggctgtacaggttgtggtggagcaagtcgtcgttgaaggtgataaatctgaagaagaatgcagtgcagttcatgatgagaagatcatgggttcgcctcttccggaatcggtggtgattgtggatgatgatgagataccggccagtttgtcggatggaagctggacggtggagaaggtgaagagactgataaatgttgtcactttggtttctttgctcattcttctctacaccaggggattcattcgttagtgaggcacagaaaatgcatacaaaaggctacagattcaatagctacttagctagatgactgaattctctcatctttctccatttctttttgttggttgtgatcgagaggaagttcattctt

SEQ ID NO: 1319 - DNA, 1104 bp, Oryza sativa
  ref <308>: DATABASE ACCESSION NUMBER: AK059365
  ref <309>: DATABASE ENTRY DATE: 2001-12-06
atcaaaagaaataaccagagtaatcactatgaggctgcaaactgttgatggtttatctgcatatctggcaagtgtgcaggatgatgttgcttcggtcatcattggcaagagaactgtcttgcgtgccagaactgcctcagatgctattgacatgaggctcacaatcgatgaaagagttaaggacttagctctcaaatttggtactcaagttccaaaatcaaagctttaccggtttccaaaagagctggcatcactacctgggtgtttgtttcatttgagaaggggaccactcttaggtagcatagtaggacatgaagatgagcgatctgtccttaggaatttgttcttgaatgcctcatttgacctctcgttccgtatgttagcacctcgttgtataatgcaccgcgaaggtggtacctttgaggagctgccagcatatgatcttgccatgcaatctaatgctgcggtggtattggaccatggaactgatattttcatatggttgggtgctgaactagcagcccaagaaggacaaagtgctgcagctttagcagcatgccgtacactggctgaagaactcagcgagctccgttttccggctcccaggatactttcattcaaagaagggagctctcaggctagatattttgtctcacgccttatcccagctcacaaggaccctacttatgagcaggagtcaagatttcctcagttacggacacttactcctgaacaaaggtctaggttgaagagcagcttcatccactttgatgaccatagtttctgcgagtggatgcgcagcctcaaattggttccacctgaaccaagctaataccaacaatcggatccctaaaggtggatagctgaagaacccaaggcttggtttctgatagagttgcgaaacgatagctgaaagttttgtgaagtaacattgtgcattgcgggacacatgccaatgccaaacacattttgtttggagtggtgggagttgtatgattttgcccgattctttcttctgacgccatagcatacagtttaaattgtcacttgtcttgcaggcgccaaatttacacaataaaatggtctcctcctgttggatagttc

SEQ ID NO: 1320 - DNA, 741 bp, Oryza sativa
  ref <308>: DATABASE ACCESSION NUMBER: AK059366
  ref <309>: DATABASE ENTRY DATE: 2001-12-06
cattatgcttgatgccgatttccagccaaggatatccgactttggcctctaccttctgctgaatcctgctgccgctcaacagatgcttgaagcatctgcaatgcagggctacaaggctccagagctgatcaagatgagagaagccaccagggagagtgatatctacagcttgggggtaattcttctggagatgcttgctcaaaaggaggcagcaaacagtagctcacccaatgcccgtgacatccacctgccttcctctttcaaagatctagttctggagaggaagatatcggatgcattcagttctgagctagtcaagcaaagtaagaactcaggcaaggagcagaacctaaatgcattctttgaactggcaactgcttgctgtaacccatcaccatccttgagaccagataccaagcgtatactcaaaatgcttgaagagatatcaagatgacagggtgcacattggtcaccggcatcctatttagaaagtgtttcgttatagcaagatagcattaatatttataaatgtattatccatctgttatccctagtgctcaagcatacaccagagcttgtactggggaaatccagaaatgtgagaatgatgtacactaatggagaaacaagcatgtatagtttccacccaacctagaggaactcatatgaacaggacaatgatgttgttttatgtatgtctggaccaagttttccgtacgagacttgggccaatgattgttc

SEQ ID NO: 1321 - DNA, 927 bp, Oryza sativa
  ref <308>: DATABASE ACCESSION NUMBER: AK059367
  ref <309>: DATABASE ENTRY DATE: 2001-12-06
atgatcagttggggctcctcccgttcctggagctcctcccctcctgttgaccggtctgctctcagattccggttgtggggagttccttggcgaggggcgggttgctagctgggttggcagatttgcttggagttcgagagcctcagcactgcatgtgcctagcttctcttgcgtctgcgaggtgtttggtttggtggagttggtgcatgaaatccctacgacgcaacctgtcgatggtgtttggggtggagtcggagctgcttggccgggtgtggcaagctgggcaacgataacccccttgccccttctttttggtagcttcgttggggtggctgtgctgttggcttcctggcgtgtctttgggtaggtgtgttggggggagtcggagctgcttgtaggtgacaagctcggcaacgataaccctctcccgctttccttggtagcgttgtggaagccaggggtgtcgtagttggcagggagagcgagccggggcgttttgtcctgctcgttcttaggatagaggcaacgatggcgacgcctgtgggcgccgttttccttgttgaaggcatcgttctttgctctacccgttttcttcgggtgaaaaccctgttccgattttcggacggacgttgcttgcgtttcgacgctctgtttcctccttggaggcttcgtcttgaagaccctgctctacgttgtctgtggtctgttcataggaagtcggagtttttggctttgatgagctatgttctcctccagttgtgccgtcgcaagttttttctttgttctccttgtgggttttgcccggtttcccctttaaaccgtgcttatgtaaggtttttgggcccggtttcccctcaaaacctgggtcaagtctcttcttctttaatgaaaacaggctctccctgacctcttctgaggtttttcctc

SEQ ID NO: 1322 - DNA, 1826 bp, Oryza sativa
  ref <308>: DATABASE ACCESSION NUMBER: AK059368
  ref <309>: DATABASE ENTRY DATE: 2001-12-06
tacaagtctttcacgagccgttcaagatttaggccacaatgttgaggttattcttcccaagtatgactgtttaaacctaagcaatgtgaaagatttacattaccgtcaaagttttacttggggtaatacagagataaaagtatggtttggaaaagttgaagacgtccctgtttacttcttggaaccacagaatgggatgttttgggttggatgtgtctatggaagaaatgacgagagtagatttggcttcttctgccattctgctctagagtttctccgccaaaatggatcttctcctgatattatacattgtcatgattggtcaagtgctccagttgcttggctattcaaggaacaatatgctcaaaatggactgtcaaatgggcgggttgtatttaccatccacaaccttgaatttggtgcacatcacatcggcaaagcaatggcacgttgtgataaggctacaactgtttcatatacgtattcaagggaagtgtcaggacatggtgctattgcccctcacttttccaaattccacggtattcgtaacggaattgatccagatatttgggatccatacagtgacaattttatcccggtccactatacctctgagaatgttgttgagggcaagagtgctgccaaaaaggcattgcaacagaggcttggactacagcaaactgatacccctgttgttggaattatcagtcgtctgacagtccagaagggaattcaccttatcaaacatgcaatttatcgaactcttgaacgcaatgggcaggtggttttactaggctcagctccagatcatcgcatacaaggtgactttaccaacttagctagtaaactgcatggcgaataccatggtcgtgtaaagctttgtttaacctatgatgagccactatctcatttgatttatgctggtgccgacttcatccttgttccttccatgtttgaaccttgtggtttaacccagcttactgctatgcgttatggatctatcccaatagttcggaaaactggaggcctttatgacaccgtttttgacgtcgacgatgataaggatcgagctcgagaacaaggtcttgagccaaacgggttcagtttcgaaggagctgacagcaacggtgtggattacgcccttgacagagcgatcaccacatggtatgatgctcgcgattggttccactccctctgcaagagggtgatggagcaagattggacatggaaccgacctgctctggactatatggaattgtaccattccgctcgcaagaactgagacctttctagccccaagaacacatggattttgggaagtaggtttccccaggtttctgggacatgccggcatcccagtacataccctttctctgggtaccattctttagacagaaagaaaatgaggagaatccaatcccggcttctacattgatctccagcgtcagtaagagatcaattaatctttccgttatcctgcggttgtgagttcgccatcgtacggcgcccgtgcgtatgtgacatgcaggaagctcatcgtgcttaaagccagttttgcaaacatgtaccatgcaaatatgttccattttacgattctgcagtgtttcggatgtacatatgtaaggcagattagatttgtagggcggatgttctctctggtttattttctgctcactcggagaaggaatgaagtgcgagcagaatggcatgtgacggcctgtgtagctttttaatttctcgtgctgacatctcaaaattgatttcaaattggcagcgtgaaccaaaccatcaattgaatactctaaaagtttcaaagtttttaagcc

SEQ ID NO: 1323 - DNA, 1198 bp, Oryza sativa
  ref <308>: DATABASE ACCESSION NUMBER: AK059369
  ref <309>: DATABASE ENTRY DATE: 2001-12-06
taccactgaccactccatcagtccaccacccaccttccccgaccttatctgcgacgagacgacggcagcgagctccaccaccaccaccaccaccacctcctcctcctcccggcggcgaccgcctcggctgcgcccactccggcggcgcgcggcgacgaatcaccgggccgcactatccggcaaggatggcgcccgccgcctccgcctccgcctccgccgtcgtcacaccgtcctctttcagatgcgtccccacggcgtcgtgcggtttgggggcccggggtaaagcccccgcgccgcgccggcttctccacgaccacgcgcaaggtaaaaaacgggctgcggcaacttggtccttgaaggctggtctgtgggactcccttagatccggatttttgaagagtaataacagtacagagacagtagagccaccatcagcaccaattgaagaggaagaacctttgcccgaggaactagtactcctagaaaggacacttgctgatggcagcacagagcagatcatattttcttcagctggagatgttaatgtgtatgatctccaagctttatgcgacaaggtgggatggccacgcagacccctaaccaaaatagcagcatccttaagaaacagttacctggttgctacactacattcagttactatgccttcaaaagcagagggagaagagaggaagcaactaattggtatggcgcgagcaacttcagaccatgcctttaatgctaccatttgggatgttctcgttgacccttcatatcagggtcaaggtcttggtaaagcgttaatggagaaagtaatccgaactttgctccagagagacatcagcaatattacgctgtttgcagataacaaagttgtagatttctacaagaacttgggattcgaagctgaccctcaaggcatcaagggcatgttctggtaccccagattttagtgccagcggcctgacaccttcctgttcatcagtaatgcctggttctcaccgcccagggaccatagttttgtccagttgagtcgagctcagctgtgtaacagcaactctaactgaatggtggtgatatctgcaatatcttgttgtctgcaccacgagccatacaaattcagctgaattttcgagtcaaccttgtactgaaccaaacaaaacacttcttattgtcactagcaaaactgcaaagatccctg

SEQ ID NO: 1324 - DNA, 1741 bp, Oryza sativa
  ref <308>: DATABASE ACCESSION NUMBER: AK059370
  ref <309>: DATABASE ENTRY DATE: 2001-12-06
gatgcggactacctgcacctggacagaaagaccctatgaagctttactgttccctgggattggctttgggcctttcctgcgcagcttaggtggaaggcgaagaaggcccccttccgggggggcccgagccatcagtgagataccactctggaagagctcggattctaaccttgtgtcagacccgcgggccaagggacagtctcaggtagacagtttctatggggcgtaggcctcccaaaaggtaacggaggcgtgcaaaggtttcctcgggccagacggacattggtcctcgagtgcaaaggcagaagggagcttgactgcaagactcacccgtcgagcagagacgaaagtcggccttagtgatccgacggtgccgagtggaagggccgtcgctcaacggataaaagttactctagggataacaggctgatcttccccaagagtccacatcgacgggaaggtttggcacctcgatgtcggctcttcgccacctggagctgtaggtggttccaagggttgggctgttcgcccattaatgcggtacgtgagctgggttcagaacgtcgtgagacagttcggtccatatccggtgtgggcgttagagcattgagaggacctttccccagtacgagaggaccgggaaggacgcacctctggtgtaccagttatcgtgcctacggtaaacgctgggtagccaagtgcggagaggataactgctgaaagcatataagtagtaagcccaccccaagatgagtgctctctcctccgacttccctagagcctccggtagcacagccgagacagcgacgggttctccacccatacggggatggagcgacagaagcatggaaataggataaggtagcggcgagacgagccgtttaaataggtgtcaagtggaagtgcagtgatgtatgcagctgaggcatcctaacgaacgaacgatttgaacagaacacaagcaagtctcatgtagcatttaagttccaaacaactgcacccaagagctgcttcatgcgtcctcctggagccatacttgcccctggggagaccatcatagcaactgttttcaagtttgtcgagcacccagagaacaatgagaatgttctacagaagtgcaaggttaaattcaagattttgagcttgaaggtcaaaggacccatggattacgcaccagaaatgtttgatgagcagagagatcaagccgtagttgagaagatcctgagggttgtttttttgaatgttgaaaatccaggcccacaactggaaaagctaaataatcagttggctgaggctgaggctgcacttgaggcaagaaagaaacctcctgaagagaatggcccaaagattgttggcgaagggcttgtcatcgatgaatggaaagaacgaagggaaagatatcttgcacaacaacaggttgaagtggttgactcagtgtaaattgtgcctttcttctgcttctaccgaagctatgcctataatatggcttcagaaatgtgctgtggcattcttgtaaactgctagattttgtggttggtagtctagtgtgtggtagtctagtgtgtgcttgcagaatcagtcgccaaagaacaatctaactcccgtattttcagtgcttgatgtgtaactaatagcacatatgttctattttttgtgttagtgctaaagtctgcttgtcaaaacaataaagttcacaagcacaccttcctctgtattgttggggaaggcacattctatcatc

SEQ ID NO: 1325 - DNA, 614 bp, Oryza sativa
  ref <308>: DATABASE ACCESSION NUMBER: AK059371
  ref <309>: DATABASE ENTRY DATE: 2001-12-06
aggcatcccggcgttgcaagatgcaatcggacgcggtggcgcggagccccaggcaaacggtgagagtcggaggccggcgccccacggccgatccctcccgcggctcatcggaggcgtacggcttcgtgggatccatcgccgcggtggccgccgccgccgcctacctcgcgtgggcttacctgccggagccgtggctgcgtttcctcggtgtcacctactaccccgccaggcattgggcactggccatgccgtcgctgctgctggaagcggcggcgcaggggatggtgctctacatggcctccaactttctgctcgctcctgctccgactttgcttggccactatctccgatgaatttgcccgggagcctgcggcgtgtggtactgcaacaggggaggagaaacccatcgaggacatatcagatattagcattgacaagataaacaatctcatgtttggcaatgcatcatcaagctgatgcatttactacttctgatgaagctctcaactgatcaccagttgaccacaaacatgttttttgctttctcttggtgtgttgatggctcactcgtttgcaagctagcattgtgctattcacttatgattaacatggtt

SEQ ID NO: 1326 - DNA, 310 bp, Oryza sativa
  ref <308>: DATABASE ACCESSION NUMBER: AK059372
  ref <309>: DATABASE ENTRY DATE: 2001-12-06
ggagatctgatccgatctcggtcagttcgatcaagaattgcaaaataaagaatgcaagagaggtcatccatccaatccaatcatccatgtgttggctctgtatgatcctgtctctcccatctgctggtggtgttcatattattgttgctccagtcgattgtgtccatgtgtatatggtgacttttaatcatcgcttaatttagttgtggtcaattaattggtcatggattatgatgcatgattcaaaacctgaatttatctcatgtgtgaataaaatggagaagggaactattcttcttcacttgttggt

SEQ ID NO: 1327 - DNA, 1245 bp, Oryza sativa
  ref <308>: DATABASE ACCESSION NUMBER: AK059373
  ref <309>: DATABASE ENTRY DATE: 2001-12-06
gtcttgacggcttttgtcagcttcatcacgatgcagttccaactttgctctgtattttttactttctccctgggtacaaggacccactattttggccgcacaatactacatggtggtgcaaagtatagagcaaccggtaggggttttgtggtacgacatatcaaatttgctgaaaactaccgtctttattccaggagccattttgtgaaagggttggaggttgctcttttgttagtgatctttttagcgtatggttttaacaatggtggagcagttggctacattttgctttccataagtagctggtttatggcagtttcttggctttttgctccatacatattcaatccatctggatttgaatggcagaaggtcgttgaggatttcagagactggacgaattggctgttttaccgaggtggtattggggttaagggagaagaaagttgggaagcctggtgggatgaagaactggcacatattcacaatgttggtgggaggatactggaaactgtactgagtttaagatttttcatcttccagtatggagttgtttaccatatggatgcaagcgaatcaagtaaagcactattgatatattggatatcatgggctgtgcttggtggcctttttgtcctcttactggtattcggtttgaatcccaaggcgatggtgcatttccagttgttcctccgacttatcaaaagcattgcgctactgatggttttggcgggcttggttgtggcagttgtgtttacaagccttagtgtcaaagatgtgtttgctgccatcttagcatttgtgccaactggctggggagttctttcgatcgctgtggcgtggaaacctattgtgaagaaactaggtctatggaaaacagtgcgctctctagctcgcctgtacgatgctggcacaggaatgatcatttttgtcccgatagccatcttttcctggtttcctttcatatccaccttccagacccgacttctatttaaccaggctttcagcagaggtttggagatctctctcattcttgctggcaacaatccaaatgcgggagtatgactgtagctgctcccatccatctaagcatctccattcagatcgtggagctttacaatcactgttgttctctcttagcagtaggatgtatatatttcatggacggggagtcgtggatgtatcctgttggccacattgttgtattgatcttagtgcttctaattgtgattgctactgttgttt

SEQ ID NO: 1328 - DNA, 1389 bp, Oryza sativa
  ref <308>: DATABASE ACCESSION NUMBER: AK059374
  ref <309>: DATABASE ENTRY DATE: 2001-12-06
ttcttgcacaaagatactggaaaacaaggatcacaatcgatgcagttgagaagtttctgcgaatgcagttgatgcttggcccgacgaggtacacctacacagatatcattgcaatgacaagccatttcagagacaagctaggtcagggtggttacggttctgtattcaagggtgtcatactcccgggtgatgtttacgttgccatcaagatgctagacaactacaattgcaacggagaagagttcatcagtgaggtctccaccatcggtagtatccatcatgtcaatgttgtgcgtctggtggggttttgtgcagaggaaatgaggagggcactagtgtacgagtacatgccccatggatctctcgacaagttcatcttcgcacctgaaaagagcttctcctgggacaagctcaatgagattgcactgggcattgctagaggaataaactacttgcatcaagggtgtgatatgcagattctacattttgatatcaagccacacaacatccttcttgatagcaatttcgtcccaaaagttgccgattttggcctcgccaaactatgcccacgggacaacaattatgtgccagttagcgctgcacgaggaacagtaggttatattgctcctgagatgatatctcgaagcttcggtgtcatatctagcaaatctgatgtttacagctttggaatgcttttgttagagatggctggagggcgaaggaactctaagcagaacatgtcaagctcaacccaggtgtattatccatcattggtgtataatcaactcattcaacaagagatgggtgagatcaccaataccttgaatatgcatgagctggaaaggaagttgtgtgttgttggtccacattgcattcaggtgaagcctcctgatcgtccaacgatgagtgaggtcatagaaatgcttgaaggtgatgttgatggtctgcagctgccttccaggccattcttctgcgatgatgaacccctgcccctgttggtggattcttaccgtttctcctctgagctaactgaaatctcagaggaggatggctgaagcttatgcatgtgctttgatgccaaaaagtcaaggtactaagttggttgttgttttttctcagataaggtggtaggtaggttgtaaaactgaggctacatattgttgtaaacagatgtttcatcgcattgttgtaatttgaaagtgattttttttagggaataacagagtataaagctggaacgagaaaaatgtgatcttgtggtacgctattcatttgcatacgataaaagttgtatttgtgccatgagaaagtactactgaattatggttgaaagtgccatgagagctatgaccattttgatatgtaagaagagctattggtttcacatgt

SEQ ID NO: 1329 - DNA, 1081 bp, Oryza sativa
  ref <308>: DATABASE ACCESSION NUMBER: AK059375
  ref <309>: DATABASE ENTRY DATE: 2001-12-06
aaccaacctcgccgccgctgctacagccgtcgtctcccaccgcacgccccgccccgccccccacccatcgccggcgacgcggatccctcctcgacggtgcgcccgcctgagcagccgtgctatacctctgtcgggggcatattccccgccggcgcagcaagctgagcggagaggaggatgccgaagcggacgacgcacacgtactccagcgaggacgccctgccggaggggcccgagtccgacctcttcgtctactactgcaagcactgcgcctcccacgtcctcatcaccgatacccaattgcagaaaatgccaaagaggaagactgacagagcacatgtactagacaagaaaaaacatctctcaaggctaaatgtgaaggaggcaggaaaggtcctgttgaaacggggagaagggaagcttgaaaagcagttccgtatgagttgtttgggatgcggccttttcgtttgttaccgatcagaagaggagttggagctagctccattcatatatgttgttgatggagcactaagctcagtggcggctgaaacaaatccacatgatgcacctgtaccaccttgcatcacacaattggaaggtggccttgtccaagtagccattgaggttgaagaccgggcacaacggtcagcaataacaagagtgaatgctgatgatgttcgagtaacagttgctgctcctgctgctcgaggggaagcaaacaacgaactactagagttcatgggcaaggttcttggcttaagactcagtcagatgacccttcaaagaggatggaataataagtcgaagcttctgattgttgaagatttgtcagcacggcaagtgtatgagaagctcctagaagctgtccagccttaaatttgtggcagctcctaacggagcagaagcagaggaggttttgaaacattgctggattcattagcttatcggagttgcattgtttcggttgtaaacgtgagtgaacatagtctaagatgaccgtgatgtaacgctgtctctgtgtacccttcttagttgtgatacaaactgtacatctttataacaatcctgcaacgtttttttt

SEQ ID NO: 1330 - DNA, 784 bp, Oryza sativa
  ref <308>: DATABASE ACCESSION NUMBER: AK104068
  ref <309>: DATABASE ENTRY DATE: 2002-08-28
acccaagcccatccatccctgcaagcgacgaacacatctcatcacacccgtcacctctcctctcccccaaatctcgcgctccgctcctgctcctgctcctgccatggaggaggctcgggttgtggaatccaaggacggaacgatctcagttgcttcagcatttgctggtcatcaggaagccgtacaagacagggatcacaaatttttgtctaaagcagttgaagaagcttaccaaggagtagattgtggccatggaggtccatttggtgcagttgttgtccgtaatgatgagatagtagttagttgccataacatggttttggattatactgatccaactgcgcatgctgaagtaactgcaataagagaggcttgcaaaaagcttggaaaaattgagttgtcagactgtgaaatgtatgcatcatgtgaaccttgcccaatgtgtttcggcgctgtgcatctatcacggattaagaggctggtgtatggagccaaggcagaagctgctattgccattggattcgatgacttcattgctgatgctttgaggggaactgcttactaccagaaggccaacttggagataaggcgggcagatggcaatggagccctgattgctgaacaagtcttcgagaacactaaggagaagtttcggatgtactaattgtaagtaaatacattgtgggatttcacatcgcaaaagttccaaacgttcagaagtcagaaagaataatgtaaccttcggcgttctgccattagtggaccataagctatcaatttaaat

SEQ ID NO: 1331 - DNA, 783 bp, Oryza sativa
  ref <308>: DATABASE ACCESSION NUMBER: AK059376
  ref <309>: DATABASE ENTRY DATE: 2001-12-06
acgcaaaccatttgcatttgagccttttgcttgccttctctcctgtcctgactgcagcgagagatcagtagggagagggcaatggcattgacggtgcggctgcacacggcggtggcggcggtggccgtggccgtggtggtggcgatggggatggcggcggcgcagatgtcgccggcgggggcgccggcgccggcgggcgggatcagcccggcgttcatggacgcggtgctcaacatgtcggactgcctgacgtacgtgatgaacgggagcacggcgcggaagcccgacgagccgtgctgcccggagctggcggggctgctcgagtccaagcccgtctgcctctgccagctgctcgccggcggcgccagctcgtacgacatcagcgtcgactacaagcgcgccatggcgctcccgggcatctgcggcctcgccgcgccgcccgtcaccgcatgcgcgcttcttggagtacctgtgcctatggcgccttctgcatcgccgatggcaggcctcgggccatctactgaaccacaaatgcctgagaaatcgccgtcggcctcgccgtccgagtcgagtaaccatgctcccggccgcttcaccgccctcgccgcggtggtcctcgccgttgcagccgccgggatggtttagaaaatgcctggattttcggccgatcgatctcaagatttagcccgacgattcttgtttattcttgccacacatttggctgtgtattaatttacaacacgttacagtacgtatgcgcaatgaacgatatttttctgcttt

SEQ ID NO: 1332 - DNA, 1335 bp, Oryza sativa
  ref <308>: DATABASE ACCESSION NUMBER: AK059377
  ref <309>: DATABASE ENTRY DATE: 2001-12-06
gaactcttaatcatttgcccagatgatcagtgagccactcatctgtggacacgggggacattggatggtgactctcacgagccctgtgcaattgccacgtgcatgctcccgccgtaaaggactacaggtacatggctagcggtgatctccaccccatgagcagctgttctggtatcccgctgcttccttccgctgaatcctcgctcgctcgcaggtgagcacccatacagtacgtgttcacatgcactttttcatccctcgtccatgattatttttggggaataaactgtgttattagtactgaggagaaaaacaacttctagatctagaagagaaggttcacgccatccaaacccaaaatcataaactaaattagcgcttctgcgctgaaatactcttctccaagagtatttgttttgagctccagctgagttttgacagccctacttccaaccggtctctgtgtcagttctcacctccagggtgccgcctctgctgctccattgccttggattcatagcagcaaaggctgggaatccacggtggagtctggtgtggcttccgtgtcaggatttagcgggtagttgcgagatctgatctgatctgatcttaaaatctgatggatggattggtatggtgctgatggttttgatttactagttgctactcctgctgtcaccactgtaatctcctcttgctcatctctacatatggtgtgttctgctgcctgtgttccttgtgggattctgaaacctccagaatgttggaaacatggaatggaatgtgggaatgtggatgaggggcaatgatgttcaaccatccactaatgttagtgattctgtgcctaggatggtcactctgatgactgacgagtgataaccagtgcagctacacttacattagtatgagtagattgtgcagcaagagatgtgaaaatcgggttttgtacgatggaggaaaggtgaaactgagctcactctgccatggtgattttttgaatgggagctctgaatcatttgttcccttctagttctgattgtatctgttgacctgtgtgaaattgaattgttttggatttcttgctttatttccttttagcatttactgaaggttggcttcacatctttgtgtaatagtgttacaattgccctacatcacatgtttgatttgtttgcgtgctatggaaatcagcatttggtcatggataaagggaccatataatgccttgtttgaacttagttcatgtatttttggtatatgctgtgataacctgggtgaacaaatggcaacagttccttttgttgacactaatgcagtgcttcaaattgatttctc

SEQ ID NO: 1333 - DNA, 1629 bp, Oryza sativa
  ref <308>: DATABASE ACCESSION NUMBER: AK059378
  ref <309>: DATABASE ENTRY DATE: 2001-12-06
ccgccgcctcgtgcgatcgatcgatcgatcgatccgcaccacccacgcgcccgattcgccctcctacccaggccacctctaaccctagcgccggcggctcttctcccccgccgccaccgccgctccaaccctccccaacagtgggtttctctcccccccaatcccctcccctctaccgccgtcgatcgacgcgccaccaggaggggagcaggacgaaagccggtgctgcctaccgcctccgcaggtacctcatcgagcatcggtcggagtgcaaccggagtgccaaggtgtatttcatggattcttttcaacatggcatggatgctgataaacaccacatttttggggagcgtggcaatatgattcagttaaatatgtgtgcatctgatggtcgttctgttgttggacaacgatgccagagacttgggtgtaacaatgttgttgaaggccagacattgctctgtaaaagtcacagtatagggcaacgatgccaaatgcttggctgccctcatattgtaccagatggctcagtattatgtatgtcccatggtggaggtcgcccgcttggtgaacctggttccagtacagtagcttgctccaaatcagaaatttcaatcaagtacgaaggagagagtgggttcagagtaacccaaaatgctgggaatgatctgggtagtgcaggaatctataatcctgatggtgatgttgtgatgtgcaagtaccagggttgcagcaagcgagcccagggaaatgcaatgtactgtaagattcaccgcggcggttcaaagggctgcatggttcaaggttgtacaaagggtgcacatgggggcacacctttatgcattgctcatggcggaggcaagcgctgcgctgtcactggatgccccaatgcagcatgtggcagcagtcaaggcctcactgaccgctgtgtaaggcatggtggtggaaggaggtgcaggtttgatggttgtgtgaagggtgcccaagggaacacagacttttgcattggacatggtgggggaagacgctgcaagtttgaaggatgtggtaagagtgcacaagggcggagtgattactgcatcaaacatggtggcggcaggcgctgcaagtttcaaggatgtgccacgagtgcaaaatggggcatggatttctgctctttgcacagaaagagcttgatgagcggcagcaattcttcccatgaaatgctgccagcgccaccgcccaagcgccgggccaagaagaccaagaccgcggttggtccatctggtctctccagtgaccccaaatcagcagagagtgtgatgattaagcatgcttccaatgcgggtcaccaacaacagccgatccactctatgaaatcctcgccgtcttctgggttaactgcttcaactgagggtgatgtggcggcgaggagccatgcattatttggactgtagataccttgttgatgcataagagtggtttcgcatagacttgttaactagggggattagctgtgaactgaagtgaagataaggatcataggagatccactttttatattaacatgctttcactgtcagttgacttgagtagaactgtgcattgtgttatctgcaaggattatcaacaaatttaaatctgcatagt

SEQ ID NO: 1334 - DNA, 374 bp, Oryza sativa
  ref <308>: DATABASE ACCESSION NUMBER: AK059379
  ref <309>: DATABASE ENTRY DATE: 2001-12-06
aacttctttcttctctacaggctttgggaggaagtctgagaggatggtggttcagatacagagtgaatgagcagacatgtacaagatgatggcttttgcaggagcaacaaatgttgatctctgaaccattgtatattgctgatgtaaccatttggtctaggagtgggtgtggcagctcacatttatttttatagctcaagtgaatcatgacatagtttcatctttttctttttttattttcaaatttcactactatgactgtatttagttgtctctgtattgtcaagtgacctcaagctttgttgggtgatgcctccttgccttaaaccggatacaggccttgatgatactgcaataattttgttttaatgatt

SEQ ID NO: 1335 - DNA, 451 bp, Oryza sativa
  ref <308>: DATABASE ACCESSION NUMBER: AK059380
  ref <309>: DATABASE ENTRY DATE: 2001-12-06
caaggtatataaagtatgatcacccttacatccgtggatgcaacttggcggagtagatatgatgtaaaaagctgacggagaagatcacccagcctgatcagaggtgcttctattaagtggagtaaatacacggccggtgtcagttgttctgaaaaaaataaaatgcgttaacggtagctttcaggcttgcctgccggcttaattttgatgaacctgtcactggaactttctctccagctgatcgatcgatcaccgcatgagttgatggatcgaatggatggttgagagataattttcggttttaattgcgtcattgctggaatctgcaactttgtctgcaaccgtgatgtggggcgtcttttttctatggtgtgcttgggccctgtttttaagtccctatcacattggatgtttggacactaattataaatattaaacgtagactattaat

SEQ ID NO: 1336 - DNA, 1182 bp, Oryza sativa
  ref <308>: DATABASE ACCESSION NUMBER: AK059381
  ref <309>: DATABASE ENTRY DATE: 2001-12-06
atatggtgtagtttatcgtggccaactgatcaatggcactcctgttgctgttaagaagcttctcaataacctaggacaggccgagaaggaattcagagttgaagttgaggctattggtcatgttcgccacaagaacttggtccggcttctgggttactgtgtggagggtactcaaagaatgcttgtctatgagtatgtaaacaatggaaacctagagcaatggcttcatggagctatgagtcaccgtggttcccttacatgggaggcccgtgtaaagattcttcttgggacagctaaagcgcttgcttacttgcatgaggcaattgaacccaaagtggtgcaccgtgatatcaaatccagcaatatattgattgatgatgattttgatgccaaagtatcagactttggtttagctaaacttcttggtgctggcaagagtcatgtcactactagggttatgggaaccttcggctacgtggcaccagagtatgcaaacactggactcttgaatgaaaagagtgacatttacagctttggggtagtacttctagaagcaattacagggagggatcctgttgactatggtcgtccagcgaatgaggtaaatcttgttgactggctaaaaatgatggttgctagcaggcgatcagaggaggtggtggatcccaccatagagacccggccttcgacaagagctctcaagcgtgcacttttaactgctctgagatgtgtggatccagattcagaaaagagaccaaagatgggtcaagttgtgaggatgctggaatcggatgacccaattcctcgtggggacagaagatctaagcacaaccgtggagggagcaccgaaatggattcccaaagggacaacaactccgacacggacaagagtgacaatccagattccaaaccaagcaggagcagagcctcatcttccaaatgagaacatccagcattcctctcctattatattcctttggtccataacggaccgtcccccctctgtttctgctgacgaattggtaaccgccattgctgaagcttgaatacaaaagaagctcgaagacacattggttctcattccttttttttcttctttttcgtggctgtaacggtttatgatttatttgtagacaaggtgttggtttttctacttatgaatttatatatatatatacatat

SEQ ID NO: 1337 - DNA, 631 bp, Oryza sativa
  ref <308>: DATABASE ACCESSION NUMBER: AK059382
  ref <309>: DATABASE ENTRY DATE: 2001-12-06
acgcttatctctatctggcatgaacacgatgataggcccagctccgtctccggcagcggccgccgccgcagccgtgtcgccgtcgtgttacgcgtcgccggcggcttcgtccgtgcgaagacgcggcgtcgtcggcgtcgtccggtgcgcgccggatagcgggcgaggtggagacggcggcggcggcggcgggaaaggcaagctcagggtcgggtctcccatcgtcatcgtggaggcaccggtgatgctcaagaccgccgcgtcggtgccgtcgctcaggcacaacgccggccaggtcaaggccggcgacgtcgggagggtgatggcgcggaagccgaaggacgtctgggccgtgcggctcgccatcggaacctacctgttggacggcaagtatttcaagacactggacgtcgacgacgacgatactgcatcaccagatgagtgagctgcaaatgcagcagcattacagctacggcatagcatgcaagattgtttgttagacagaggcacagctgcaatgttgtaaaagatccaggaattcacaatttttgttgagactgatgggaccattgtttcacacataaccccgggcgtggtagattgcacaggaaatctggtatgaagatgaatc

SEQ ID NO: 1338 - DNA, 1843 bp, Oryza sativa
  ref <308>: DATABASE ACCESSION NUMBER: AK104069
  ref <309>: DATABASE ENTRY DATE: 2002-08-28
ccgatttgacgccatctgctcgtctgcctcctccccgatttcctctcctctctctctctccctctctccatccctcccggcgtccaatctgttctgcttctcgctgcgcccccggaattgtggtgaggttttgtgagggtgtgggggaggaggaggatggcggaggaggtgtatgtcgcgtcgatcgaccagggcacgacgagcacgcggttcatcgtctacgaccgccacgccaagcccgtcgcgtcgcatcagctcgagttcaagcagcactacccggaggctggatgggttgagcatgatcctatggagattatggagagtgtgaagatatgcatggcgaaggcacttgacaaagctgcagctgatggtcataatatggatgttggactaaaggccattggtattacaaatcagagggaaaccactgttatgtggagcaaatccacaggccttcctctatacaatgccattgtatggatggatgctcgcacaagccccatttgcaggagattggaaagtgatctttctggtggtagaacccactttgtcgagacatgtggattgccaatcagtacctatttcagtgctttgaaggtgttatggttgatcgaaaatgtggatgccgtcaagaatgcagtccgagctggtgatgccttatttggcacaattgacacctggttaatctggaacctcacaggaggcattggcgggacagatcgtgatggaaataaagtatttgggcaccatgtcacagactgctccaatgcatctcgcacaatgcttatgaacctgaaggcacttgactgggacaaaccaacacttgagacgttaggaattcctgctgagatattgcccaaaattatcagtaactcggagagaattggtgtggttgccaatgggtttcccttggcgggcgtccctattgctgggtgcctaggagaccagcatgctgcaatgcttgggcagctgtgccagaagggtgaagccaaaagcacctacggaactggtgccttcattcttctcaacacaggggaggagcctacccaatcctcccatggtcttcttagcacgattgcttataagcttggcccaagcgcacccactaattatgctctagaaggctccatcgcaattgctggtgccgcagttcagtggttgagagacagccttggaatcattagcacagcagctgatattgaaaagttggctgatactgtgcaggattcaggtggaatatactttgttccagcattcaatgggttgtttgcaccatggtggagggatgatgcaagaggcatatgtataggaatcacacggttcactaacaaggggcacattgctcgagcagtgctcgagagtatgtgctttcaggtgaatgatgtcctcagctccatgcacaaggatgctggggaggcaggagaagtgaagagtgcagaaggggagttcctgctgcgcgttgatggtggtgctactgtcaacaatcttctcatgcagatccaggctgatttattgggtagccctgttgtcagacctgctgacatcgagacaactgcccttggagctgcgtatgcagctggattagctgttggagtctggtcgaaggaacaaattttcgctggtttgcacaaggagaacaccagagtcttccgcccgaaattggatgaggcccacaggaggaagagagcagactcctggtacaaggccgtttcaagatcatttgatttggctgacctttctctttagaatgacgagggatttgtgaattacttctggattgtataaggtgcttagcacttgttatgtccatgaataagttggtcaatggaacatccttcaaaag

SEQ ID NO: 1339 - DNA, 585 bp, Oryza sativa
  ref <308>: DATABASE ACCESSION NUMBER: AK059383
  ref <309>: DATABASE ENTRY DATE: 2001-12-06
tctcccgcaagcagttcgtgctcgaggtgctccacccgggccgcgccaacgtctccaaggcggatctgaaggagaagctggcgaagctgtacgaggtgaaggactccaactgcatcttcgtgttcaagttccgcacccacttcggaggcggcaagtccaccggattcggcctcatctacgacaacctcgacgccgccaagaagtacgagcccaagtacaggctcatcaggaatggtcttgccactaaggtagagaagtcacgtaagcagatgaaggaacggaagaacagagcaaagaagatccgtggtgtgaagaagacaaaggctggagatgctgggaagaagaagtgagagatgatactcatcttgcagtcttgatgtgttcattatcaaaaccttgctttgtttagagctgtctccttgtggcaatattactgaatgcttaattataactagaaaaattttgccacttatgttcttgcaatgttgaggcatctgtagtgttcttggattttgaggaaatttgtcggactctagcatatatagtactttaatcacggcgcatgttctttgtgtcttctaattc

SEQ ID NO: 1340 - DNA, 636 bp, Oryza sativa
  ref <308>: DATABASE ACCESSION NUMBER: AK059384
  ref <309>: DATABASE ENTRY DATE: 2001-12-06
gctgatgcaaaggctcctgcagctgatgatgacgatgatgacgatgttgacctttttggtgaggagactgaagaggagaagaaggcagctgaggagcgtgctgctgctgtcaaggcttctggcaagaagaaggaatctgggaagtcctcagtgttgcttgatgtcaaaccatgggacgatgagactgacatgaccaaattggaagaagctgtgaggaatgttaagatggaaggcctcctttggggcgcatccaagcttgtcccggttggttacggtatcaagaaattgcaaatcatgatgaccattgtcgatgatcttgtgtcggttgatagtctgattgaggactacttctacaccgaaccagcgaatgagtacatccagagctgcgacattgttgcgttcaacaagatctagatcttccttgagtcaggtgatggcgatcggtgcacaaagataaaaagaaaaatccggaagtttgaattaccgttgatacttcaatctagaagtttgaattaccattgatgtgtcgttcgtggtgtcaactagtacttgagcccgttttgtgttgagattgtagcactctacttctactgagatcgttttctcctcctttaatgtttaaagaccaatcaggtt

SEQ ID NO: 1341 - DNA, 682 bp, Oryza sativa
  ref <308>: DATABASE ACCESSION NUMBER: AK059385
  ref <309>: DATABASE ENTRY DATE: 2001-12-06
agcacatagtcagaacaccgcagagcaagtgtgtgtcctgcctcgcgtgaaagataagcggcgctctgctctgctcgccgaggagagagagaagagagagagagagagctagagatggcggcggcctcagcggcggcgcaggcggagggaacggtgatcgcgatccacagcctcgacgagtggaccatccagatcgaggaggccaacagcgccaagaagctggttgtgattgacttcactgcatcatggtgcggaccatgccgcatcattgctccagtttttgccgatctagcaaagaagcacacaaatgctgtttttctgaaggttgacgtcgatgaactgaagcctattgctgagcaattcagtgttgaggctatgccaacattcctgtttatgaaggagggagatgttaaagacagggttgtcggtgctatgaaggatgaactggcgagcaagcttgagctacatatggccatgtagtgttatagtggattagtactgatatcctaaataaaacgggccttcaggctctgaaaggattagtgcctctgtctgtggtggttttcatatgcttctagtatcaagcattgttcttaccgttgtctagttcatggataatgccttgcttgatccaagtttgtgctttgaatattccaacaaaataatataacctgtgttttgc

SEQ ID NO: 1342 - DNA, 587 bp, Oryza sativa
  ref <308>: DATABASE ACCESSION NUMBER: AK059386
  ref <309>: DATABASE ENTRY DATE: 2001-12-06
agatgtgtgaactcaccttatgatctaaaacttttgaggcataattactttctgacctgccaatctagtaacattcaaaacattttttcactgtgtttggctctgatgcttggactggcatgccttgccagaaagttagtgtcatttgctaatgttatgccagtagtaccatcatgtattataggcacagtagtgctgcatctgttttcctgatattgctcccttttagggtagactgagttcagcatgtgaatacatttcgactgttttcttgcaggtgctatgctcggctgcaccccagggctgtcaactgccgcaagaagaagtgcggccacagcaaccagctgaggcccaagaagaagatcaagaactagagtttgagatatcatttccgcggatcattgaaatcaacaggaagatcagagtttaagtttttttgtagtgtaatgcctcatgttgtatgccgaactttctgtttatcctgttgtatgttaaccttggttacgctggagagtactccagcttattttgatgacataattgactacaaagtcaaggttatatggcccggccttaatttttgtccc

SEQ ID NO: 1343 - DNA, 1274 bp, Oryza sativa
  ref <308>: DATABASE ACCESSION NUMBER: AK059387
  ref <309>: DATABASE ENTRY DATE: 2001-12-06
aaaaacaaatcccaattgccgctgcgtccttcgcctcgcctcgcacccaaaaccctagcgccgcccgctcgtcggaggtgaagaggcggcggcggcggcggcagcgtcgacaatggtgtggttccagtgcgaggactgcggggacgacctcaagaagcccaagctcgccggccacttccgctcctgctccgcctacaggctctcctgcatcgactgcggcgagttcttcacccaggagaccgtccagggccacacccagtgcatctccgaggctgagaagtatggtcccaagggacaggacaaagcatccaacaatgcacagggcaagcaagacaagccaaagccaaatgctgatgttgatatcaatgtcgggctgtcgacatatcccccttggttctgcagcctttgcaagacgacaaccactagcaagcaaacactcttatcacatgcagatggcaagaagcacagggcaaaagcaaaagcctatcatgcttctcagaagcaagcaaatggagttgaacaaactcccaaggaaactgttggtgcacctgtgacagaatcagcacaagtaaacaatgagaggagtactgaaaatgaaagaggtgtggacaacgatgcagcaaagagaaagagagcaaatgatacgacctcagaagagccagataacacgaaaagacagaacaacttgagcgtgaacagtggagaagtggtacaatcttcaaatgaagaggcagaaaccaaagcaaagagcaagggtactaaagatgaattagttagtagtgccaaccttaaaggcagtaaaaagcagaaaatcaagtggaagaaaattattaccaaagtacttcagacgaatccagatggagttctgaagttaaagaagctacaaaagctagtaactaaggaacttctggaatgtggtctgacagaagataaggagcagatgcacgctatcttgatggataagatttcttcaagctccaggttttctgttgatggcaagcgcattagattggttgcaaaggattgagagtaatggatcatgccccctgacagctgattccttgtcgacagatcaatgatggtcttacagtttgttatggcgtaaagccgagttttggttctattatttatacactgtactgcctggatcatccatacgatccgtggaactgatgtgaattttgcatttgattgttttgggagcaacagccgatctgatcgcaaactgatcttggcaacacggcttgctatcaatgacatcaatatttcatggc

SEQ ID NO: 1344 - DNA, 1012 bp, Oryza sativa
  ref <308>: DATABASE ACCESSION NUMBER: AK059388
  ref <309>: DATABASE ENTRY DATE: 2001-12-06
agtatgatgctttaagaaggacacgaggagatggaaactgcttttatcgaagctttatgttttcctacttggaacatatcctagagacacaagacaaagctgaggttgagcgcattctaaaaaaaattgagcagtgcaagaagactcttgcagatcttggatacattgagttcacctttgaagatttcttctctatattcattgatcagctggaaagtgttctgcagggacatgaatcctccataggggccgaagagcttctagaaagaaccagggatcagatggtttctgattatgttgtcatgttctttaggtttgtcacctctggtgaaatccaaaggagggccgagttcttcgaaccattcatctctggcttgacaaattcgactgtggttcagttctgcaaggcttccgtggagccgatgggcgagggaagtgaccatgtccacataattgccctatcagatgcgttgggtgtgccaatccgtgtgatgtacctagacagaagctcatgtgatgctggaaatataagtgtgaaccaccatgatttcagccctgaggccaattcatcggacggtgctgctgctgctgagaaaccttacattactttgctctaccgtcctggtcactacgacattctctacccgaagtgattcttgcccggtgaagcattgttggttttttcctcatggccagtttgagaaatcgctgtctagaactctgtagttatggtgctcgtgcatgccaccaaaggccggccttacaaagaaaaggacttgtgctcttggtcttgggtggtgaactggtgatcaaggcatgctttgcttgccactacccaaatatctcagatcggtagtttttccctgcgtcaagtctactctggtacaaacgatcttgacattgtggtgttgactgttgagaagattctgttgatactgttactaatcctctcttactcacctgcatcataaattgatagtgcatgctttgtcatggcaactaattccatttt

SEQ ID NO: 1345 - DNA, 315 bp, Oryza sativa
  ref <308>: DATABASE ACCESSION NUMBER: AK059389
  ref <309>: DATABASE ENTRY DATE: 2001-12-06
cgattgtggttttgttatttccattttggtgtgcacacgaggtgtttgctataatgtctgaaagagcttgtgtatacatggttggttcaacattatgtgttagtcatattttatatcgttgctgacctatcacatagtgcaggagtaaaatttttgctatctttattgttacctgctgtttattttccttttcgtaaagaatattagctttttggataacgaaaagaatattatgtatcctgcaaaaaggtttgatttgatggtcactggctagtacaaaagcaaagagagatcagacaaaacaaagttgtggtt

SEQ ID NO: 1346 - DNA, 1336 bp, Oryza sativa
  ref <308>: DATABASE ACCESSION NUMBER: AK059390
  ref <309>: DATABASE ENTRY DATE: 2001-12-06
aactgatgcagttttcagtcatgcccggtggctactccagctctggcatgaacgttggtgtcagtaggctcaaaatcgaggaagtccttgtcaatggactgcttgatgccatgaaatcctcgtcacctcgcaggaggctgaatgtagcatttggcgaggacaattcatctgaagaagaagaccctgcttacagcgcttggatggcaaaatgtccttctgctttggcttccttcaagcaaattgtagccagtgcacaagggaagaagattgctgtgtttctagactatgacggcacactgtcgcctattgtggatgatcctgacaaagcagtgatgtctcccgtgatgagagctgctgtgagaaatgttgcgaagtacttccccactgcaattgtcagcggaaggtcccgcaataaggtgtttgaatttgtaaaactgaaggagctttattatgctggaagccatggtatggacataatggcaccttcagcaaatcatgagcacagtgctgaaaagagcaaacaggccaatctcttccaacctgcacacgactttctgccaatgatcgatgaggttaccaagtccctcttgcaagttgtcagtggaattgaaggtgcaactgttgagaacaacaaattctgcgtttctgtacattatcgcaacgttgcagagaaggattggaaactggtcgcacggctcgtaaacgaagtgctggaggcttttcctcgtctcaaagtaaccaatggacgaatggttttagaggttcgtccggtgatcgactgggacaagggaaaggctgtggagtttctgctccagtcactcgggctaaatgactctgaaaatgtgatccccatctacattggagacgacagaactgacgaagacgctttcaaggtacttcgacagcgaaattgcggttatggaatactagtttcacaggttcccaaggaaactgaagccttctactcgctgagagatccatctgaagtgatggagttcctcaatttcttggtgagatggaagaagcactcagtgtgaaaaaaagaagacagtctgagcaggttttactaatactactccggcagaaataactgtagtttccgaggcgacaattttgaagcattggacgctgtagatagatgtaataactctctagatatgtggttccaattcattcttattgatcgatgttattgtattgttcatgttctccaccgctgagaaaaattaatcagtgatggttgatccggtctcttgccattataagttgtaagcaagaaggccctcttcttagtatccatgctgatgaacgaaattaaaaccttcatttttcgtgt

SEQ ID NO: 1347 - DNA, 512 bp, Oryza sativa
  ref <308>: DATABASE ACCESSION NUMBER: AK059391
  ref <309>: DATABASE ENTRY DATE: 2001-12-06
aattgcgacattttttgagcaattggggtgtcattcatgcaaccacgtttataattcacagacttcagcagcataaattgactccatctatttgatgcaggtaactgcacttctgtcctttgctgcatcttgctcagctggaggtgttatggttctgtttaaaagggacgtgcttttctgcagaaggtatccacaactgccttgtgggagattcgaacttgctgtagcgcttgcatttttgtcttgggcacttagtgctacatcagccattatcatgttctgtctccttgctgcattctagtcttgcatataatcctgtgtaagttctgtttatagtgctgccttttttctgttttatcttgttagctttgattttgtataggatcattttcaagaatatgtagtgaaccacacgaccgaaaagtggaaatgctggggaagttcataagtcctttagagtgaacattttctagaaactactgaatggaagatttgatcgaaatgttcagctc

SEQ ID NO: 1348 - DNA, 515 bp, Oryza sativa
  ref <308>: DATABASE ACCESSION NUMBER: AK059392
  ref <309>: DATABASE ENTRY DATE: 2001-12-06
atcgatgcaattcaaacttgacgatcgatatatgcagatgcaagtactctgaggtggaacccacgaccacgaccaccttccttgccgatgcaaccaacaaggggtatgtacgtatacccatgcttgattaattatacatactccgatcgatagattttatataagtatgaacactatatatccattacatgggcaatgcatgatcgattgcaggtctggtgctgcttccggaggatcagagatgggggcggagaacggcagctgcggctgcaacacctgcaagtgcggcaccagctgcggctgctcctgctgcaactgcaactagaagaaacttatctccatccaattcatcacctgatcaacgagctaccagtaccactacatatgccatgtactagctacctagcttgcatgcaagtccttaatttgctgctagctagctagctacctaccttagcgtctcatgtatgtcatgttgccgcctggcccctaaataaaattccttacttaatcgc

SEQ ID NO: 1349 - DNA, 1122 bp, Oryza sativa
  ref <308>: DATABASE ACCESSION NUMBER: AK059393
  ref <309>: DATABASE ENTRY DATE: 2001-12-06
acgcgactccaaacattaacatgagacttttgaaccttgttttcttctccggtattgttgccgcagcgcctggtactactctgcacgccagagcagcagccaatgacccgtgtgacattggttattgcacccagaatggaggcacaactggtggtggcagtgctgcacaagtaactgtgaagactctaggtgaacttacaacagcagccaatgccgctggaccggcagtcatctttgtccaaggcagtatctccggcgcagccaaggtacaagtcggatccgacaagaccatcatcggaaagacgggtagcttccttaccggtattggtcttacgatcaacggaaagaagaacgtcatcattcgaaacatgaagatttccaaagtcgaagcaacttatggtgatgcaatcacgatccaaaagtccaccaatgtctgggttgatcactgtgatctctctgccgtgagaggtgacgacaaggacttttacgacggtttggtggatctctctcatgctgcggattgggtcactatctcacacacttatttccatgaccactccaagggatcgttggtcggccactccgacaagaacgctgccgaagacgtgggcacacttcacgtcacatacgccaacaaccactttaacaacgtccgaagccgtggtcctcttcttcgctttggcacagcccacatcttcaacggatactatgatactatggacactggtcttaacagtcgcatgaacgctcaggcactaatccagtcttcagtgtttaccaacgttggaaagaaggctattttcagcgagtccagttctgaggtgggatacgttgttgcagaagacgttgttctcaatggagagagccagaacactgcaccaaagggtagtctgagtgctagtaagattccgtacaagtttactcttcttggatctggcaaggttgcgtctactgttccagggcaggcgggacagaagcttagcttttgatcaactttagcaaggtggaagcaggtcatgtttcacatggcatgtctttcaacagagtagtttgacctatgacgttctattcgtgtcacatagcgaagttaatcaatctattatctcctggttaaacgacaag

SEQ ID NO: 1350 - DNA, 1755 bp, Oryza sativa
  ref <308>: DATABASE ACCESSION NUMBER: AK059394
  ref <309>: DATABASE ENTRY DATE: 2001-12-06
gatgctgtgaagcgagcacaggaacttgctgctaagatgggattcagacaggatccacaatttgcgcctctcatcaatttgtttcctggtacatcctctgaactaactgtgcctcaaaaacctgcgaaggcacctgttctccgtcttgatgctcagggtagggaaattgatgaacatgggaatgttatcaacatgaccaagccaaccaatttgagcactctaaaagttaacataaataagcaaaagaaggaagctttccaaataatcaaaccagacttggattcccttgcaaaatcaagtgcacactttgatgaaaggatgggcatcaaccaaaacaagctcctccgccctagaaggcctggatttcagtttattgaggagggaaaactttcaaggcaagctgagctgcagagaattaagaatcaatttggtgaagcacaagctaaagaacttaaagtaaaacaagctcaacttgcaaaggcaaaggcagaagtagtcatgaacccgaacttgattgaagttgctcctgggaggcctccaaagcaaaagcagaaggaagagattcctgaaattgagccatgggatgcaaaaattttaccttctacaacatacgacgatttctccatggagaaggttaatatggaaaaaatcactatatatgtagagcatccagagccactggagccaccagctgagcctgcaccaccaccgcctcagccacttaagctgactaagaaggagcagaagaaactcagaacacaaaggcgccttgctaaagagaaagacaggcaagaaatgatcaggcaaggcctcttggagccaccaaagcccaaggtcaagatgagcaatcttatgaaagtactaggagctgaagctacacaggatccaacacgtatggagttggaaatacggactgctgctgcagagcgtgagcaggctcatgtagatcgcaacattgctcgcaagctcactccatcagagcgccgtgaaaagaaagagaggaagctttttgaagatcctaacacattggagactatagtttgtgtgtacagaatcagagacctgtcacatccgcagacacgttttaaggtggatgtaaatgcacaagagaaccgtcttactggtgctgcagtcattgcggatgggatcagtgttgttgtcgttgaaggagggaagaagtcaatcaaaaggtacaataagctgatgctgaaccgtattgactgggctgctgcggttgatgatgatgatgatgctgatgaggaatcagacaagcctgtgaatagctgtgcattggtctggcaggggagtgtggcaaaaccctgctttaccaggttcagtgtacacaattgccgtagtgaggctgctgccaagagggtgtttgcagatgcttcagttccacactactgggacctggctgtcaatttctcagaagattcatcttgagctgagcttctgttcagaacatggaggcgcctgctgttgaaacccctgcctagggattacgatgttcaattctcatgcagtaagtgatgagtagtagctaatttctcaccgtgggtaagtgtcctcttcaagttacgtacaagccttattacttgctctggaagcatttgtggactgagtaatacttcgtactgtcatgaacatacccttgtaagggactgctgatcttttcgttgcgggatttactcatgtgagctagaaactgaatgcatggaggaactgttgaaatttttgcagtataagcttccaact

SEQ ID NO: 1351 - DNA, 547 bp, Oryza sativa
  ref <308>: DATABASE ACCESSION NUMBER: AK059395
  ref <309>: DATABASE ENTRY DATE: 2001-12-06
agttcgctcgcagccgccgccgccgcctctctcactgccgccgccgccgcctgcctcgtactccaactcttcggcgactagatgacgaagcgcaccaagaaggcaggaatcgttggcaaatatggtaccaggtatggtgccagtttgcgtaagcagatcaagaagatggaggtttcccagcactccaagtacttctgcgagttctgtggcaagtttgctgtgaagaggaaagcagttggaatctggggatgcaaggactgtggcaaggtcaaggctggtggtgcctacaccatgaacactgccagtgcggtcacggtcagaagcacaatccgtcgcctgagggagcagacagaagcctgatcaggatctgtttgagaaagtgttcttggagttctatcaagactggtgaagttgccattttgcatatttagctaaaaagagaaatctagaatgttatctatctatttgtagatggaatatctgtccgcattgtgtacttgatttcccaagctaattttatcaaatgcgagcacttgatttgcgatcc

SEQ ID NO: 1352 - DNA, 1899 bp, Oryza sativa
  ref <308>: DATABASE ACCESSION NUMBER: AK104070
  ref <309>: DATABASE ENTRY DATE: 2002-08-28
cattgcgctcagttgaacagtactaccatacactgcagcaaatgaaatggggtcctatgacggaacacgttctggataatctccattgcaagatagatgcattccaggcaaaccaagtactcaagctgcttcatgaccacaccattgcacttggtttcttccagtggttaaagcggcaaccaggtttcaagcatgatggtcatagctacacaaccatgataggcatccttggacaagccaggcaatttggtacgatgaggaaacttcttgatgagatgaacagtgttcactgcaaaccaactgttgtaacatacaacagaataatacatgcatatggtcgtgcaaattatctaagagaggctgttaaagtattcgaggagatgcagaaagccggttatgagccagatcgggttacatattgtacattgattgatatccatgctaaaggtggatacctggaatttgcaatggatttatataccaggatgcaagaagtagggctgtcaccagatactttcacgtacagtgccatggttaattgccttggaaaaggtggtcacctggcagctgcttataagcttttctgtgggatggttgaaaatggctgcacacctaacctagttacatacaacataatgattgctcttcaggccaaagcaagaaattatgaaaatgttgtgaagctgtacaaggacatgcaggttgccgggtttcgtcctgacaaaataacatacagtattgtcatggaagttcttggtcattgtggtcatctggatgaggctgaggctgtgttcattgagatgaggcatgactgggctcctgatgagcctgtatatggtcttttggtggacctctggggcaaagctggcaatgttgacaaggcactaggatggtatcatgcaatgcttcaggatggtttgcagcccaatgtgccgacctgcaattccctactgagtgcttttcttaagataaacaggttccaagatgcctacagcgtgctccaaaacatgcttgctcaggggctcgttccatctttgcagacctacaccttgctgctcagttgttgtactgaggctcaagcacagatgggtttatgctgccagctcatggcgatcactggacaccctgcccacatgttcttgttatatttgcccgatgcagaacctggcggccagaatgtgagggatcacaccagatatttcttggacatgatgcacagtgaggacagagagagtaaaaggggtttaatggatgctgtcatagatttcctacacaagtccggcctcaaggaggaggctggcttcatatgggaggttgctgcccagaggaatgtgtacccggattctgtgagggagaaggacccatcatattggctcatcaacttacacctgatgtcggagggcactgcagtgactgcgctgtcaaggacactggcttggttccacaggcagattctgacaatgggcaaatgccctgaaagaattgacattgtcactggctggggcaggaggagcagggtaaccgggtcttccttggttagacagtcagttcagaagctgctacatctcttcgaattcccgttcgtcaccacgcgaggcaatactggatgcttcgttggatgtggggagccactgaataggtggctgcacaatccttatgttgagcgcatgcatctgctctagagactctagtgactagtgaggttattccagtcagaaataagggactcatctaaacagggtgcagttttgggggaagaatgatgatctggtgcatctgtctagattggtctgtagtctaagttgtagttctctttgattccttatgctttgaaacctcttatttgtgataacatttagagatggcattggtgcattttaagtgagattatcctgtctt

SEQ ID NO: 1353 - DNA, 1616 bp, Oryza sativa
  ref <308>: DATABASE ACCESSION NUMBER: AK059396
  ref <309>: DATABASE ENTRY DATE: 2001-12-06
atatttcatccaagttgatggggataatttttcttatcaagtcaagcttcaagagggtggtgattgcacacattatgagagcaaattagatgattaagttgcaaacagcaggagctattgctagtagcatattaactggaatatattgctaagcatatcatagtttcaaaagatggaattcttttaatcgacatgtatcctactttactcgggatttaaggaggtatgctgtagaccgcggaactatcacaaaggaaaaggttattctctttcttcatggatttcttggtacgagtgaagactgggttccaatgatgaaagctctctctcctagtgcacgggttatagctgtcgatcttcctggccatggcgagtccgaaattctacagcatgatgttgaaaactccaaccaaatctccttttcagttcaatcagttgcagatttgttactgaagttgataagaaatataactgatggagcggtggttgttgttggctactcaatgggtgcaaggattgcactacacatggcattaaatcaaaaccacaagataagtggagctgttataatttcgggtagtcctggattgagagacgaggcaagtaaaagacgtcgtagtgctattgatagatcaagagcccacttcctgtcttcttgtggactggaaaattttctcgagacgtggtactctgcgaaaatgtgggccagtttacgagaacatcctaaatttgattctctagtgaggacacgaatgaaacacaataatatcaaagctctatctaaggttctcgctgactcaagcatagggacgcaaaagtccctgtgggaagatttgaagcacttgaagagccctctcctcatcgtcgcaggtgaaaaggacccaaaattcaaagagatatcgcagcaaatgtgcagggagataagaaagcacaaggatcgcgaatccgatggtctatgtgagatgatcattattccagacagcggccacgccgtgcacgttgagaaccctcttcctttagttagagcaatcaggaagttcttggtaagggatataccagacgtgatatccaagtagattacgaaatggaattatctatgtagaggagttcaagttacagcgatagccagagacagcagagcagaccaactctttggtgcggatgggtgcggcagttctggatgctattctgccgccggtagtctcacctacaccagcccgggaactattctcattgtggactggtgggggaggattaaagattagatccagagagaagggatgtgactccattatcatgcaaagttcctaaccatgtgacagacttggtaaggaaagaacgcaatgcgagggtcttcagagatgaagattcttccctccaacgagtagcaggaaaaatcatcattgatgagcttcacgtatagcggtataggagtacttgtgaggacgaattctaggagtacttgtgtgctgcagcattgtcccgagctgtacagtgctcttttcatattttgctgctctgtatatgctgttgcctgttggttagttgccactctctctcgccgtgacccttttttattaatacaaaatgatatgcaagtcctatgcatatccgtg

SEQ ID NO: 1354 - DNA, 837 bp, Oryza sativa
  ref <308>: DATABASE ACCESSION NUMBER: AK059397
  ref <309>: DATABASE ENTRY DATE: 2001-12-06
gatcttggtaacttgacacctcaagcggaagattacataatccaattgcagtctcgattggatgccatgaaaaaggaattgcatgatcttaggaggaaaaattctgctctgcaaatgcagcagtttgttggagaagaaaaaaatgatttgctggactatctaagatcactaacaccagaaaaggttgctgaactctcagagtctacctctcccggagtgcaagaggctatccactccgtggtgcatggtttgcttgcaactctttcccccaagatacactcgaaggcccctcctccactaggtaatgcttctgggggtgtactgaatcttgggggtgaggatgatgactgtgcagagcttgtggagaatgcatccctaccttttcagcccctaatatctgttccccgtgattaccttgcacgtttgctattctggtgcatgctcttgggtcactacatccgaggtcttgagtacaggttagaattggcgcagcttctgaggatatctaccgatgtagagtctttccccagtggtgatgatcttatcatttgagaaagctttgaccggttgatcgatgttgttaaccaatcccaaaggaaatggtttggctgagagatggtggaggcggccacactgcatttctcctcagaaagatgctctaaccagtagagctcggaaccccggcaggtcttgtaaagtcaggcaaacagctattcgggtgtaaagttagtgttatatattgatgcgaataatcactcttttcttcttttattttatactgtgaaatatgaaaggaacttggttgctcttattgttaatcatatgatagatctgtgg

SEQ ID NO: 1355 - DNA, 695 bp, Oryza sativa
  ref <308>: DATABASE ACCESSION NUMBER: AK059398
  ref <309>: DATABASE ENTRY DATE: 2001-12-06
cacttatgaggaccgtttcaacttgtatcggattgagcaagaacttgggacagaaataaaaacgatacccccacaaatcgatctggcagtgtattgtcaatgatcaatgtaacattgtaacggtgtttttatcatttacttattgttaggcaagtacatcagatgtacatagcacctcatcagggttttatttggtgccttgatgacacatctaagcttatattccattagtgaggaagtgttttctgtcggcactgatactaatcatgttaactgtggacttgcatttttggctgcttgaagacgctgcttgaagacccagggctgcggccaaactgaacctttttcttgctccttgtatctgctcaatatttgctttatattcatttgctagcgacagttttggttgtgttatattaggatactgctgcttgagtctgttaccgtcactgtggttccttaattttcctttcctttttcccttttcttctcatgtttggattggactagtagaagtatttccctcactgtattcctcgtgtcaatttctattatccttggtgtagactgttaactttctttaatttaccctcgtttcgtaatatgtatccttgctatttgtgatgttttacacctacttctgtttgacccattacaagcttattacaagctgcaatatataatctgttacatag

SEQ ID NO: 1356 - DNA, 1131 bp, Oryza sativa
  ref <308>: DATABASE ACCESSION NUMBER: AK059399
  ref <309>: DATABASE ENTRY DATE: 2001-12-06
cacgatgcacatgttgctatgctgttgggttctgccaggatacttcaggaacaccgtgatgagctgaagggtaccgtagtacttgttttccaaccagctgaggaaggtggtggtggggcaaagaaaatgatagatgatggagctgtggaaaatatagaggccatttttggggttcatgttgctgatgttgtacctattggtgtggtggcatccaggccaggacctgtaatggcagggagtggattcttcgaggcagtaataagtggaaagggagggcatgctgcacttccccaccacactatagatccaatactggctgcatcaaatgttattgtaagccttcagcaacttgtttcccgggaagctgatcccctagactcacaggtagtaacagtaggaaaatttcaaggaggtggagccttcaatgtcatccctgattctgttacaattggtggcaccttccgagcctttttaaaagagagttttaatcaattgaagcagcgaattgaagaggtcattgtgtcacaagcatccgtgcagcggtgcaatgctgtcgtagacttcctcgacaaagaccgccctttcttccctccaacaatcaacagcgcggggctccacgatttctttgtgaaggtagctagcgagatggttggccccaagaatgtcagggacaagcagccactgatgggtgccgaggacttcgccttctacgctgatgcgattcctgcaacttactactacttcctgggcatgtacaacgagactcgcggaccgcaggcgcctcaccactccccctacttcaccatcaacgaagacgccctgccctacggtgcagccttgcaagcatcactagctgctcgctatctgcttgagcaccagccccctaccactggtaaggcgaaagcacatgacgagctgtaggtacggacactttcgctctctccctctccttctctctcgtgaacgaattctctttattgaacgcgaatgataaagattggcaagatagaattctgtcaaattaaggtggcatgcccatcgattctgtatttctaggtgccatgtgtgactgatgtacatatactcctgattactgcgcattccaattagcaaatttggtacttctgcttc

SEQ ID NO: 1357 - DNA, 353 bp, Oryza sativa
  ref <308>: DATABASE ACCESSION NUMBER: AK059400
  ref <309>: DATABASE ENTRY DATE: 2001-12-06
gaaagaaaagctggggaacatgaaggagatgctaggattctccaaagacgtgctctcatggctcgaagacatgacctcatctgaggacttgcaggaggccttcgatgtcatgggtgcgttgccagatgtgttctccggtggccacactacatgtgaagactttgtccgggcgatcatacacggtgcaaagagctgaacgaagttttccgaggatctacaatttgtgttgaaactttgccacgcgcctgtatgtttgtaaggatagtcagcttttgtgtggcagctgtaaacattataattcttccttgtaaaatgaaactgggcaaggtttgtatgctagcttttgtcctggc

SEQ ID NO: 1358 - DNA, 303 bp, Oryza sativa
  ref <308>: DATABASE ACCESSION NUMBER: AK059401
  ref <309>: DATABASE ENTRY DATE: 2001-12-06
gagcagaagattgtgaagaaagtcttgaaaatacagaaaaccaaggacaagtcagcctcaaagtagacaactcttggaagtggaagcaaggcgatgtgctataaacaaggaaaacatttttgttgatggtgatgatcaatggtctagcctcttctagctgaatgttttagtataactgtctgagtttggagtacttgaaatccgtctaccattgtgatgcacttgatgtcaaatgttgctgagacatatttgatccgctcttttgttcacttctctgaattgcgaatgaattttacttacttg

SEQ ID NO: 1359 - DNA, 795 bp, Oryza sativa
  ref <308>: DATABASE ACCESSION NUMBER: AK059402
  ref <309>: DATABASE ENTRY DATE: 2001-12-06
ttttgtggaggaagaatgctacttttgctatctctcggcactacaaacgctttgatgtatttgaagaagcagaagctaataaagctgctggcaagtatgacaatgcatcaattgattaccaaatagagttttaccgaaatgagggcctaacatattatgcacctgctaagcttcctattacaagtgatgtccctgaaggttgtgtcatcatcagagagcacattcccatcacgaatctcttcacatgcctttggttcaatgaagttgaccgtttcacctccagggatcaaattagtttcagcaccgtccgggacaaaataagggctagagttggctggatgcctgaaatgttcctggactgcgaaagacgcaacttcgttattcagggataccacagggagctactagagcaaatgattgcatccggttggaagccccctccaacggccagtgaaccatctcgaaaactcagattaggtagcaggaaagctcctccatcaaagaagtcttccatgaagcggaaaagagtgaagaaatcgagctcgcggaggcgtctccccaaaccaatcactaggatgactgatactactacctggcaaaagttgggcgcatgatgatccagggctctttcctctttgttgacacaattcactttgctggagggcgagctcattctattaggacacatacttgtagttttttttccctccgacgagatttgttcatagtttattcttgattgttggtgtaaataacagcgaaagcaatataatcaaatattttcgatgagcagcc

SEQ ID NO: 1360 - DNA, 909 bp, Oryza sativa
  ref <308>: DATABASE ACCESSION NUMBER: AK104071
  ref <309>: DATABASE ENTRY DATE: 2002-08-28
aaaaaaaaaaaaaaaacgcggcttcccccaccgccatctcctccgctccctccccggcgacgagcaagcacaccgccggcgccgcggcggagatgaaccccttcgcgaagaagcccacgccgcgagaggcgatccggagcagcaaacgtgagctgacgaatgctaccagaggtattgagagagatattggaacgttgcagctagaggaaaagaggctagttgctgaaatcaaaaggactgcaaaaactggcaatgaggcagcaaccagaattctggcccgccagctgatcaggctaagacagcaaatttctaatttacaaggtagcagagctcagattaggggcattgcaacacatacacaggcaatgcatgccaacacttcagtggctgctggcatgcaaagtgcaagcaaagcaatgggagctttgaacaagcaaatggatccagccaaacagatgaaggtgatgcaagaattccaaaaacagtcagcacaaatggatatgacgaatgagatgatgtctgactccattgacaatatcttagacgatgatcaagctgaggaagaaactgaagaccttgcaaatcaggtcctggatgagattggtgttgatattgcctcacagttatcctcagctcctaaaggaaggattactggaaagaaggttcaagctgatgaaagttcagaattggacgaactcgagaagaggctggctgctctgaaaaatccatagaagagggaacttctctgtaacccaacattttacacaaagacctgctctgtacctacatttcaaattcgtgatacgaaacaaaatagtacatttgcacctgtaaatatcggatggttgatacttcaactatgtgaagatggatgtgtatcaacctgacaagcccgaaaattcagtgagt

SEQ ID NO: 1361 - DNA, 1028 bp, Oryza sativa
  ref <308>: DATABASE ACCESSION NUMBER: AK059403
  ref <309>: DATABASE ENTRY DATE: 2001-12-06
agagcttccccccgccacgccggccacctcaccactctcgtttcgtttcaggcggcgagagcgggagagcaagcgaattctctcagctcgatttgtgttttttttttgagggggaggaggtgagtgcaacggcgatggtgatgacgaggaggagggcggcgctgctggtggtggcgatgtgcgcgtgcgcggcgctgccgtcgaccacgacggcgaacaagttctccatcaactggaagcccaacaccaactactccgactggcccgcccagcacggccccttctacaagggcgactggctcggtactctcccctctccccctcctcctcctcctgcttcacccgcctctcgtgtgcccagatctggcagatgaaacgcttgatttctcatttggtttgattttgattcttctcatctctgatttgggatgtgggcagtgttctactacacggcggggcaggcggacgtgatccaggtggacgcggcggggtacaatacgtgcgacgccaccaacgccatctccaactacagcaagggccgcacctacgccttcgagctcaacgagaccaagacctactacttcatctgcagctacggctactgcttcggcggcatgcgcctccaaatcaagaccgagaagctcccgccaccgtccccgccggccgccgccaaggacaagtccgccgccgcattcaccgcctcgcgcgcctcgctcttctacgccgccgccgccgccgtgctcgccgcgattctcaggatgttttagctgctagtagtagtagcgttgtctgctgtcttcgtctgatttggaggtcctcccctgatttttttagtgtgtttggaaccctggaaattttagtagaacctcgattattagtgtggatttgcgtaagccgtaagctgtcaattgagcaaagatcagtcaatcattctaccaaggtgaagaaattcagagctactctgcaggtccagagacggagtagttttgactctgcatcttgaatctagataacagcattttttaatc

SEQ ID NO: 1362 - DNA, 694 bp, Oryza sativa
  ref <308>: DATABASE ACCESSION NUMBER: AK059404
  ref <309>: DATABASE ENTRY DATE: 2001-12-06
aaaaaaaaactgtaaatgtacgcagagacagcagtggagataccaggaggaattcagatagggatgtcgatgatttcttgctagttgagcaggcagcaagagatagcactgaaggattcatatctggattcttggcaagatacagaagtaatcatcagggactactttcatctttggacgacagcatagaggatgcaaatgggtactggcgcttcaatatggaagggagtgaagagcttgagaactacttcatattcaatgatcggtacagagggatgagaatggacattgacggcatgtcttatgaggaattgctagcattgggagatagaattggcaccgtaagcactggcctttcagaagacgcgctgtccaagtgtctagacagaagcatgtacatggccactacttcaggaactcatgaagattgtgagagaaaatgcagcatatgccaggaggaatattcagatggtgaggaggtgggcaagatggtctgcaaacattactaccacttctcctgcataaagaactggctccggcagaagaactggtgtcccatttgtaaatccgtcgccctgaataccaactagcactagcagggtgcttcttcagaaaccaaatgtacagattctccatgaatgttctacccagacacaatttgcattctttttttgatactcttttagatcgaacc

SEQ ID NO: 1363 - DNA, 1404 bp, Oryza sativa
  ref <308>: DATABASE ACCESSION NUMBER: AK059405
  ref <309>: DATABASE ENTRY DATE: 2001-12-06
gattacactgacaggcttcatgtttctattgacatcggcattccttggctttttttattcccctcatctcgatacagcaccacctagatgggtgcaccttgcacatggaatgcttctcttcctttaccagacttttgatgctgtggatggtaaacaagcaagacgtaccaactcatcgagtcctttaggcgagctatttgaccacggatgtgatgcgcttgcatgtgcttttgaggccttggcttttggaagcacggcaatgtgtggaaaagctaccttctggtattggttcattgctgctgtcccattttactgcgcaacctgggaacactttttcacaaacacactaattcttcctatagtcaacggaccgactgaaggccttatgctaatctatttgtgccattttttcaccttcttcacaggagctgaatggtgggcacaagatttccggaagtcaatacccctactaaactaggtacctcttgttcctgaggtcccagtatatggaattgcactgtttctaatgatagcttttgctgtaattccgacgattggatctaacattcacaatgtgtacaaagtggtcgaggcaagaaaaggaagcatgctgctggcactagcaatgctctttccttttggtttgctgttggccggagttcttgtctggtcctacctatctccttcagatataatgagaaaccagccacatcctctagttattggaactggttttgcatttggctttcttgtgggcagaatgattctggctcacttatgtgatgagcccaaaggtctgaagacagggatgtgcatgtccctagcatatttcccatttgcaattgcaaatgcgctgactgcacggcttgatgatggaaacccccttgttgatgagcagctagttctcctaatgtactgcttatttaccgtggctctctacatgcattttgctacatctgttatccatgaaatcaccaatgctctcgggattcattgcttcaggatcactaggaaaaaggcataattgtgaaccatccacaattgccttgctctggttggcaatcatatgttatatttgcgcaaaaaggcaaatattttcaattattcttcatgaagattctgctcttcagatcatatttgcatttgttattcccaggattgctattatccgagattgaaattatcatcagaacttgtgctgataaggaaacgacgtccttggaagagttggattttgtttgttgtatcacctagaacttcaattcagtgatgctcggcaaaactttttttttgggggtacatgttgagcagattggcagatgatacatttgtaatttttacattgtagcatcacctgagatgcaggtgtacaatttatgctaaaaatgatgctcattatgcctt

SEQ ID NO: 1364 - DNA, 595 bp, Oryza sativa
  ref <308>: DATABASE ACCESSION NUMBER: AK059406
  ref <309>: DATABASE ENTRY DATE: 2001-12-06
agccggcgttaattccaagaaaagaagaagagaagaatctgaaaaactttaagccgctatgggtctgcaggaggattttgagcagtacgccgagaaggcgaagaccttgccggagagcactagcaacgagaacaagcttatcctctatggactctacaagcaggccaccgttggagatgtcaatactgctcgtcctggcatattcgcccagagggacagggcgaaatgggatgcatggaaagctgttgaaggcaaatcgaaggaggaagcaatgagcgactacatcaccaaggtgaagcagctcctggaggaggctgctgctgcagcctcttaagaagttatgaactctatgctacatggcttctgtcagctgagcaactctatgctaatctggttgctgacaacttaccattctatcaattcgggatgtgaactatgtacctctttgtgtactgctgcataatttatccatctatttatgaagactattagtcctatgaatcatattatcttgtaatctttcatctctctggctgtgtactgcacaatagaaaaataatggttgtcaagccagttacatgccccaatttcaagt

SEQ ID NO: 1365 - DNA, 611 bp, Oryza sativa
  ref <308>: DATABASE ACCESSION NUMBER: AK059407
  ref <309>: DATABASE ENTRY DATE: 2001-12-06
gagaaaaaaaaaagaaaattctcgaagcgaatggagaagagcagcaccgccgcgggagggaggagcagcacgccgccgccgccgatgtacacggacgagttcgcgctcgaggggaagaagcccgtcaagaaccccttcgtccccatcggtgcattggtcactgctggtgttctgacggccggcctgatcagcttccgatatggcaactctaaactgggtcagaaactgatgagggctcgtgtggtcgctcaaggagcgacggttgctctgatgatcggcagtgcctactactacggtgatcaaatcaagctgttcaagaaagggtcaagcccttgaagacaagtacaggaatcttcatatctatacttagttttgggcaagattacgctgttcattgttcctccagccattggggtttaaccatgttgttttcgcctggcacgtggtagctaacaaaaacaagatcagatttggatttgcgcaattactaggctttgaataaaaagcttttctttcgtcgacttgacaccaagttatgcattgtattggaacacagcactgttaatcgagcgaatgggtaaaatacatacacagtgcagacctgtggcttg

SEQ ID NO: 1366 - DNA, 1152 bp, Oryza sativa
  ref <308>: DATABASE ACCESSION NUMBER: AK059408
  ref <309>: DATABASE ENTRY DATE: 2001-12-06
agcacagcacagcacacatctcgtccagtccatccatggcgagcctgagcgtgccgccggtgccgacggacccgcggcgcgacgcgatcgacctccacagggcgttcaaggggttcggctgcgacgccacggcggtgaccgccatcctcgcccaccgcgacgcctcccagcgcgccctaatccggcgccactacgcggcggtctaccaccaggacctcctccaccgcctcgccgccgagctctcgggccaccacaagcgcgccgtcctgctctgggtgctcgacccggcgtcccgcgacgccgccgtcctccaccaggcgctcaacggcgacgtcaccgacatgagggcggccaccgaggtggtgtgctccaggacgccgtcgcagctgctcgtggtgaggcaggcctacctcgccaggttcggcggcggcggcggcggcggcctcgagcacgacgtcgccgtcagggcgtccggcgaccaccagaggctgcttctggcgtacctgcgctcgccgcggtacgaggggcccgaggtggtcgacatggcggcggcggcgcgcgacgccagggagctgtacagggccggcgagaggcggctcggcaccgacgagaggacgttcatccgcgtcttctccgagcgcagcgccgcccacatggcggccgtcgccgccgcgtaccaccacatgtacgaccgctccctcgagaaggctgtgaagagtgaaacttcagggaactttgggtttggcctgctgacaatcctcaggtgcgccgagagcccggccaagtacttcgccaaggtgctccacgaggcgatgaaggggctgggcaccaacgacacgacgctgatcagggtggtgacgacgagggcggaggtggacatgcagtacatcaaggcggagtaccaccggagctacaagcgctcgctcgccgacgccgtccactccgagacctccggcaactaccgcaccttcctcctctccctcatcggccgcgaccgctaacgtcgattggtttcggtctctttgagcgtgtgttaagggacgcatttgttccatagcgcacaaacatggcaattatttatgtgcgtgtgtagtggtgtgttcgaacgttcgtttttcgtgtaataaaaaaaattgagtttgctgtcttgtg

SEQ ID NO: 1367 - DNA, 1026 bp, Oryza sativa
  ref <308>: DATABASE ACCESSION NUMBER: AK059409
  ref <309>: DATABASE ENTRY DATE: 2001-12-06
aatccatattcaccatcggtttcttccttaggtttcttctcctgagaggcagtagcaggggttcttcccatcatggggactcgcttagttcctcgggaaactgcagctcttctcggtgctttcgttgcgcttctggccgtcagcttcggcgccgtggcggcgccggcgccgctcgtggttggctccatcaagtgcttggattgctctcccgacgacgtcaaagctgaggatgcgttcagagggcttcaagtaggcatcatgtgcaactccggcgccggcgaggcctacgagacgaagatgctcagcggcctcgacgagaacggcggcttcagcatcccgctcgccgccgacctcctccgcgacgacggcgagctggacaaggactgcttcgcacagctccacagcgcgccggagacgccgtgcgccggacagaccccgcccaggatcgccaaggccgggcctggcaacgacaccatcgccgccgccgccgctgacgccgcgccgacctacctcgcggtctccgacgacacgttattctctcccgtcgcgtgcaagtgcggcaagtacaagaagaagttcatgttcgccccgccgccgccgccgccgcccaggccaccggccccggagtacaagcccccgacaccgacactgactccgattccgacgccggagccatcgtacgggccaccggcgccgaagccaccagctccgccggtggaggacgagccgcagccgttcttccacaagcacccgaagctcaagttcatgcacaagaagaagccgtgcccgccgctcgtcgacgtggacattccccggcccaacaactgagctgcacgcgacacgacgcagcaaagctcgatctaattaaggatgccgtcgagtcgttgtagtttgtgtttgtcacgtcgcagttttcgttagtgttttgtttggtttggttcgtgctgtttgtgctggcattgcagtttcagactttcagttcgttgctttgtttgtgaaataaagattgtggtctattcagagggt

SEQ ID NO: 1368 - DNA, 1133 bp, Oryza sativa
  ref <308>: DATABASE ACCESSION NUMBER: AK059410
  ref <309>: DATABASE ENTRY DATE: 2001-12-06
aaacgcgaggagagaaaaaactagccgttgcgctactcctccgccatggacgcgacggcgccgctgctcagccccgcctccgacgaccgcttctgggaccgcctccgcacccgcgtcgacaccatcctcgaggaccgccgcctcgtcgctccccccgccgccacgtgcggggtggaatccgagcgggggaagcggctcagggaggactcgctgatgctggtgcgtggcctcgactccgtcgccgccccgctggcgcagctctccgacaccctcaccgccgcgcagaagggagtgaatgcgctcgccacgtgctcttcccaggcgagggaatgcgagagaggtgatgaggaggaggagccgaaagccaagcggcgctgcagcttggctgagacggtgagcttcgacggcgagactccggtcgccggagcagattcaggtgaaggttcagagaaagaagaattagctgcggatgcgaaactgcgtcaggagaacggcggcattcaggccacttcggaggtcgccaagagcaccaatctgaagcgtgccagaaatctggcggtctcgatggccggaagagcggctgctctggcgagggagctgaagaacatcaaatcggagctgcacttcatgcaggagagatgcggtttgcttgaggaggagaacaagaggctcagagaggggtatgacaatggagttccccctgaagaagatgacctggtgaggctgcaattggaggctctgctcgcggaaaaatctcgactggcgcaggagaacgccaacctgtccagggaaaaccagagcctgattcagctggtggagtatcatcagctgacctcccaggacctcgctgaatcttacgaggacgtaatggaggggatgcggctggacttctcgtcgccgctaggcaagatcgacagcgatgaagaaggcgagcgtgagaaccgaagagttgctgtcactccatctgataagttggaagccttggagtcatctgatgagtagataaatctgaggagaataagctgggtcttctccagtggtggatttactgatgagtaacagtatgatcttctatttctgctgttgtatgatgcttcaatttggccactctcggtggccatatttatgtgatc

SEQ ID NO: 1369 - DNA, 1619 bp, Oryza sativa
  ref <308>: DATABASE ACCESSION NUMBER: AK059411
  ref <309>: DATABASE ENTRY DATE: 2001-12-06
acgcccgatcgtttttgcttccttcagatccaaaccaaaccaccacctgcggcgcgcgccgcccgcggcgagagcccggcgccgatgaagcaccatcatgtggcgcgggggcgcgccgagccgcggcggatgggcaacgccgccatggtcatcaccatgctcctctccctctgcgtcctcacctacatcaaggctcgctactgctccacccccttccccaaggcggcggaggagatggaggtggtggagatcgacgaggattacgacagcacgaggtacaagatgacggggccgataggggaggaggacttcgacccgaccaggccgacgtgctacgtcacgagcaagcggtcggagcggtgcgccgccgtgggcgacatccgcgtcgacggcaaccactccaagatctacatcaacccgctcgacaaggagtggagaaccaagccgtacgcgcgcctccacgacgccgtcgccatggacgacgtgcgggagttcacgctcgtccccttcggcggcgccaaccacaccgccgtgccgccgctctgcacgcgcaaccactccgtcccggcgttcctcttctccagcggcggcttcgccggcaacctgtaccatgactacaccgacgtgctcgtcccgctcttcaccagcaccaaccacttcggcggcgaggtgcagttcttgctcagcgggatcaaggattggtggctcgacaagttcacgccgctgttccggcagctctcccggtacgacgtcatcgacgtcgacaacgaccaggaggtgcactgcttcccgcggatcttcatcggcgccacgttccaccgcgccatgggcatcgacccggcgcgctccccgggcggcgtcaccgtcgccgacttcaagcgcctcctccgccgcaccttccgcctggagcgcgccgtcgcgtcgcgcacgggcgcgccgcggcgcgacaagccgcgcctcctcatcatctcccgcaagagctcgcgccgcttcctcaacgagcgcgccatggcgcacgccgccgcgctcgccaggttcgacgtgcgcatcgccgagccggacaaccacaccgacatgcccaacttcgcgcgcctcgtcaactccgccgacgtgatgatgggcgtccatggcgccggcctcaccaacatggtgttcctccccagccgcgccgtgctcatccaggtggtgccattcggggggctcgaatggctcacccgtgtcaccttcaaggatccagccaaggacatggatgtcaactacatggagtacaatgtctccttcgacgagagctcgctgagagagctctacccgagagaccatttctacatccagcatccatacgatgtgcacaagaaaggctgggacgccatcaagacggtgtacctggacaagcagaatgtggagctcaacctcaccaagctcaccaacacgctggaacgggcgcgcgacttcttgccagagccctgacaccatggctggggatcttgatgatgctgatggtagataggagagctcttctgtttttgattcgctttttttctccttcttcttcttgtggtgagattcatttctttcattgttttttgataaaaaggaggagacgagtaagatcgtgtcat

SEQ ID NO: 1370 - DNA, 1167 bp, Oryza sativa
  ref <308>: DATABASE ACCESSION NUMBER: AK104072
  ref <309>: DATABASE ENTRY DATE: 2002-08-28
actcaaagagcaagaaaagccacgaagctccgggcgaagccgagacgagccggagcagcagcaccccgcccgtcgcgcgcaatggcgatccccaaggtggacctgcgagggctcgagccggggacgccggggtgggaggcggcccgggccgcggtgaccgcgtccatggtgtcgcacggctgcgtcgtggtcgcgcacggcgcgctcgggccggagctccgggaggcgctcttctcccgcgccgcgcgcgagctgttcgcgctcccggcggaggccaagcggcggaacgtctccacggtggggccttacaggggctacatcaccaacacccccgggatgaactgggagagcctccacgtcggcgccgccgccgacgccggccgcgtcccggagttcgccggcctcctctggcctgatggcaaccccgagttctgtgacacgatcgtgtcgttcgccaagaagatgacggagctcgagcgggcggtggagaggatgaccctggagggcctcggcgtcggggaggaccacatcgcctcgcacctcgacgcgcacgacgacgccgtccgcttgtcccgctacggcccgccgccggacgccgcgagcgccatgtccatgggggagcaccgggacgacaccgtgatcaccatcatcgtgcagcacgaggtggagggcctcgaggtgcaggccagcgacggcagctggcacacgatcccccctgagccggacacggtcgccttcatggccggtgagctgttcacggtggtgacgaacgggcgggtgcccgcgtgcgtgcaccgcgtgaggacgccgagccaccgcgagcggctcgtggcgctgttcaccacgcggtgcaagggcggcaccgtggtgagcgccatggacgagctcgtcgacggcgaccacccgctggcgtacaggccgtgcaacgaggacgagtacgtccagttccgccactcggaggagggcggcagattcagcgaaccgctcaaggcgttctgcggagtagacgtacgctagctgcacaatgatccactgaagatgatccttggattggaagtatgagtggtagtacctatcatcttcagttagtgctggttactcgtctttatgggttgtttgaatgtttgttctcttacgtttctgaaaaattcaacggcttcatatatt

SEQ ID NO: 1371 - DNA, 1370 bp, Oryza sativa
  ref <308>: DATABASE ACCESSION NUMBER: AK059412
  ref <309>: DATABASE ENTRY DATE: 2001-12-06
aaagcagaggagaggaggaaaagatagtgtcttgctgtgtacactcaggtcaacagaggcggctggagatggcggcggcggcggacttccggcggcccacacccaagttcgtcgccgcgttgtcgaggacgagctccgcgttcctcttcttctccgtcgtcgtcgtggggttggtctcgtctgctcgttggatcaccaggttcacgttgcaggcgagccccccagccacggcggccattcccgccgccgtcgccgccactacccgcgccggagtaccagcggcgccgccgcatcccacctactccatctcctgctccacgccgccgcgccccccgcttaacctctccggtggtggcggcgccagaacgccccaaacctcccaaaccctcgcgctcgcgctctcctcctcctcgtcctcctgtcgctcctcccctgaccccgccaccgcctccgcctccgtctccgcctccaattcctcctcgtgcccctcctactttcgcttcatccacgaggacctccgcccatggcgcgacgctgggggaatcacccgcgccatgctggcgcgcgctcgcgtcaccgccagcttccgcctcctcgtgctgggcggccgcgccttcgtgcatcggttccgcccggcattccagacccgcgatctcttcaccatctggggcgtcctccagctgctccgccgctaccccgggcgggtccccgacctcgacctcatgtcgactgcgccgactggcccgtcgtccgcacgcacctctaccgcgggaagcacgctgccttcatgcctccactgttcagctactgcggggatgacaggactctggatatcgtcttcccggactggtcattttggggctggccagagatcaacataaagccgtgggatgccctgcggcaagacctgaaggatggcaataatagggtgaaatggttggatagagtaccttatgcatactggaaaggaaatccagcagttgctgtgacacggcaggaattggttaactgtaatgtctctactacaaaagattggaatgcaaggatctacaaacaggattggttcagagagagcaaggcagggtacaaggactcaaatttgggtagtcaatgcacgcacaggtacaagatctatatagaagggtcagcatggtcagtcagtcagaaatatattctagcatgtgattcaatgacctattcaaatgtccaaacatttagagaatttgaaatacggtgttactcatttcatattatttttcttctttttgctagatttagtgtttgctttgtaaagccattgtaacagacagatataataatctgaactgttcagaagatattcttaacgcatatcatgccacctttatgtt

SEQ ID NO: 1372 - DNA, 1275 bp, Oryza sativa
  ref <308>: DATABASE ACCESSION NUMBER: AK104073
  ref <309>: DATABASE ENTRY DATE: 2002-08-28
cagtagacggcaatactcctgatccaaatcaagaaaatctttctgagagtgctcaaggaagccacgctggctctcctcccaacatggcatctattgtcacagctacagttgctgcagcatcagcatggtgggcaacacaaggtcttctccctctttttcctccacctatagcttttccatttgttccagctcctagtgctcccttttccacagcagatgttcagcgagctcaagagaaagatatagactgcccaatggataatgcacagaaggaattgcaagaaactcggaaacaagataattttgaagctatgaaggtcatagtgtcttcagagactgatgagagtggaaaaggagaagtgtcgctccacactgagttaaagatatctccagcagataaggccgacaccaaacctgccgcaggagctgaaacaagtgacgtttttggaaataagaaaaagcaggatcgctcttcatgtggttccaacacaccgtcaagtagtgatatagaagcagataatgctcctgagaatcaagaaaaggctaacgacaaggcaaagcaagcatcttgcagtaactcttcagccggtgacaataaccaccgtagatttaggagcagtgcaagcacaagtgattcatggaaggaagtttctgaagagggtcgtctggcttttgatgcactgttcagtagagaaaggcttccccaaagcttttctcctccgcaagtagaaggatcaaaggagattagcaaggaggaagaagatgaagtaaccacggtgacggttgacctcaacaagaatgccgctattattgatcaagaactcgacacagcggatgagccaagagcttcctttcctaatgaattgtcaaacctgaagctgaaatctcgcaggaccggtttcaaaccatacaagaggtgctcagtggaagcgaaggagaacagggtaccggctagcgatgaggttggtaccaagaggattcgtcttgagagcgaagcatcgacatgatttgctttccacctggttgctggcctctaccaagtcagaagttaaatttacatccgagctaccataggacttcagaccttccaatgcattacctcacaaactcaatttattgtgtgttgtatcttaatgcttgccaagcagctcctatagactgcttttaaaccgtatctcatagacttttgattagcatttaagcgactgctaaactttcttcataaaagggtattatccttattatgcattatagtctggggaaggaaataagtgg

SEQ ID NO: 1373 - DNA, 836 bp, Oryza sativa
  ref <308>: DATABASE ACCESSION NUMBER: AK059413
  ref <309>: DATABASE ENTRY DATE: 2001-12-06
attgctaacatcgaacatttccgtgaggacaagcttggttatgcagatcttgttgaggaagtttctgttggggagagcaagattgtcaagatcatgggcattaaggatatgggaaggacagctactgtgcttgtccgggggtccaaccagttagtaattgatgaagctgagcgcagtcttcatgatgccctttgtgtcatcaggtgcttggtgaacaagaggtttttgattgctggtggtggtgcaccagaaatagagatgtcaatgcagcttgctgcttgggcaaaggagctccaagggatggagagttactgcatcaaggagtttgctgaggcacttgaggtcattccttacacattagcagagaatgcagggctcaatcctatttctattgtgactgagcttcggaatcgtcatgccaagggtgagaagaatgcaggcatcaatgtgaggaagggtcagattacaaacatcctggaggagaacgttgtgcaacctttgctggtgagcacaagcgccatcacactagcttgcgagtgtgttagaatgatactgaagattgatgatatagtcactgtgaggtaaggttatgtggcggttgaccatgtaggcctgccctacttaggtctacgtgggttttagaattttatttgttagcgtgcctttcagtctctatgttcttagcgtgtggctttgatgtctgtcgaagagatttatattatgtattttgttacctggatggaacggtcaagtgtagccatctgtttgcacttgagacggccggcaacgccttgccatattgttttacacttacagtttgctgcagatttcttcgc

SEQ ID NO: 1374 - DNA, 1315 bp, Oryza sativa
  ref <308>: DATABASE ACCESSION NUMBER: AK059414
  ref <309>: DATABASE ENTRY DATE: 2001-12-06
actagtccactgttcgtctcttccttagcatactgtgtgcataagtgaagaggggaagggggagccaggcatcttcgagcctaggagctcaatctgtttttgattgttgcagatggaatacccaaggacactcacttcctgaccgctcaaatatcccatccattccatgctctgatgtgagcaactcggttccaagaatcttggaaacatggggaaaattcccggatcagcagtcgccatggccacgccgccggagccgtcgtcttggctgagcctcaaggtgttcttcctgagggtgagcaggtgcgaggtgaacgagtccatgctggattctgtgaccgtcacccacgccccgctcaccccggacaccgtgctcgaggtgagcggcggcagcgtcgccagcaacggccacgtgtcgctccgcctggaccgcgccggcggcgtcggcgccgccgccacggagggcggcgactcctgcaccttcgtcagcacggcggacgtcagggtgtccgggagcgcgcggttcgacgtccagtgcagaggcgagcggctcgtcgtcgggatcctggacacgcgcgacgccggcgctggcggcggcggctgggtgatgaagtgccaggtcgcggcgcagcgcgggtcgggcctcgtgaggcgcggtagcaaggaggcgaagccgccggtggtggaggtgtacgtcgccggcctggcccgcggcgcgccggtcgtcttcacgagggcgatgcagctgcggttcaggaggcggcgccacgtcaaggccttcatggagcccatcccggagcacggcgagccggcggaggactccaaagaaacgctgcctccgaagcatgaaaccgaggtgtcggagtacaggtgctacaagccggagcaggacgccggcgacgccgactacgacggcttctacgtgaagcctgcaggcgaggaagacgacgacggcgatttctcgtggttcaccgccggcgtcagagtcggcgtcggcatcagcgtaggcatctgcctcggcatcggcatcggcgccggcctcctggcccgttcgtaccactctacgtcgaggagcctgagaagccggctgatctcgagtctgttctgaacatcaacattgcatcaagatcactgtccatctcaaaattcagatatccctctgttggagatggactagtccagtgtgtgtgtatatatccttgttagtatagttgttactaccgtcgtagatagatgagatgtgctatctttggcactgttggttcactggtttatacttatatgatcaggcattgtcaaattgagaccctttcat

SEQ ID NO: 1375 - DNA, 1595 bp, Oryza sativa
  ref <308>: DATABASE ACCESSION NUMBER: AK059415
  ref <309>: DATABASE ENTRY DATE: 2001-12-06
aactccttctcccccaaattcgctagagccatggccgccgccgccaccgccgccgtccccctcgacgaggccaaagccaaggaggttctccgccaggtggagttctacttcagcgacagcaacctcccccgcgacaacttcctgcggaagacagtcgaggagagcgaggatggcctggtgagcttggcactcatctgctccttctcgcggatgaagaagcacctaggcctggacttggacgtgaagcaggagaccatgccggaggagacggtgctcgccgttgccgaggtgctgcggcgttcctcggccctccgtgtcaccgaggatgggaagaaagttggcagatcaattgagttgtcgaaactggatgagatcatggagcaagtggactctaggacaattgctgcatcaccatttccttacaatgtaaagctggaagatgttcagtctttctttgctcagtatggcaaggtgaacagtgtgaggctacctcgacatattgccgacaaacgacacttctgcggcactgctttagtcgaattttcagaagaagaggaagcaaatgctgtattaaagaatactcttgtttttgcagaagcagatctggaaataaaaccaaagaaagaatttgatactgaaagagaggctaagaaagaagcttatgagaagtcacaacctactaagaatggtcatgatgagggatatccaaaaggtctaattgtggccttcaagctgaagataattcaaattgatggtggcatggcagaaaatggtggggacaaagagggtgaaactgatgatgccaataaatcaagaacagggcatgacgagaaaatccctgagaacagtgatatcaaggaagacttgtcagatgatgttgagaagtcaaaagaggcagctgctcaatctgttaagaaaggagaaagtccttcagaaaatgcggatgatccaatttcaagggaagattttaaagaagaatttggcaaattcggcacagtgcggtatgtggacttcagcataggggaggattcaggatacattcggttcgaggattctaaggcagctgaaaaggcccgtgcacttgcggctatttcagatgaaggtggtttgattatgaagggccatcttgttactttggaacctgtgtccggtcaagctgagaaggattattggagtgcgataaagggcggtcaaggaaaatatagagacaatagaagtaacaggggaagggactggaagaataacaggggcgggaggcacttcggtgggaagcgtggtcgccactcggacggccatgaaagggcaaataaagctcgaaaagtcgatgctgctgcttaaaggcctcgtcgtcttatactagtaacctcagcttatgagctctagtgaggaacggaaatgtttgctccgttgcttgcttccacaactttgggagcaaaccttttgtgttgtgtttcttgtcgtgagctatgctctttggaagtaagaaacggtgaactcatgatgaaacggaaaattttgttcggtcaaagcttgggatgaatcctttacatgtatctgatatatatactaatacttccgtcatctgaatatctgat

SEQ ID NO: 1376 - DNA, 638 bp, Oryza sativa
  ref <308>: DATABASE ACCESSION NUMBER: AK059416
  ref <309>: DATABASE ENTRY DATE: 2001-12-06
atgcaagaagaagcggcgtcgtcgtcgtcgtcgtcggcgtcgccggtgatggacgggggcaaggcgatggcggtgctgctggcggtggcggccgcggtgctgctgctgctcccgctcgtgctgccgtcgctgctgctgctcctccccgtggtgctgctcctgctggtggtttccctcgccttcttccccgcggccggcagcgacggcgtcgtcgccgccgccgcggtcgccggcacctaccagccgccgccgcctccgcctgctcggtcgtcaccgccgccgtcgtcgtcgtcgtcatcgtcgtcgcggcagctgtgaaatcttgatcggctgttcgatcgagtgcccggccgccggaacgtcgatttgcgagaggcgaatcgcggcgagacgacgatgcctgaggccgtcagatcgagatggaaatttagcctctgttaattgtctcgcgcattgacctggcaggaaggcaggtcaagaacatgtacagaaattaggtagctctgatcaacgagatcattccattttggagtaatttatccatggtcccgttcttaattccgtgctctgcacttgttgctgtatttcgatttacgcatgaaaaactttgggtagaaatagaatgttaccgacccctg

SEQ ID NO: 1377 - DNA, 699 bp, Oryza sativa
  ref <308>: DATABASE ACCESSION NUMBER: AK059417
  ref <309>: DATABASE ENTRY DATE: 2001-12-06
atttcccccaatccccttcctgtctcacgcgaaaagcgacgatggcggcggcgattcctgcggagcgagggtgacaaggcacccgtctccggctaatgccgcgcacgtctccggcgggcagcgatggtgtgcagtgcgaagacaaagccacctcctcgcagcatgtctccgctgcgccaatagcctcacgtcgacgtcgcacccgcgccgacgcgccactgatggtccctgcgtcgagccgccgacaacagcctcttctcctcctccccgttgccccgccgtgccggccaatgccctgtggcacgaggtatgggcgtgggcgataagcaccattgccgtcgatgtttgtcgccccgacagcgtcctgacctcctttctcctccagttcatacggtgatttgttaagaataggtggtggtcaaattgatctcggtgcatatcctaccgtatttggctctgcttggatttgttccctagttatttttttcttcttctctcgccagtctttccgtttccaaattggcatatgttttccttctctgtttccttttcttctctctttatttttttgaacaaatcctattgaaaatatgtaggaaggatgtgtatttgagtatatggttctacactgcgaaattgggttgctcggattttgtatttatcatgttaagaggcatatttcgattctgtttatttttt

SEQ ID NO: 1378 - DNA, 1229 bp, Oryza sativa
  ref <308>: DATABASE ACCESSION NUMBER: AK059418
  ref <309>: DATABASE ENTRY DATE: 2001-12-06
agttggtgaggcatccaaacattgtgcagttatatgaggtcatggctaccaagactaagatatattttgtgctggagcacgtcaaaggtggagagttgttcaacaaagttcagagaggaagactaaaggaagatgcagcaaggaagtacttccaacaactgatttgcgctgttgacttttgccacagcaggggtgtttatcaccgtgatttgaagccagaaaatcttcttcttgatgagaacagcaatctgaaggtttcagattttggcctaagtgctcttgctgattgcaaaagacaggatgggctgctccacacaacctgtggcacacctgcttatgttgctccagaagtgatcaacagaagaggctatgacggtgctaaggctgacatatggtcttgtggagtgatactctttgtgctattggccggctatctacctttccatgataagaacttgatggatatgtataagaagattgggaaagcagaattcaaatgtccaagttggtttaataccgatgttcgaaggctcttgctcaggatacttgatcctaacccaagtacaaggatctcaatggacaaaatcatggaaaatccttggtttaggaagggtctcgatgcaaagctgctcagatataatctacaaccaaaggatgctggcctactggctttgtcaactggacttgacctctctggtatgtttgaggagtctgataagaaagagtccaaattcacatccaccagtacagcttcaacaatcatatctaagattgaggatattgccaagggcttgcggttgaagctcacaaagaaagatggtggactgttgaagatggaaggctccaagcctggaaggaaaggtgttatgggcattgatgcagagatattcgaggttaccccaaactttcatcttgtggagctaaagaagacaaatggtgatacacttgaataccgtaaggtcttgaaccaagagatgagaccagctttgaaggacatagtctgggcttggcagggtgagcaaccgaagcagcagcagcagccaacgtgctaaaaaactttgacaagggcaagttttttgcaatttgagtcgacttccaatcgtttatgtatttctgcagcttttgttcctcttgttattcattttcattcctcatgtattgttaatattaatatcgatgctatcttcaaatgaggatttatttgaaaaaaatgttgagtttgtttctgg

SEQ ID NO: 1379 - DNA, 1354 bp, Oryza sativa
  ref <308>: DATABASE ACCESSION NUMBER: AK059419
  ref <309>: DATABASE ENTRY DATE: 2001-12-06
gaaggagaatggttttagtagtaattcaaactcattcagatattcgggaggtagtagagatgacacatcaccagttgcaagcacttcaaacgagtctagatacatgggcgagagagttgatactttaagaaaacctgctggttctgttgctgctctcaaagagctttgtacggttgagggttacaacttagttttccaagagcagccatcacgtcctcgtggttcatcaggtaaagaagcttatgctcaggtcgaaataggtggtcaaatcctgggaaaaggagttggagcaacatgggaacaagctaagctgcaggctgctgatgaggctctaggaaatttgaaatccatgcttggtatctttgcacataaatcatctggatttcaaaggtcatcggtatcaaattttaatcgcttcaaaccagatttccagcggagtctacaaaccataccttctggttgggactctaggaacaatggtcgtgttctttgatgttcgtcttctggacatctgaacttgatgggatcaatagcatggaacctgttggcccagaagaacttcaaggactgcaagtatggacgagatggtcatggaaggagaaatcgctgtgcacatgatgcctgcatgtttcgttctgtcgttctcgatttggtgatagaattgtgttgctgtcatttccaatctagtaactcggtaactcccaacaggtgctctgtttgaagatgttgtaacctggcctccgagtgagctcacgccacacggtgctcggctgtgatttgccctgactctgttacccgtgataccccagtggagtgtggatattagaagcatgacagttggtaaaatggcttccttgcgtgcagtagattagccaattgtattgctcgaattaatttgtttcttcagatcttagatttagggtggtagcttgattggacagttttgctacgtagtggtagcttcaattccatgggggtaattcccatggctttgattccagttttacactgcttcctgctgctcttcatggccatgtttggttcatacagcaaccgggttcggctggtgttggtccaaggcttaaggaggttggctatgtatacagattggtgccatactcctgcattgggtgatgcatgatgctgaattgctgattgatgctacagagtatatacctgcattggttgaagatctttatgagaagctcgaatcttggtggctacgtgcacaatgttgtccctctttctgtttatctgtatgcttgagataagcagactttggccttctatttccgtgaggagatagaggccggagggtgtatttcttatcacctcaatcaaaaaagataattag

SEQ ID NO: 1380 - DNA, 1235 bp, Oryza sativa
  ref <308>: DATABASE ACCESSION NUMBER: AK059420
  ref <309>: DATABASE ENTRY DATE: 2001-12-06
aaaaaaaagtgatcttgtagaaatagtgcctgaacctgttgctaagtggcaggatattggccctgaccactccaatatattggatgctttctatgctgagccacataggtatgcctatacctttcaaaattatgtgtttgtgacaagggtcatgcaagaaagggaatcttcaggtggaataaaacctctcagactgatggaaagaagtgttttcagtgataggatggtatttgttcgtgctgttcatgaagctaactggatgaatgagatggagatcagcatttacgactcatggtttgatcctgttgtgtcatcgcttccaggtcttatccctgatggatttatctatctaagagctagcccagatacttgccacaaaagaatgatgctccggaaaagagcagaggaaggtggtgttactcttgactacttgcaaggtttgcatgagaaacacgagagctggttgcttccttcaaaaggaggaggtactggtgtgttatctgtcagtcagctgcccacacatttggaaggttccttgcttccagcaattcgagatcgtgtcttttacttggaaggagatcacatgcactcaagcatccagaaggtccctgctctggtcttggattgtgaacctgacattgatttcaacaaagatatagaagctaaacggcaatatgctcagcaagttgcagaattctttcaatttgtgaagaaaaagaaggaagctccatctgaacaaacaagcactgacaagaaccgtatcaatccacagatcatgcttcctcacaaaggcggattgtgggttcctgatggaagaaaccctttctcaggatctgctatgaatctgaacttcagaagagccatgtcttcctatctctcgacataggatttcagctccagaatgaacgtaggatcttacaaatcccactctcactgaccttgtaaatgggcctatgcgttaagttaaacctaggtatgttagccactgatgtaagatagtctgccaccgcatctccatcttttgtaaatgatcatcttccaccctttccgagttccatgttttgtagtagcgtcagcttccgtttgtctgagttctggtatctgtatcgttatgttggttgctgactacattctgttagatgatccggaactctttgacatttctgggaaagatgcttcagtacttgccgtttgtttgtcatcaaggttgccatgattggtcatgcatttgttcc

SEQ ID NO: 1381 - DNA, 1543 bp, Oryza sativa
  ref <308>: DATABASE ACCESSION NUMBER: AK059421
  ref <309>: DATABASE ENTRY DATE: 2001-12-06
tatgaatatgctccagctgattttgatgttcgtgcacatcatgaaagagagcggttcaatggtatggatgagcaagaccagatgggacatatgtatgatggctacgagagaaaacggcgtagatcatctgagaggagcatggaacggcctttccactcagaaagaaggtttctgcaaagagatagagaccgtgtcgagatggatggatcggatttacgtcatcggctccgtaggagaagaataaatgagtcttcattggcaattagtccagaacgcaatggagagcaacggcggagggatgagcgctacagggaaagggcacatggtcaccgttcacacagggatcatcaccagagctctcgaggaagcactcttagctctcgtctgcaaggcagaataaagcttcctggaagatctcctgacagagttgatactcgctccgagaaagagcgagatagaagaagactccgggacaggctgtctccagttaggcgcacggaatttcagggtaccaggcatagggaggcaggacaacatgaagagcagacccagcggagatcaagtgaacttgctttaggttccaggaatgcagatggccagcatttgacaaaggatgtgcctgactcacacaacttccctcatcgcaaaaactcgagggactccagtaaggccaatggaagtgttgagcctgaagcatcgcttgattttgagggcccaaagccccttagtgtcatcttacagcggaaaagagaggcagcatgggccaatggcacatctgcctgtagccccaaacaagataaatctgccgaggtctcacacaggcaagcttctctggctgaagctgagaaggaaggtgacaacataattagttctgatgaatacaaaagtggatctggcgatgaagaattcagagacgaaggccacatccctgtggagggccatgggcaatcttcatctcatggtgacaaacttgaggctgaagatattattgaggtggatcccgtggaaaatcaagatgctgataattatgaccagagggagggggagtcctactatgagcctatcgaaggccaggactacaaatccgatgacgagaatgcttatgaagatgatgatgaagagtatgatgacgatgatgattttgctcggaaagtaggggttgttttctcttgagctctgtgggccttctcctggttttgttgcatgcagcaaagctgaaaatgcttgccttagtgaatctatttggataaattcctctggtgctttgtgttttgttcttgaagttcatagtgccaaagcctttatttataaggctgataactgataagtataggtcaggtatgaagcgggggtaggattcataaattaaaagggctttacgtgtaaaaactgctgcactcgttgtgttcagcatatatctgatctatcctgaaactattgtattgtattagtttcctaactaacagacaagatatttctttgataaattttttgcctgatatgggtaatataatcagccccattttggaggggttcttttctt

SEQ ID NO: 1382 - DNA, 596 bp, Oryza sativa
  ref <308>: DATABASE ACCESSION NUMBER: AK059422
  ref <309>: DATABASE ENTRY DATE: 2001-12-06
gtggagagcttccacgggtggagaggcagccaaggatacgatagcaaggaagagagagcgttgaagatgctgctgaccaccccgttcgtgtcgtcccctgtgagggtccagggcaatgggggcagcggcgcctcgccgtgggcgggcgcggcgacggcgctgaggatccaggcggcgaagcagctgacggggcgtgtggtgacgacgaaggcggacaagacggtgggggtggaggtggtgcggctggctcctcacccaaagtacaagcggcgggagcgcatcaagaagaagtaccaggcgcacgacccggacaaccagttcaaggtcggcgacgtcgtcgagctccgccgctcccgccccatctccaagaccaagcacttcctcgccgtccccctccccccgcgcgacacccgccgcaagtcccagctcctcccgcctctccagtcccagtcccagtcccaagaccaggaccagccacccacgcctcctccttcctccgattgatggatttttcttctcccgtaatcgtaaattcgtaatgtaataatctgtgctgtactatgtactccattgatttttatttgctctggatttcg

SEQ ID NO: 1383 - DNA, 1962 bp, Oryza sativa
  ref <308>: DATABASE ACCESSION NUMBER: AK059423
  ref <309>: DATABASE ENTRY DATE: 2001-12-06
acacagaaggcgagctctcgaccgccactactgtacacggcccagagcgagcctcctcctcctctgcaccaccggagatggcttccgccgcgctgccggaggccgtcgcgccgaagaagaagggcaacgtccggttcgccttcgcctgcgccatcctcgcctccatgacctccatcctcctcggctacgatatcggggtgatgagcggggcgtcgctgtacatcaagaaggacttcaacatcagtgacgggaaggtggaggttctcatgggcatactgaacctctactcgctcatcggctccttcgcggcggggcggacgtcggactggatcggccggcggtacaccatcgtgttcgccgccgtcatattcttcgcgggggcgttcctcatggggttcgccgtcaactacgccatgctcatgttcggccgcttcgtggccggcatcggcgtgggctacgcgctcatgatcgcgccggtgtacaccgccgaggtgtcgccggcgtcggcgcgtggcttcctgacgtcgttcccggaggtgttcatcaacttcggcatcctgctcgggtacgtctcgaactatgccttctcccgcttgccgctgaacctcgggtggcgcatcatgctcggcatcggcgcggcgccgtccgtgctgctcgcgctcatggggctcggcatgccggagtcgccgcggtggctggtcatgaagggacgcctcgcggacgccaaggtggtgctggagaagacctccgacacggcggaggaggccgcggagcgcctggccgacatcaaggccgccgccggcatccccgaggagctcgacggcgacgtggtgaccgtccccaagagagggagcggaaacgagaagcgggtgtggaaggagctcatcctgtccccgaccccggccatgcggcgcatcctgctgtcgggcatcggcacccacttcttccagcaggcgtcgggcatcgactccgtcgtgctctacagcccgcgcgtgttcaagagcgccggcatcaccgacgacaaacacctcctcggcaccacctgcgccgtcggtgtcaccaagacgctcttcatcctcgtggcgaccttcttcctcgaccgcgtcgggcggcggccgctgctgctgagcagcacgggcgggatgatcctctccctcatcggcctcggcgccgggctcaccgtcgtcggccagcaccccgacgccaagataccttgggccatcggcctaagcatcgcctccaccctcgcctacgtcgccttcttctccatcggccttggccccatcacgtgggtgtacagctcggggatcttcccgctccaggtgcgcgcgctgggctgctcgctcggcgtcgccgccaaccgcgtcaccagcggcgtcatctccatgaccttcctgtcgctgtccaaggccatcaccatcggcggcagcttcttcctctactccggcatcgccgcgctcgcctgggtgttcttctacacctacctcccggagacccgcggccggacgctggaggagatgagcaagctgttcggcgacacggccgccgcctcggaatcagacgagccagccaaggagaagaagaaggtggaaatggccgccactaactgatcaaactaaccgcaaaatcaccaaatcctaagggttttcttgcaaaaacgtgtgctgtactggctagctagcaagtaatagcagcaacgtgggaagattcgctgatccggcgttgctggagagcgacggccggcgacgacaaagctgagctccagctcgagacttcttaaaatcatcttcaagtacatggattttattttgctctttgctttgtccgtaaaagttgtactatgcgatgaagaataccagtatgtagcaaggctgaggttgtgtgtagctactagaagtgtcagtcacgttgttcttgtaagaaatgtttaactgttaattaagcagtattgttgcagtaatc

SEQ ID NO: 1384 - DNA, 326 bp, Oryza sativa
  ref <308>: DATABASE ACCESSION NUMBER: AK059424
  ref <309>: DATABASE ENTRY DATE: 2001-12-06
atgttctaaatctcgaggaccaagaagagatgaagctggccactgcgtaaggccatggggctggctttacattgggccaatgaatttacacaccgcaattttgaataatggaaaaaagagcaaaaacttattccataatgtgtgcgtttgtagaattaaagtttgaccaaaagtgattcattttcgccggtgttttgatgagccggtacactgtaactgtcatgttgagatgttaatcttaatttcttgttttgatttagcctgctgagaacaggacttcatcaggatatgatgcgagagctatattcatgatagatacattggtc

SEQ ID NO: 1385 - DNA, 864 bp, Oryza sativa
  ref <308>: DATABASE ACCESSION NUMBER: AK059425
  ref <309>: DATABASE ENTRY DATE: 2001-12-06
tttgccctcgtatcaccacagccaccaactctccctctccctcgccgccggcgcgcgagcttcaccagccatggccgccaccgccgccgcctccgtagccgcgatttcgcctctccccggggcatccctcccgcgccccgtctccgcgagggttcctcttctccctagggcttcccctcccacatggcgcctcagcgtcggctcggcgcgcgcgcggtcgacgcggtgccttgcggcggcggggggtggcgggctggcgccggagatgagggcgacgctggacaaggtggtggggtcgcacaaggtggtgctgttcatgaaggggaccaaggacttcccgcagtgcggattctcccacacggtggtgcagatactccggtcgctggacgtgcccttcgagacgctcgacgtgctcgccaacgaggcgctccgccaggggctcaaggagtactccagctggcccaccttcccgcagctctacatcgacggcgagttcttcggaggatgcgacatcaccgttgatgcatacaaaagtggagagctgcaggaaacactagagaaagcaatgttatcttagtataaacgtcgaaacacaccatagagtacatataaatggtatatggtcctttacgatgtactcttcagccatgacaaagaactggtgatgctaagattgtcaacagttcaattcatcaagcagtgaggtccaactcgaacgtgcaattgtactcatgactaataaattttaatattgatgacaaatacttcctgttgcaacactcggatgtcacagctctaaatgtctggatctctaaatgtctggatggtattctcttatagagctgaggcgatgatcttgtacct

SEQ ID NO: 1386 - DNA, 308 bp, Oryza sativa
  ref <308>: DATABASE ACCESSION NUMBER: AK059426
  ref <309>: DATABASE ENTRY DATE: 2001-12-06
attcctctcttttctctgaatagaagtccgattggtgaggcgaggcgacgccagggagccagcgaggcagcgacgtgcctccaggccgcgcgccgccgtcgccgcctcgaagctccctgcgccgccgtcgtaggttagtagcgtgccgctgccgctgccgtgtgtgtggagccgccgtcgcatgtgatgtgtactctgttgaactccaaaacatgtgagcttgttatgtactgcatgtgatgtgctgctatgatgctatgcatgcaccgatgtactgcttaagtttatgtgatgaacttgttaagttt

SEQ ID NO: 1387 - DNA, 871 bp, Oryza sativa
  ref <308>: DATABASE ACCESSION NUMBER: AK059427
  ref <309>: DATABASE ENTRY DATE: 2001-12-06
atcgagctctctctgcggcaaacccctccctccttcccacccaagggggaaagctccgccgccatcgtcgtgctgctccccgttcccgcggatccatccggggctctgggttgatctacctcgccgcttaagttcactatgtctggaatgccatctgatgaggcaactggtcaagtgaggctcgaaggagatgtttctgacaaaaaggaagaaaaaactcaagagcagagcgaagcaagtggaatgccctcaccacaagaagaggaagcagccatcaagaaaaaatatggtggaatactgcccaagaggacgccacatataactaaggatcatgatcgggcttactttgattctgctgattgggctctaggcaagcaaggtggaagccacaaacctaaagggcctcttgaagcacttcgaccaaaacttcagcctactcaacaacatgcacgtgctcggcggactccctatgcatctgctgacaatgatgagtgtatgaatttgcctcctgaggatttgatccagaatggtgatcccatcgaagacaagaacaaggaagaacagtaacgagtagctgcaccctgtctatttggagcgttgccaatcctgtcctcgagccaaactgttgccttggtaaataactagagccaatgcctacacttgtggggttgagctctgcagtgtttaacttaaacgtaagacgtggtatgtctggcgtctaccacattcagctgttcagtgtctttctggcatctgtaacagctaggaatgaaaacttacatatgatgctgtgataccgatgctgtagtacctgatgtgcaaagaaacaaataatgcttcaaattcagctccccatgaatggaaattagtc

SEQ ID NO: 1388 - DNA, 1120 bp, Oryza sativa
  ref <308>: DATABASE ACCESSION NUMBER: AK059428
  ref <309>: DATABASE ENTRY DATE: 2001-12-06
ttctctcatggcggcggcggggaaggagccgagcagggttctggtcatcggcggcacgggctacatcggccggtacatcgtcgccgccagcgcccgggaggaccacctcacctccgtcctcgtccgtgacccggcgccggcggaccctgccaaggctgccgacctccagggcttccgggactccggagccaccctcgtcaagggagatctttatggccatcaaagtttggtggcagccatcaaatctgctgatgtggttatctcggctgtgggttacgcgcaactagcagatcaaacccgtattatttctgctattaaagaagcagggaatgtgaagagattcttcccttcagagtatggtaatgatgtggaccatgtacatgcagttgagcctgtgaaatcagtgtatgctacaaaagctcgtataaggcgtgtaattgaggctgaggggatcccatacacatatgtctcctcgaacttctttgctggtcgtttcttgccaagtctggcacaggcctggatcaagggccttccaaccgacaaggttatcatccttggtgatggaaatgtaaaaggagtctttgccacagaggaggatgtgggtacctacactattaaagctgtcgatgatccaagaaccctgaacaagatcttgtatctcaggccatcaagcaacattttgtctcacaacgagctcgtctcactctgggagaagaaggttggcaagacatttgatagggtgtacatcccagaagatgaagtcctgaagaagattcaagaatccccagcaccgttgaatgtcgtactgtcaatcaaccattctgtctgggtgaagggggatcacaccaactttgagatcgagccttcatttggagttgaagctactgaactttaccccgatgtgaagtacaccactgtggatgaatacctgaacaggttcctttgaaatctgtacaaatcctacaaggctcgaatatataaaatatggaatagatattagacagtgaaagttgtgtttttcaataagcaaaatttaattttgtacaaaacgctctagagtgtaacttattgagaacagtgatgctggtgctgtctttgctgccaccgccagattcattgc

SEQ ID NO: 1389 - DNA, 1696 bp, Oryza sativa
  ref <308>: DATABASE ACCESSION NUMBER: AK059429
  ref <309>: DATABASE ENTRY DATE: 2001-12-06
ctggagaagcaaaccctcgcgccgccgccgctctctcccacccgccgccgccgccgccatggacgccggcgagacctccacctcggactcgctggtacttgccacgggcgccgcgcagggaccaaagaggaagccgcccccgaagcgcttcgtccacacgcccatcccgccctccatcctctccgacccaaccctcgccgctgccgccaccggcctcctcccggcggcgtacaacttcgagctccccaagacggcgcaccgcatccgctcctccggcgcccgccgcaccgcgctgcagcttccggagggtttgctcctcttctccctcccgctttcccacctcctcgcgcccttcctcgagccggacccctccaacgacgtcctcatcctcgccgatcccacctacggcgcgtgctgcctcgccgaccgccccgccaaggcgctcgccgccgacgtgctcgtccactacggccattcctgcctcgtccccgtcacctcctccctcctccccgtgctctacgtcttcgtcgagatccgtgtcgacgcccaacgcctcgccgacgctgtccgcgccgccttcccggaccccgccgatgcgccccgcctcgccatcgccggcaccgtgcagttcatttcggcagttcacgcagcgcgtgagatcctcagtcacgatggttaccagggcatcgtcgtgccacaggcaaagccgctgtccgccggcgaggttcttgggtgcacagcacctgccctgaaaaggtccgagggggtcggagcggtggtgttcgtcgcagacgggagattccacctcgaggcattcatgattgccaatcccggggtcaaggcctaccgctttgatccattcctgggtgtgcttgtgctggaggagtatgaccatgtcgggatgaagcaagcgaggaaggaggcggtgctggcagcaaggaaggccaagagttggggagttatactaggcacccttgggcggcagggaagcgtaaaagttctcgacagggtggtggagcatttggaggagaaagggctggaacacacagtagtgctcatgtcggagctgtccccggcaaggatggagctgtttggggattcggtggatgcgtgggtgcagattgcatgcccacgtttgtcgattgactggggtgaaggattcaagaagccaatgctgacgacattcgagtttgatgttgcactgggctatgttcctggatggtgggagaaggggagtagggaatgtggcagtggagatgccaccggttgttgttcaggatcaggaacttccacagattgtggttgcagcaatggtggttgtgctgacaaggactttgggggggagtacccaatggattactactctcaggatggaggtgattggaacagctgctacatgaagaagaagccctctactggagagagaaagctgcgagttcggattggcagcaaagttcaagttgaggataagcaacaaagctaatatcgttgaaacgagatatcaagagcagcttcatgtttcttcagaagttttgacaccagagttgaatagtatttttgatcttagcactgccgttacgagtgctgtgatatctgtatctgtacacagatgtaaactactcgatcctgcgccacactgtaatgctgtgatgttgtcttcccataaaggtgaaatgattctaagtttatggagcac

SEQ ID NO: 1390 - DNA, 779 bp, Oryza sativa
  ref <308>: DATABASE ACCESSION NUMBER: AK059430
  ref <309>: DATABASE ENTRY DATE: 2001-12-06
tctctccctcccgcgccgccgccgccgccgccaccgccgcatcgccgctgccgacggctgcgctccgaagaattctgtgaggatttaagctgagaagatggtgctgaagacagagctttgccgttttagtggccagaagatatatccagggaagggcattcgctttattcgtgctgattcacaggtcttcctttttgcaaactcaaaatgcaagcgctacttccacaaccgcctgaagcctgcaaagcttacctggacagccatgtacaggaagcagcacaagaaggatatccatgctgaagctgtcaagaagaggcgccgcaccaccaagaagccatactctaggtcaattgttggtgcttcgttggaagtcatccaaaagaagagagctgaaaagcctgaagttcgtgatgctgctagagaagctgctcttcgtgagatcaaggaacgcatcaagaagaccaaggatgaaaagaaggcgaagaaggctgaggtaaccaagtcccagaagtcgcagtcgaagggtgccgccccgaggggttccaagggcccgaagattggtggtggtggtggaaagcgctgaagatttcttgatccccaggaaagggtcgcctggttctcgccggctgtctaaatcgtatctcatcaaaagctaccctgtagaacctctgttaaattagcactactgccaaaatgttttaacatcgccactggagataatgtcatgaagtttgaaatgctatgtgggaaaaatgtttttctttggttgtgttactatt

SEQ ID NO: 1391 - DNA, 590 bp, Oryza sativa
  ref <308>: DATABASE ACCESSION NUMBER: AK059431
  ref <309>: DATABASE ENTRY DATE: 2001-12-06
aagagattgaaaggtattctgataggaaacgtaagacacattccaaacgtgaagctcttgcgtcatatcttatactaactcctgcaaatttccctgtggaactagtgcaaggttctaagcgaggacagccaagcagtaagaagctgcgttgggatagaagctcagatgatcaggcatttgaagtttttgagaagcttgaagagaagcacaaggacggagacaagaaaacagaaaaggatggggatgatgaggatgaacatgaagaggaagaagtagaagaggagaattcagatgatgattataatcagaatatcgagtttgatgacgacgatgatgactggaaccaagaggaggaagcacatgaagactactatgattagagccactgtctacaaaagttgtccaatatcaagttttgtttctgttcatttttctctatagtacttgctaggtgattagaggtaaatgttttcctgtcaatatgcggtatcagaaactaggatctgtctgaattctgaaatatggagtaggctgctgctactgttcctattgtactgaagactggcaagaattgatttatatgttctggg

SEQ ID NO: 1392 - DNA, 910 bp, Oryza sativa
  ref <308>: DATABASE ACCESSION NUMBER: AK059432
  ref <309>: DATABASE ENTRY DATE: 2001-12-06
tccagatacttggtgctgaaaaggcacttttcagggcattgaaaactagggggaatacgccaaagtatggccttatattccactcatccttcattggccgtgcttcaaccaagaacaaaggcagaatggctagatatctggcgaacaagtgctccattgcatcacgcattgattgttattcagagtcagctaccgcagtctttgggcaaaagcttcgtgagcaagttgaggagcggttagacttctatgacaagggtgttgcacctcgtaaaaaccttgatgtgatgaaagctgcgatagacagcatggttaatgatgccacaaatgatgttgatgatggcgagaaggtcgatgcatctgccaagaaaagtaagaaaaagaagtctaaagctgaagctgacggcgaagcaatggacctggacaagccttccaatgtggctgatgaagctgagcctggaactgagaagaagaaaaagaagaagaagcacaagctggaggaggagccacaggagcaggagaagagcgtggcgcatgccaatggcgacgccgaggagaacggtactcccaagaagaagaagaagaagaaccgtgaagtctcggaggacgctgagcctaagacggccactgaagggaagaagaaaaagaagaagtccaagacggaggacagcgactgagtgatcggtttgcctacttgcatggctgatctttctgattagtgttgttggaagcagagttaaaaaaaacacctagattcctagttcctgaagacaagagcagtcctgaactatgaaattgccctcccatcctctttccctcattcgatgttatcaattttgtgtgtgatagatgctccggaattattgggagcgaagtatcgctgccgttataacaaaacttcacttgatatctg

SEQ ID NO: 1393 - DNA, 376 bp, Oryza sativa
  ref <308>: DATABASE ACCESSION NUMBER: AK059433
  ref <309>: DATABASE ENTRY DATE: 2001-12-06
catgcaatggttctggctgcatcaaatgaggaccatacaaaggttgagctggttgagccaccagaatccgcagcggttggggagagggtgacctttgctgggtactctggagagcctgaggcgtctctcaacgcaaagagcaagacgtgggagaagctatcagctgacctgcacagcaacggcgagctcgtggcgtgctacaaggatgtacccttcacaacttcagctggagtttgcaaggtgaagtcgatagcgagtggagaaattcgctagcttggcgacgcccctaacggtggggatatactcgagtgacttgtttgactgatttttatcggaattgctgctgtttctttatgatgaaaattttgatcctgcc

SEQ ID NO: 1394 - DNA, 1175 bp, Oryza sativa
  ref <308>: DATABASE ACCESSION NUMBER: AK104074
  ref <309>: DATABASE ENTRY DATE: 2002-08-28
aaaaaatcctctccctctccaatctccctcttcctctcctcagatcggggcgccggctgagaccgagcggcggctgctcgttgcgatcggggcaggaccccgcttctcccgtccaatccggcggtggctcggtgacgagagtaggggcggcgagagctcggctcctccctcgcctcttctcccccccaatcccggtggcagcggcggcggcggctccgcgacaaggaagggcggcgggagcttggttcctccctcccctcttctccccttcaatcccggcggcggctcggcgacaagtaaggacggcgggagctcggctcctccctcccctcttctcctcttctcatccccgcttctcctctctaatcccggtggggtggtgtaggtgcgggacaagggcggcggctcggcaacggcggctcagcggcgacgacgacgacagcgacatgggaggggccttggcgactttgacgacgaccgtgacgacggagggcctcgtcgacatcgacggcgcgcggtggacggcgacgagcggatccggcaccacctcctccatccaccgcgccacctccatctccgcccccagccacctcgtcgcccttccccgcctcgctcccccagccagggaagggacggtggcgcgcggatctgccgcctcccggcctcgggagcgacggcggcgcatgaatccagcggcctccgtcctcgggagcgccctggcgtgagcgggagtgccggcagcacgcagattcgcaacgacggtgacggtggctgcaacgacgacgacagcggcgatggtagctgcgacgacgacgacggcgatgacagcggctgtgatgaaaacgacaacgctgtgatgcaagtagcggcggtgctctcttcctctgtcctccgccatcagcagcaccagtataccctgatcataagagccgtagtactatggctgatcctgcacttgctagtgatccagagttacacgggctgtcttatatctatgagaggaatggtcgtcattattgtttaaccatggcaactcctactgtagtacctaatcctccagccaaattttcagaaagtgcttagaccttgtattagggatcttcgaaaaattgtaattctcttttaagggcacacagtagtatctcgatataaactctctggtagtccaattttgt

SEQ ID NO: 1395 - DNA, 736 bp, Oryza sativa
  ref <308>: DATABASE ACCESSION NUMBER: AK059434
  ref <309>: DATABASE ENTRY DATE: 2001-12-06
aaaacctctgccctaatccaccctcgccgccgccgccgccgcaagtagccacccgcgccgccgccgccgccgtcgccggagaaggagaggagcagccatgggtcgcgtgcggaccaagacggtgaagaagacctcgaggcaggtgatcgagaagtactactcgcggatgacgctcgacttccacaccaacaagaaggtgttcgaggaggtgtccatcctgccgtcgaagcggctgcgcaacaaggtggccgggttcaccacccacctgatgcgccgcatccagcgcgggcccgtgcggggcatctcgctgaagctgcaggaggaggagcgcgagcgccgcatggacttcgtcccggagaagtcggcgctcgaggtggaggagatccgcgtcgacaaggagaccatggagatgctcgccgcgctcggcatggccgacctccccggcgtcgagcgccagcaagaggtctccgcgccgacctactcccgcccgccgtacggtggcccccgccgcgaccgcgtctagatcgtcgtcgcctcttcgccgccgtcgtcgccatggctcgcctagctctgcgtactactgagttctatgttttgtctttagatctatggttgctttcaagattttgaacttagccgtgatgatgatgctttaagttaccatgtgttttggtggacatgattatctttttctatcgcactggtgaaatcttgagtgattcgatatattaccatg

SEQ ID NO: 1396 - DNA, 1944 bp, Oryza sativa
  ref <308>: DATABASE ACCESSION NUMBER: AK059435
  ref <309>: DATABASE ENTRY DATE: 2001-12-06
cttcttccccctcccgccccggccaggtgtttgacgaaatggcctcctccgccatggagctctccctcctcaacccggcggcaatgcgcggcctctccgccgccaagccccgcgtcgtgtcttccaggcgcatcgtgcggttccgcgtggcgtcgtcagccgcggcgccgcccgcggcgaagcccgggacgcccaagaagcgcgggaagacggagatccaggagacgctgctgacgccgcggttctacaccacggacttcgacgagatggagcggctgttcaacgccgagatcaacaagcagctcaaccaggaggagttcgacgcgctgctgcaggagttcaagacggactataaccagacccacttcgtccgcaacccggagttcaaggccgccgccgacaagatggaggggcctctcaggcagatcttcgtcgagttcctcgagcgctcctgcaccgcggagttctccgggttcctcctctacaaggagctcggccgcaggctcaagaaaacaaacccagtggtggctgagatcttctcgctcatgtccagggatgaggcccggcacgctgggttcttgaacaaggggctgtctgatttcaacttggcactggatctcgggttcttgaccaaggctaggaagtacaccttcttcaagcccaagttcatcttctacgcgacctacctgtcggagaagattgggtactggaggtacatcaccatcttcaggcacctcaaggcgaacccggagtaccaggtgtaccccatcttcaagtactttgagaactggtgccaggatgagaaccgtcacggtgatttcttctccgcgctgctcaaggcgcagccgcagttcctcaacgactggaaggccaagctctggtcacggttcttctgcctctcggtgtatgtgaccatgtacctaaatgattgccaacgtactacattctatgaagggattggtctggacaccaaagaattcgacatgcatgtgataattgagaccaaccgcacaacagcaaggattttccccgctgttcttgacgtcgagaaccctgaattcaagaggaagttagacaggatggtggagatcaacaaaaagatcattgccataggcgagtctgacgatatccccctggtgaagaacctgaagaggattcctcacgttgccgctctggtgtctgagatcattgctgcgtacctcatgcccccaatcgagtctggctctgttgatttcgctgaattcgagccccagcttgtctactgattctgtaggaagaccatctccagcttttttttccttcaaaaaggaatgctgatattttctgcctgaggggcttcgaacggtgagatgatgggtggttagcagaatctgcacctcgtgtgttcctttgtaaagtattgagacttcaacaatgtaccatttggcaaaggttttgttatgatctccatttaagtggcagtgaactgcatcacagtgggggttacagttttccaacagaagggtaattatatgatgttttggggttgttgatacttcatacttaagttccttagcatcctaagtatctcttagctgtgctctgcattatggcataatgtttggtcttggtgaaggtgaatagtgacgccaactactgaaaacctggacaatgcaagtgttggaagatgttgtaaatgttggatctaacatgacacgcacccacctattgttgccatagttcgtgagccgcaatctctatttttgtcggaaaggaaaagagtattaatctttactatcacgaccggagaagaatgccgttacagtgcgatatggtgccgggaacattcctgacgtgatagcacgttcaagtgatagacaaactattttttcaagcaattgcagggagtttcgatgtaatattagtagctttcatgagtttttgctatgaagcctcaacaagttg

SEQ ID NO: 1397 - DNA, 484 bp, Oryza sativa
  ref <308>: DATABASE ACCESSION NUMBER: AK059436
  ref <309>: DATABASE ENTRY DATE: 2001-12-06
catcaagatgaacatcactgatgagtggtccaccgaggagaagcagtgggagacttgccgtagccggacaaagacttgtgccgataagtacgccgaggagagtgcaaagctcgcgtgcaaagcgtacgagggtgttgagcaagaatccaccttagaagatgactatttcttcgctgccctgcctgttgttcagaagaggattgctcaaggtggcgtgaggcttgctgcaatactcaaccggatcttcagcgggaacaaggttcagagtagttgatccaatagagattaaacagatgaaagattaagaaaatagcccgcattctgaattacaataagattatcttgtttgaccatgttaacttcacggttacgattagatgtatcctcatttagccatttgtcaaagtagcttagatagctacagaacattgtaattcctgtaagcaagtggtgatttatcaatattgcactgtctttttgtatc

SEQ ID NO: 1398 - DNA, 873 bp, Oryza sativa
  ref <308>: DATABASE ACCESSION NUMBER: AK059437
  ref <309>: DATABASE ENTRY DATE: 2001-12-06
gctccgccgtcgctgttgctctctgatccctagggtttactttcccctcctcctcgaactctagggtttttccgctcgctctccgccaccatgacggccgccgagacgcaggaggagctgctccgcaagcacctcgaggagcaaaagatcgagggagatgagcctatccttgaggatgacgatgatgacgaggatgatgatgatgacgaggatgacaaagatgatgatgtagaaggagcaggaggtgatgctagtggaaggtctaagcagagtaggagcgagaaaaagagcaggaaagccatgcagaaacttggcatgaagaccatcactggtgtgagccgtgtcactatcaaaaagagcaagaacattctgttcgtcatctctaaaccagatgtcttcaagagcccaaactcagacacctacgtcatcttcggtgaggcgaagatcgaggatctgagctcgcagctgcagactcaagctgcagagcagttcaaggcacctgacctgagtaacgtcatctcaaaggccgagccttctgcagcagctcaggatgacgaggaggtcgatgagtctggcgtcgagccgaaggacattgaactggtgatgacacaggccaccgtgtcgagatcgagggcggtgaaggcgctgaaggctgctaacggtgacattgtcactgccatcatggagctgacgagctagtggaatcacgaaacgttgtggtggggatggaacttgtgggttaaattttaatgttgagggcgcattgataggatgaaccctcctccttggttatgctatcttgagagcggtaggtagtgttacgaaacttcaaggcctatatcatcctttgataagatcgactgtttgctattt

SEQ ID NO: 1399 - DNA, 551 bp, Oryza sativa
  ref <308>: DATABASE ACCESSION NUMBER: AK059438
  ref <309>: DATABASE ENTRY DATE: 2001-12-06
accggcaccttcggcctgaccggcgtctccgtgtgggaggccctggtgctggagatcgtcatgaccttcggcctcgtctacaccgtgtacgccaccgccgttgaccccaagaagggcagcctcggcaccatcgcccccatcgccatcggcttcatcgtcggcgcgaacatcctcgtcggcggcgcgttcgacggcgcctccatgaacccggccgtctccttcggcccggccctcgtcagctggtcctgggagtcccagtgggtgtactgggttggcccactcatcggcggtggcctcgccggcgtcatctacgaggtcctcttcatctcccacacccacgagcagctccccaccaccgactactaagctcatcgccgccgccgccgcttgtccatgatcgcctcgtctccgactccgatccaaccgtttagtttctcgcatcagtgcatcatcaaacctgtttcatttgcttggatcagttgtacgttgaacgtactgtaagtgtggacctttgggaacccgttgctttgcttctgtaaaactgtgcatgc

SEQ ID NO: 1400 - DNA, 923 bp, Oryza sativa
  ref <308>: DATABASE ACCESSION NUMBER: AK059439
  ref <309>: DATABASE ENTRY DATE: 2001-12-06
tgtctcagtattgagggtaattaccaaaggagtatacccgcaagatgccaatgggttaaggaaaagcgcaatcctatacttcgttgttagcattgttgtcatgatcatctgcatagtgtgctacaatgtggccgacaagcttccagttgtcatttactacaagaacatcaagaagagggctcagaaggcagaggaagatggcgggatgtctggatcagcctggagatcaaccttgtggagcattgttgggagagtgaagtggcatgggatagggatagctctcatctacgcaatcacgctctccatatttccaggatacatcacagaggacgtgcactctgaggcgctgaaggactggtacccaatcatgctcatcactgcctacaatgtgttcgatcttgttggcaaatcacttcctgccttctacttcctcgagaatgcaaatatcgctgtcgctgggtcgtttgcacggctcctgttttaccctctcttctacggttgcctccatggacccagtttcttccgcaccgagatcccagtgaccatcctgacatgtcttcttggattcaccaatggatacctgacctgcatcctcatgaccctcgcgcccaaggctgtgccaatccaacactctgagacagccgggatagtcatagtgctgttccttgtcgctggcctggtcgttggttcatttgttgcttggttttgggtcatttgatagtcctagtcctgccatcctgtgtatccatgtcagtgtatcatagtgccatgctcaagctcactctttatttgttatttgctcatttacgcaccaaacagccaagggtatgtaatttgttagtgtcgcctagacaaaatactggtgctaatgtctgtaatttgctattaatgccatcctctgtccatagtaacattcacagctc

SEQ ID NO: 1401 - DNA, 463 bp, Oryza sativa
  ref <308>: DATABASE ACCESSION NUMBER: AK059440
  ref <309>: DATABASE ENTRY DATE: 2001-12-06
ggagcgcgcatccagatctggctgttcgagcagaaggatctccggattgagggccggatcattggctttgatgagtacatgaatttggtccttgatgatgctgaggaaatcaacgttaagaaggatactaggaaatcattgggtaggatactattgaaaggcgataacataactctgatgatgaacactgggaagtgaattttctccccaaggttggcgtttgtgactttgtgtcgattagtcccgtgatactttgtactccatctagataatcagagaatgaaatgcatgtagcatgtcatcgtcatcgtcctcaattgaggatatgtaacggctgttagcaacctatgaactctgtgaactctaggcaaggttgttgagataatgagttgctcacttgtgtgtttaagattcctgatcccgtgaatcaatcctgctcacttataacacggacaattggagc

SEQ ID NO: 1402 - DNA, 881 bp, Oryza sativa
  ref <308>: DATABASE ACCESSION NUMBER: AK059441
  ref <309>: DATABASE ENTRY DATE: 2001-12-06
gcgcaggggagaggagaggaaggaggaagaggtggtggtggaggagaagagccatcagcagcagcagcagcaaggggaggaggagctcgtcggcctctcgctcgccggcggcaggcccaaagtatttccaatgtcgagccctccacctaatccttcgcaacttacaattttctatggtggatcagtatgtgtttatgactcagtgccgccagagaaggctcaagcaatcatgcttattgccgcagcagctgctgcagcggcgtctgccaccaaaagcaatgctgccattgctgttaagccccctgtgatgcctgcagccaatgctacccaagcagcagtctctcctgtgctcacaagatcgctctcattgcagagcacttctgtagcaactggacaacctcaagttgccgctgaccctagctcaatttgcaagctccaggctgatctccccattgccaggaggcactcccttcagcgcttcctagagaaacgccgtgacaggttggtgagcaaagctccatatcccacaaaatcctccgagggcatggaagcatcagggatggaagtaactgctgagggcaaggcccagtaactgtcaacttcgaatggtggaggctgacgtttggagggggaaggaaggaaaggcgtcgcgttcattgtttagatggtgtcgcaccctagaaccttactaataatcgaacctatgcccttattatcgttgtactgttccttatgtgctagtctattctgtcatgaatttgtttactcgaacagcaaactgctatgatagtagtatatcattgtacatcatgcatatcattgcctgacaatgttatcgtgttcgtctagtaatgatatcatccaggttaattgttactagt

SEQ ID NO: 1403 - DNA, 482 bp, Oryza sativa
  ref <308>: DATABASE ACCESSION NUMBER: AK059442
  ref <309>: DATABASE ENTRY DATE: 2001-12-06
catcaagaaaatggaacacgagaagctggagaagttggcccacaagggccccaacccaggagagcaagcttcaaccgcaggtgctgcggctaacgctgtgaagactggaagcggctcaacggagtcaagatctgctggtgtgtcaactgacaaaaacaggaactatgctgtcctggcaggcactgttgctgctttgagtggcctggggtggtatctcttgtcaaagcctaagaagtctgaagatatagtggactgaaggtggttaatgagatcctagacggtctgtcattgagtttcaccctgttttacttgtttagaaataaatgctgaacacactgcactgagtttcctatagcatcactaaaactttcaagtatgcacccgagatatgttctcagttcttcatgccctgttttgactgttggcactgttctctgatgctgcatccttttgattgaagaggaattcggatacaagatagt

SEQ ID NO: 1404 - DNA, 478 bp, Oryza sativa
  ref <308>: DATABASE ACCESSION NUMBER: AK059443
  ref <309>: DATABASE ENTRY DATE: 2001-12-06
agcctggtggggaggggaggtgggtcgccgaaagcttggctgagattcgcctcgcctcgccttctagctcgcggccgccgctagcgcgagtgagagactgagagtgagtgaggtggtgtggccatggagggggacgacaagtcggcggtggtgggaggggcgtactgggggctgacggcgtcgtgccgaccttctgatcgatcgcaaccaaagccgctgtgtacactagcccttctcccccattgggctgtaattttgttgcatgcatttcgcgcgcgcgggaaatgctttctgtagcattaatcaattgtatgattattacacggaagtaatccggacttccaatctcctcttctctctctctactctgatccttccatccttgcatgtatattatcatcgcgaactgctgctaatctgcaaattgtaattttactaatcagtaatcagtacagtggtggttgcatcgattcgcatt

SEQ ID NO: 1405 - DNA, 1599 bp, Oryza sativa
  ref <308>: DATABASE ACCESSION NUMBER: AK059444
  ref <309>: DATABASE ENTRY DATE: 2001-12-06
atcgatcacaggctgcagcacgcgtacttcgtattggttccagaacagattttctgcttggtggattgcatccttcaataaattgggctgagaaggagtctcatgtagatgaggacgaaatggccaaggttaagacagctttcgttggaaatttaccagcaaatgttacagaggagtatttaagaaagctttttgaacattgtggagaggtagtacgggttgcagtctcaaggaaaggacaatatccagttggatttgtccactttgccagtcgtacagagctcgacaatgcaataaaagaaatggatggtgaaacagtgagaggacctgaccgaggggcaactttcaggatccaggtctcagttgctcggcctgtggtagagaacgataaaaagagaattcgtgaagaagtgaaaactagaagatcaaacgtatcaacagacaagccggaccattcttatggaagacgtggacatgattcatatgatcgtcaagcaaaagctccaaggctatataatgaggtgtctgatacggacccctatgaagcagctgttgtttcactaccttcagccgtcaaggaactcctacttcgtattctacgtcttagaattggcactcgatatgatatagacattcattgcataaggagtcttaatgaacttcctgaaaaggctgcagttgctgtccttaatcagtttttgatatcaggtgcagataaacacaataaaggagactatttcgcttcattaattgctaagtaccaggctgagacatttagctcagcactaagattgcagggttctacttatttgccaagaaatcctggaatacagaacaagagattcccacatcaagattacgagtacacagcatccgggagtagtagatacagttccttaggtgattatccttcctcatcttatgtggatgatcccgcatcatctcagtcaaggaatagaaggtatgatgaatacagacctgatcttgtaagatatccagattcaagatcacggcaagaggaaatagtccgcattgaaagatatccagaaccaagatttgcacatgaaccaagacaggatactggaaggcatctcgatctagggtacgtacaagaacggaattcgaatattgagagatcagctcaagtagctttttcatctagggaaggaggatacttatctgcttcaaggtacaacacaaacatagtcccagaattcagctccaggtcatctgctgaatactctactgctcgccaacaagtaaggtttgatccattcacaggggaaccatacaagtttgatccctacaccggtgaacccatcaggccagaatcgaacccacgtcgctcaggaagcttatactgactttgattgattgaagcaacagtttggatatggtagattagatttacatccctgaaccaaaaggaccatatactgctcttgcatgttgtaaacctagtgtatttgatgtgcctcagcattgtaatgttagaaatccattttcatccatgtcactggaaaactatggttgaaacaacagtaataagttctatcatttatgatggcatctgatgatatgaattagggaaaactaagc

SEQ ID NO: 1406 - DNA, 1290 bp, Oryza sativa
  ref <308>: DATABASE ACCESSION NUMBER: AK059445
  ref <309>: DATABASE ENTRY DATE: 2001-12-06
gataactacatatactgccctacattggataatggaaagccagaagatctcacacacttccagaagcattgggtgaaaggcgaacccgtaattgttcaacaggttctcaagaaaatgtcatgtttgagttgggagccaccagatatgtggtctaaagtacatggcaccggcactagtcctgagatgaaaaacgtgaaggctattgattgtttatcttgctgtgaggtcgagatatgcactcaagacttcttcaatgggtattatgaaggtcggatgtatcaaaatctatggcctgaaatgcttaaattgaaggactggcctacatcaaatcattttgaagagcttttgccttcccatggagttaaatacatgaattctttaccttttcaaccatacacaaacttgaagtctggtttgctgaatgtctcaaccttgcttcctgatgacatcttaaagcttgacatgggcccaaaatcatatatagcttatggctatgcacaggaacttggtagaggagattctgttacaaagcttcactgcgatttgtctgatgcagttaacgttttgatgcatactgctgaagttgacccttccgaggaacaaatagatgcaataaaaagtttgaaaagaagacatacagcgcaaaatgaaaaggagtgttctgggaatgcagacggaaattatacatctcctaaaatctgtggggatgcaaatgagttgtcctgtcctataaacagtgagaccaacaagggaggtgctttatgggatatttttaggagggaagatgttccaaaactgaaattgtatctcgacaagcattctaaggaatttcgccatatatactgttctgcagttcaaaaggtatgtaaccctgtacatgatgaaacattttatctaacagaagaacacaagagaaaactcaaggaggagcatggaattgagccttggacatttgtacaaaaacttggggaggcagtattcattcctgctgggtgtcctcatcaagtacggaatcttaagtcctgcaccaagattgccttggattttgtatcacccgagaatgttaaggagtgtctcagcttaaccgaggacttccgaagacttcctaagaaccacagggccaaagaagacaaattagagctaggtgtggttcaaaatggacccaagcccacataccctcgagaaactattctaaactctcaatgggacatcttgttgtttgcatatcatccaaatagttatgacaaagtttaagaagatagattaatatgtgataatcactcttcaaac

SEQ ID NO: 1407 - DNA, 874 bp, Oryza sativa
  ref <308>: DATABASE ACCESSION NUMBER: AK059446
  ref <309>: DATABASE ENTRY DATE: 2001-12-06
aaaaaccctcaggtcggcctccctcctctcctcgtccctcctccccgccgccgccgcagcagatttaatcctcaatggcggccttcaacaagctcggtagcttcctcaggcacagtggcttgacaagcagtgcctcggccggctcttcccctgccatgttcaatgctgctcgtctgatgtccaccaagcttttcgttggtggtctttcttggaatactaatgacgattcgctgaaagaggcattcaccagcttcggggatgtgactgaagctcgggtgatcaatgacagagaatctggaaggtcaagagggtttggctttgttagctttgccaatggcgatgatgccaagagtgccatggatgccatggacggtaaggaacttgagggacggagtatccgcgtgaacttcgcgaatgagagacctccagggaaccgaggtggcggcgggtatggtggtggtggcggtggttatggtaaccaaggaggctatggtgatggcaaccgaggctatggagggcagtactaaagtgggcactgacttgcttaaataatgagcttaggacctgatgtggcttatgtgaagccttattattgtttacttttgtaccgtttagtatccgtcgtcgttgaaattctaggtgaggattaaatcttcatattgcactttatatgcttggcgtgaaggcctaggatgcgaatggtgctttttttgtgagtgagaactgagaacacatgcatgtcttcatatctattgcaatgtgtagagggtcattactcgagtgtgtcagcaagtcttattatttcatatttgatctgcatcgagcattcgttcacaagacaaatcgcctgagcagcgtccgtgaacatttgatc

SEQ ID NO: 1408 - DNA, 1506 bp, Oryza sativa
  ref <308>: DATABASE ACCESSION NUMBER: AK059447
  ref <309>: DATABASE ENTRY DATE: 2001-12-06
tccgaccaacgcgctcgcctcgcgtcatcggctcaaatggtggaggcggccacgcgcggaaccgagagcccctcctcctgctaatgcgccgccatggccgcccgcgcgctgggtccacctcctcttcacgctctcgcagccacgcggcaggctcctcgctgccccccggctgccgccgcgccgccgacccatggctaccggcgtggagccgcggtgctctccggccgccggggaaggcatactttgagttcaatacaattgatgcatgctgttagaggtggcaatcttcaagtggaaccaaacatgcttcattcccccaagccattgatgtccaccaaacgtgggtgtgtggctagtcctactattgctaatgtggatgactgcactgaaggtgaaggtgcactggggtacacaatgacccaaatctgtgataagtttattgagttcttcatgtacaagaaaccacaaacaaaggactggagaaaagtattggtgtttagagaggagtgggaaagatacagaccatacttttacaagcactgtcaagcacgtatagatatggaaaatgattcttcaatgaagcaaaagttggttgtacttgctagaaaagttaagaagattgacaatgagatagagaagcacatggaactcttcacacagctccgcgagaatcccacagatattaatgccattgtcgcaagaagacgaaaggatttcactggagggttcttccaacatcttaattttcttgttaatgcatataatggtcttgatgagagagatgcaattgccaggcttggggcgaagtgcctgtctgcaatccatgcatatgactgcacactggagcagttggaccttgattctgctcaatcaaagtttgatgacattctgaattcttcttccctggatgatgcatgtgacaagattaaaagaagatcctgaagagcggtttggtgctcttgcaacagccttttctccagaagtcgagcatgaagccaaggatgaagatgctctgtacacaactcccaacgaactccacaaatggaccaaaatgatgcttgattcgtaccatctcaataaggaggagacggattttatggatgccagaaagatgagtgacccagtgatcatacagaggttaactttgcttaaagagacaatcgaagaagaatacatgaagaagtatatacatccagaggagcaagaatctgaggacgacgaagattcagaagagtgagcttgcaagtgtatttttatagttgtagtcttgatgcagagatgatatttttatagttgtagtcttgatgcagagacggtatttttctagttgtagttactgcagattggtagtgccctgctgctttctgcaaagatggacttcaatctgctttgcttccctcctgttggacgaaagaaaatgccagtggtgcagtaattgtaaagtgtatcatgatcatcccaaagcctgcgtatcataaaattccctaagattggtggggttccttt

SEQ ID NO: 1409 - DNA, 1504 bp, Oryza sativa
  ref <308>: DATABASE ACCESSION NUMBER: AK059448
  ref <309>: DATABASE ENTRY DATE: 2001-12-06
atgctttctctctcctcctcttcttttggctccgcctcgcgcgccactctcccgcccaggcgcctctctctctctctctagtttctcgcaccacctgcctacatatcgccacagccgctgtcgtcgtctcgtctctgtgtgtgtgtctccatcagacgccggccatatagctagcgagaccggcacattcccatcgggaatccgcctcgggcttcgccgcaatcccacgctaactcacgccgcaccagattcacgctcccagctacaaactcccagccgcgcgccggccgcacgcgcgtgcgcacagctagcgatcgatcgtgatcgtgaccgcggccgggttgactgccgctcgacgagcgcacacatcgatcagccggccggacgaggagattgtcagatcgtctcggctcgtcgacggattggccatcatgttcgaggggatggagagggcgggctacggcgtcggcgtcggcggcgcgggggcggtgggagccggggtggtgctgtcgcgggaccccaagccgcggctgcggtggacgcccgacctgcacgagcgcttcgtcgaggccgtcaccaagctcggcgggcctgacaaggcaacccccaagtcggtgttgagactgatgggcatgaaaggtctcaccttgtaccacctcaagagccatcttcagaaatataggcttggaaagcagaacaagaaagatacaggcctagaagccagcagaggagcatttgctgcacatggcatcagttttgcctctgctgcacctcctaccatcccatcggctgaaaataacaatgcaggagaaacgccactggccgatgcgctgcggtatcaaattgaagtccaacggaaactgcacgaacagcttgaggttcagaagaagcttcaaatgcgaattgaggcccaagggaaatacctgcagacgatactggagaaagcccagaacaacctctcctatgatgcaactggaactgcaaacctcgaagcaaccagaacgcagcttacagatttcaacctggctctttcaggattcatgaacaatgtttcacaagtgtgtgaacagaacaatggagagctagcgaaagcgatatctgaagacaatctcagaactaccaatctaggctttcagctctaccatggaattcaggattccgacgatgtcaagtgttctcaagatgagggcttactgctgctagatttgaatatcaaaggaggaggatatgaccatctgtcctccaatgccatgcgaggcggcgaatccggtctgaagattagtcagcacaggaggtaaagattcagtagaatggcgaccatctgtagtttaaattaagagttacctttgtcctatgagaaattcttttgtggcgatattgagggtgcttaagtacagtgttggtccagagtgtactaatgtaaaatttgtggggtaaaggctctgaataatcgtagctaatcaatcatgtctagatctgaatatcagaatatatacactgtatg

SEQ ID NO: 1410 - DNA, 1402 bp, Oryza sativa
  ref <308>: DATABASE ACCESSION NUMBER: AK059449
  ref <309>: DATABASE ENTRY DATE: 2001-12-06
gatccggctttcgagagaaagccaagatagcaagagagtccacggctgaaatagcgaaatgccctccacaaccacggcgccggagaccgatcctagcaagaccgtcgtcgaggaggtcaccggctggctccgcctctactccgacggcacagtcgagcggctgacaccaccggacgcggagcccttcaccgtcatcgtcccgccctacaccgagccgcgcaatggcgtcaccgtgcacgacgtcaccacggccaggggtgtagacgtccgcctctacctcccggccgagccgccggcagccgcgccccggccacggcggcgtcgtcctctcctccttcacctccatggtggtgggttctgtctatcgcgtccatcgtgggcgctctaccacaacttctacgccccgcttgctgccaagctcgatgtcgccggcatcgtctccgtcttcctcccactcgcgccggagtaccgcctccctgccgccattgacgctggccatgccgcgcttctctggctgcgggacgtcgcttgcggcgatgaaggaaaccttgatccggcggtggaacgcctacgtgacgaggccgacttctcgcgcgtgttcctcatcggcgacagctccggcggcaacctcgtgcacctcgtcgcggcacacgcggcggcgaaggatgacggcgcgggggctgatctccacgcggtgaggctcgccggcggggtacttctcaatccgggcttcgctcgtgaggagaagagccggtcggagctcgagaacccgccgagcttgttcctgacggaggacatggtggacaagctcctggcgctcggtgtaccattggggatgaacaaggacagcccgtacacgtcgccgtcgctggtggcggaggccgtggcgcgcttgcatatgccgccgatgttgctggtggtggcggagaaggacttgctccatgacccccaggtggagtacggcgaggccatggcgcgcgtcgggaagacggtggagacggtggtgagccggggcgcggtggcgcacgtcttctatctcaacttcttcgccgtggagtccgatcccctcacggcggagcggacaagggagctcatcgacaccatcaagacatttatcgacagatactgattctccctaaatcctaatagcaatttgcaatgaagatcatgcatgcatgtcctgtgagataattggcatgtgcagagtgcagctatcttttagccatgcactggtccatctccatccgtgcatggatgtatgttgtgttcagtttctgcatgtttgttacacctagtttgatcggtttggtgaatgttttctagttgggttcaaacttccctgttaaatttcctgcgtgaataaaatagagcatactcagtatgcatgagcatattggcatcc

SEQ ID NO: 1411 - DNA, 436 bp, Oryza sativa
  ref <308>: DATABASE ACCESSION NUMBER: AK059450
  ref <309>: DATABASE ENTRY DATE: 2001-12-06
ttgcagcacaccagtgcttcgttgactatcaatgagaactatgactccgatgtccagtttgacactgaaacatttcttagtcgcattgtcccagagggtccatctgctccatggaggcacaccatagaagggccagacgacatgccagcacatattaaatcgtcgatgtttggttgtgccctgacgattcctatcactgatgggcgtctcaacatgggaacttggcagggtatatggctctgtgaacatcgagactacgctactcctcgccagattgtgattactctcaatgggatctaaaaggtccatgacaatagatattaatagctgtaaatgcaatatgaccatctagacatctagatcatatgcattgaaactgaaactgaaaccttttcactcatttgtgatatgaattacagtggtgaatatattttgc

SEQ ID NO: 1412 - DNA, 459 bp, Oryza sativa
  ref <308>: DATABASE ACCESSION NUMBER: AK104075
  ref <309>: DATABASE ENTRY DATE: 2002-08-28
aagaagaagctctcatcatcatcaccatgtcgtgctgcggtggcaactgcggatgcggctccagctgccagtgcggcaacggctgcggcggatgcaagtactctgaggtggaacccacgaccacgaccaccttccttgccgatgcaaccaacaaggggtctggtgctgcttccggaggatcagagatgggggcggagaacggcagctgcggctgcaacacctgcaagtgcggcaccagctgcggctgctcctgctgcaactgcaactagaagaaacttatctccatccaattcatcacctgatcaacgagctaccagtaccactacatatgccatgtactagctacctagcttgcatgcaagtccttaatttgctgctagctagctagctacctaccttagcgtctcatgtatgtcatgttgccgcctggcccctaaataaaattccttacttaatcgc

SEQ ID NO: 1413 - DNA, 744 bp, Oryza sativa
  ref <308>: DATABASE ACCESSION NUMBER: AK059451
  ref <309>: DATABASE ENTRY DATE: 2001-12-06
atttttcaggaatacacacccaaataggacagtctggccatggttgcttaccccgattatcggagcaaatgggaggttatacttatttgtgcagtatgttgtgtcgaagacgatacaatcaccaaatttcttgtatgcttcttttgaggcaccatccacccaaaataagctaccaaccgtattatccgagtccagttccatgctatagaaaaacgatggatcttctgcttgcaattcctggaagtacttgatggtttcagccatgtctccgtttgcagtagtccgttttctcatcgatgtcctcagattgctaacatctttctttgtgaatggtatgttacgcatggtaccatacaaatcagacaggacagacatgattcttctagtggggatgttgttgttgtgcagtaattctattagctcatagtcttcatccgacacgttacggtgtgattctaggaaccttagagaattggggctcaaaggaggatgattgtgatctaagtctactattgtcaccacccacttttcagcccttttaacgaccaccattctcgccttacaatcagttttccgtatgctgttgcacttcctggatctgcttccaatacttgattttgcattctgctccttacttgtgcgttcagaatagcaagcgaactcatatctgttgtaatctttggtgacattgcttcttttgcaactcgaaacctttctaccgaaacctcaattttttgcatacct

SEQ ID NO: 1414 - DNA, 2100 bp, Oryza sativa
  ref <308>: DATABASE ACCESSION NUMBER: AK059452
  ref <309>: DATABASE ENTRY DATE: 2001-12-06
ggcaccgccgcattctagaccctgggagtagcatggtgctaatgtggaacagggtgttcctagggtcctgtttgtttgctcttttcattgatcctttcttctactacctgccgctagttcatgtactagatgaaagtaccaaccgttcatgcattgccaaggaccggcgattgagcataactatcactgttcttaggacatttgcggacttgttttacatgctgaacatcatggtcaagttccatactgcatatgtagatccaaagtccagagtacttgggaagggagagcttgtcttggacttaaagaagattcaacggagatatctcagaacagatttctttattgacctacttgcaacgatccctcttcctcaggttaccgtgtggattattatgccttcaataaaaaactcagattacaacatccggaacaccacatttgctctggttattatgattcagtatatattcagaatgtatctcattgtaccattaagcaatcaaattatcaaagcagctggagtagttgccaagtcagcctggctaggagcagcatacaatcttctgtactacatgcttgcaagtcatattactggagcaatatactatcttctctccattgaacggcaaattacatgttggaatcagcagtgcctaaatgagtcttgtagttttaacttcataagctgtgacaatactggttctagcagttatcttacttggggaaagaacacaagtatatttgacaattgtgatcccaatcgtaattcaagtgctaaccccccaccatttaattatggaatgttttcaaccgcactgagtaaaggtgctgtttctgctccatttcttgagaagtacttcttttgtctgtggtggggcttgctgcagcttagttctagtggaaatcctcttcagacaagtgcatacatcgcagagaacacatttgccatagcaattggtgctcttagtctcgtactctttgctcagctgattggcaatatgcagacatacttgcagtccatcagtaaaaggcttgaagagtggaggctccggcaaagagatatggaggagtggatgagacatcatcagctccctgatgaacttcaagatcgtgtccggcgattcgttcaggttaaatggcttgcaacacgaggagtagaagaggaatccatcttacaagctttgcctgctgatatacgccgggatgtacagcgccatctttgtttggaccttgttcgacgtgtcccatttttctcggagatggattaccaacttctagacgccatctgcgagcgtctggtgtctttcctgtgccctgagcgcacatacatttctcgtgagggtgatcctgtgaatgagatgctcttcgtcatacgcggtaagctagagagctccacaaccaacggaggccgcagcaacttcttcaactccatcatcctgcgccctggtgatttcgctggcgaggagctgctcacatgggctttacttccaaagaccaatgtccatttcccgctttcgacgaggacagtgcagagccttacagaggttgaggcctttgccctgagagccgaggacctcaagttcgtcgcgaaccagttcagaagactacacagcaagaagctccagcacacgttccggttctactcccaccattggaggacatgggctgcctgcttcatccaggctgcttggcggcagcaccagaggagaaagctggcagagagcctgagccggtgggaatcatactcatggtggccagaagaacatccaccagctgacaagcctaaacaggagggcacttcaagcagtaccaagactattgctgagagtgccattgctcaaatgcacaagttcgcctccgcttccagaaggttccgtgccgacgataccgccatccggaggctgcagaagcctgatgagcctgacttctctgcagatcatttcgattgaggctgatgtttcctgctttaaaaaaactgttgtaaaaccactactgtgcactgcattgtattcaatagccatatagtaatccatgtgtatctcaaagatgaaaccaaactggtcctttgtgtaattcaaatatacgcattttaggagc

SEQ ID NO: 1415 - DNA, 735 bp, Oryza sativa
  ref <308>: DATABASE ACCESSION NUMBER: AK059453
  ref <309>: DATABASE ENTRY DATE: 2001-12-06
ttacaatgtttatgtgcacagttacttgcactatggtgctcgggcttctcgcgtggagatactaaaaaggaagaatgggacatttagcaactgcatgctgcgtggatttagcggtaagtacatctataacggggagcagtatgatgcaacggcagcgccacaaggggcagactaccacaagtgtagagatgacgtggtgaaggcactcaacctggacgcgccttgcgaaaccaacaactgcagcttcaacggagtgtggaacggcggcggtggcgctgggcaggacgagctctacgttgcgaccagtttctactacatggcctcggatattgggctcatcgatagcgaggctcctagtgctaagtccacaccagcagcatacaaggttgctgcagaaaaagtttgcagtctgagtgttgaagaagcgaaagcagcataccccagagcttgtgaccatgcttatctatgcatggacctcgtttaccaatacaccttgcttgtcgatggctttggtttggaggcaacgaaggagatgacgctggtagagaaggtgaagcatggagagtactacatcgaagcggcgtggccattgggcaccgccattgaggctgtctcacccaaaaagaagcaccaagagacatgagtttccattgagatagctaggatatgatgtactaatattatgttgtgtgatgcatgtgttgtgccggtttattttattttacacatgcatgc

SEQ ID NO: 1416 - DNA, 1331 bp, Oryza sativa
  ref <308>: DATABASE ACCESSION NUMBER: AK059454
  ref <309>: DATABASE ENTRY DATE: 2001-12-06
aagcaaatgttgatggtctctggctttgaaaaatattatcagattgcaaggtgtttccgagatgaagatctgcgtgcagataggcaaccagagtttacacaacttgatatggagattgcatttacatcaatggaagatatgttgaagttgaacgaagaattaatgagacatattttccaagaggttggtgatatcaagctgccaaatccttttccaaggctaacctatacggaggcaatgaatcgctatggaacagataggcctgaccttcgttttgattggcagctgaaagatgttagtgatgcatttttgggcagtagcttcaagatttttgcagatacattagaaaacgggggtgtcatcaaggcattatgtgttcctggtggtgccaaagaattttcaaatactgacctaaagaaaggaactgtctacactgaagcttccaaagctggagccaagggcctgccttttctcaaagttatggacaatggagagcttgaaggaattggtccactcgtggcaagtctgaaacctgaaaagaaagagcagttgttgaaacatctagatgcaaaatcaggtgatcttatcctgtttgcactgggtgagcaatcagcggctaatcgaattcttggcagattaagattatttattgctcataagctggaagtgatagatacatcagcacattcaattctttgggtgacggattttccaatgtttgaatggaacagtgatgagcagagatacgaggcactacaccatcctttcactgcaccaaatcctgaagatatgaatgatctaccatcagctcgagccttggcttatgacatgatttacaatggagtggagattggaggaggcagtttgaggatatacaaaagtgatgtacaacaaaggatttttgagatcatcggtatctcacccgagcaggcagaggaaaaatttggctatcttttagaatgttttgacatgggtgctcctcctcatggaggaattgcctatgggttagatcgtttggtgatgcttttggctggtgaaaattcaatccgggatgtgattgctttcccaaagactacaactgctcaatgttcactcaccaaagcgccatctcctgtagatccacagcaattgaaggatcttggcttccgtacgtgaagtgagtgcactgcttgtaacaaggtttgagttatataggaacatccattgtctacaccgggcacccaacctgtcacagcacattcaccttttgcgaatgtgcttctgctcttgagaaattttgaccatggataggctggttgtccatctcatgaatccaataaaaagtttaaagc

SEQ ID NO: 1417 - DNA, 964 bp, Oryza sativa
  ref <308>: DATABASE ACCESSION NUMBER: AK059455
  ref <309>: DATABASE ENTRY DATE: 2001-12-06
ggcgaaagtggaggaattgaaggtgttgggtgccaagaaggcggagatggatgcgagggtggtgtctttggaggcggagctcaaagctgctgtggctaagagaggggaattggaggctgatgccgtggcgaagaagggggaattcgatatggtgaagggcaaaaacgataggcttcgttcggaggtcgcgacagcagtgaagaagcatcgcgcatctgaggcagaggttgagaggctctgcgcggaattgggcgtgctgacaaaggagaaggaggcagctgccaaggcgtttgatgctgagaaggcgggtatcatgagggaatttggggagctcaagcagaaggtggaggaaatccaggccagcaagggagcggccgaggaagcagggcgtgagaaggacgctcaagctgttaagctcagaaatgaattgaaggagctccatgtctccatgtcgcagctccaagcatcctgtgatgagctcgatacgaagcgctcgctcctgaatgatgagaagaattctgttcaggaggcactggatgctgagaaggctgaagcgtgcaagctgaagtcgaaaattgaggctattgagaactgcaatgttgagaaggacggtgagattgggaagctgaaggtggcactgatggaaaagagggcgaagatcgatgttctaatcaaggacatcgagcagctgaatctcgaagtggctgaggcacataggaagaggaagggtggcatttgggcttggctatatgcggctacgactaccatggtggctgccatctccttcatctatgccaccaagtcccggtgaaggacttacacttttctttttgctatgttccgttttctgtttacatgcttatcagtatgcaactcgatatgataaggttgctatctcgctgaattactctatgatggtgattggctgccactatgcaatgaagtgaaacttttgcttatgttc

SEQ ID NO: 1418 - DNA, 1602 bp, Oryza sativa
  ref <308>: DATABASE ACCESSION NUMBER: AK059456
  ref <309>: DATABASE ENTRY DATE: 2001-12-06
cccagactttttctccaagttcaactccgcctcctccctcctccctccccccgatctcgggagccatgtcgtggcggtgggctctcgcgcggcgcgtcgccgcgctgggcgcgacgagcggcggtggggacggcgccaccgcccaggcgcagcggctcttctcctcggcggctgccctcctcgggaggcaccctccaccgccgtcgccgccgcactaccagattcggagcaaggtggtgggttgcagaggagctactttcgtgagctcgcgatggttacatgatgctcagtaccaggttcgccaggatgggttatcaaggtctgaggaacagcaggatccatttgagttggttgctgatgagttgtcacttcttgcaaataggctacgatccatggtagctgctgaggtccccaaactggcatcagctgctgagtatttttttaaggtgggagctgagggtaaaagattcagacccacggtattattgttgatggcatcagctctgaaattccccttatcagattcaacagaagtgggagttttaactatactggcaaataagctccgcacgagacagcaaaatattgccgagataactgaaatgattcatgttgcaagccttctacatgatgatgtactggatgatgctgacactaggcgtggcgtcagttcgttgaattgcattatggggaacaagctttctgttctggctggtgacttcctcctgtctagagcatgtgtggcacttgcagcgcttgggaacacagaggtggtatctctaatggctactgctgtagaacatctagttactggtgaaaccatgcaaatctccacaagtagagagcaaaggcgaagtatggattactacttgcagaagacgtactacaaaacagcatcattgatatcaaatagctgcaaggctgtcgctattcttgcagggcacactgctgatgtgtcaatgctcgcatatgaatatggtcgaaacctgggtttagccttccagttgatcgacgatgttcttgatttcacaggcacttctgcatcccttgggaagggttcattaactgatatccgtcatggaatcattaccgcacctatgctttatgcgatggaagaattcccacaactacatgaagttgttgacaggggttttgacaatcctgcaaatgttgagcttgctcttgactacctacagaagagccgcgggattgaaaagacgaaagagcttgcaagagaacatgctaaccgtgcaatcaaagccatagaagctctcccagacagcgatgatgaagatgttctgacatcaaggcgtgctcttattgacatcacagagagagtcatcactagaacaaaatagcaactgttagcattcacaaggtggagaactggagataaggctgattttcgccacaggcgtggtgttccacatggaaatttttgtacactttggtcattgcattctttttcattgtccaagttttgtgtagcgtggatcaaaattaggatctgaatctatggatcggtattcctcaggatcacccccactctgcagctctagtgttcttagttacgggttgcagcaaaatctgtgcattagtatt

SEQ ID NO: 1419 - DNA, 1431 bp, Oryza sativa
  ref <308>: DATABASE ACCESSION NUMBER: AK059457
  ref <309>: DATABASE ENTRY DATE: 2001-12-06
atatttcttattggaaaccaaatgtaacaataaatcttgttgacgacttcacacggtatccacacaataatgttccacccaatgttgctccatatttgaatgttgatccatcttcaaacaactactacccaactgtattcttcaatgagttttggctactgagagataaattgatagcactcaatgagactgtggaggaactgcctttgaaccttgaagttggtcctattagcatgaccaagtggcaaatatttcttcagatggagcagtccttccaagttcatcgcagttatggaagtatgcttgaaggggaggctgatgagctcaagagagttttccttgaaggaaatccatactttttgggattgaccatgattgtttctctgttccactctctgtttgattttctggctttcaaaaatgatattcagttctggaataagaacaagtccatggaaggtctatcagcaaaatccgtggttctgaactttgtatgccagctgattattttcctctacctgctcgacaatgagacttcatggatgatccttggtagctctggaattggtgtttgcattgaattttggaagattggaaaagcaatgcatgttgagatcgatagaagtggaaagattcccatgttgaggttccgggaccgtgaatcatatgcacagaataagacaaaggagtatgacgcaattgcaatgaggtatcttacatatgtacttctcttccttgtgttctgtttctccatctattcccttaagtatgagaaacacaagagctggtactcatggatactctcttctctcacaagttgtgtgtacatgtttggtttcatcatgatgtgcccacaactattcatcaactacaagctgaagtctgttgctcatatgccatggaggcaaatgacctacaagttcctcaacaccataattgatgaccttttcgcatttgtgatcaaaatgccgatgctgcatcgtctctcagttttcagagatgatgttatcttcttgatatacctctaccagagatgggtgtacccagttgacaagaagcgtgtcaacgagtacggcttcggtggggaagacgagccacaagctccccagacattggaagggagcgatctagcagctgcatcccagcaagccggggctgaggcggaggccgagacgagcacggaggacaagaagacgaagtgagcccctcctgctctgcacctccagatcatccaaccacagaacacatctcggctgccaccgggcgtaaattttctgtgccgagcttggaacgctggactcgcctcacccgtcgctgaatgctgctgaccataagagattgtagtaacaggctttgagtgggcgcatcgacgaacacacatacacttgcccaatctatggacgggcaacatcgtcaaacattatcgccact

SEQ ID NO: 1420 - DNA, 1025 bp, Oryza sativa
  ref <308>: DATABASE ACCESSION NUMBER: AK059458
  ref <309>: DATABASE ENTRY DATE: 2001-12-06
gttcctaattcgattcccatggcgcactcccactctgcggcttcgctgcacgccgcccggctactaccgcagcagcgcacgcccaccgcgccacggacactgttgccggcgggcggtggcctcttgctccgccgcccccacccaccgctccaccagcagcgccgcagccgctcctcctctcgtcctgacctccgctgccgccgccgcctcctcaccgcgcggggtgactacgacttctacgagaactatgccgatgaagaaggagatgaggaggaggagtcggaagtcataggtgggagcttcgacgcggcggtggcgctgttcaacggcggcgagttccacgcgtgccacgacgtggtggaggagctctggtacaccgccgaggagcccacccggacgctgctccacgccatcctccagtgcgccgtcgccttccaccacctcttcaaccaaaaccaccgtggcgccatgatggagctcggggaaggcctctgcaagctccgcaagctgcgtctcgacgacgacaccacgagcccattctctcggttccaggaggaggtcgccgcggcgctcaacttcatctaccgcacacagaaggagctcgcggcgtgcaccgacgatctctgcctcaccatggatggctccgcgacctcctaccagctgcttggcaacttcgccgctggccagaagctctaccggcttgaaacaacaaccagtgcagatggagatggcgttccaactataatcttctctgcttcttcacgactcgtcagggtgaagctccccacattgagcgccacggagcatcatctagcagcgcttcaatgtacaagcgagtatatttagtttctttttttttccctgataaaatgtttagctcttccgatccgtttgaaccaaattgtagttttctgtacttgggaaacgaggaatggagtcaaatggattatagtaccattggtttccttttctttcccttcaatttttctctgcacatactcttattatacgatgatgctaatttt

SEQ ID NO: 1421 - DNA, 352 bp, Oryza sativa
  ref <308>: DATABASE ACCESSION NUMBER: AK059459
  ref <309>: DATABASE ENTRY DATE: 2001-12-06
ttgaaacaagaaatacaaatttcaaggaataacaaagagcgtcccgagttaataaaactgagaaattgactcggaaagaaattttttggaagctccattgcgagattcaaacctaaccattaaaggagaagcagtgggaacgacagaacctatgactggataggattttcttgaaaagaatcccaatacttcattgggtgggatggcggaacaaaccaaaaaaattgtcttatttgataaggttatgaattaacaaataagacaggaaagagtaaatattcgcccgcgaaatttttattgaattagaatactttaccgcgattcaataagagtaaaataaaaaaaggagatt

SEQ ID NO: 1422 - DNA, 1325 bp, Oryza sativa
  ref <308>: DATABASE ACCESSION NUMBER: AK104076
  ref <309>: DATABASE ENTRY DATE: 2002-08-28
acaagtcaggggaggagagagaggccgcgccgccgcagatctgtggccgcgttagggtttcttcgccggaatcgagcgaggaagtaggagggagaggaggaggaggaggagggcgacgagtaggaggcggcggcggcggagatggacgtggtgaaggcggcgcagctctcggggcggacgctggagaaggtggtggtgcacccgctggtgctgctcagcatcgtcgaccactacaaccgcgtcgcccgcgacacccgcaagcgcgtcgtcggcgtgctcctcggcacctcctcccgcggttccgtcgatgtcaccaactcctacgccgtgccgtttgaagaggatgacaaggatccgaggatctggttcctcgatcataattaccacgaatcgatgttttccatgttcaagaggatcaacgccaaggagcatgttgttggctggtacagcaccggtccaaaactcagggagaacgacttggatatacacgcactattcaataactatgttcctaaccctgtcctggtgattattgatgttcaacccaaggagttaggaatacccaccaaagcatactatgctgtggaggaggttaaagagaatgctactcaaaaaagtcaaaaggtgtttgttcatgttccttcagaaatagctgcccacgaggttgaggaaatcggagttgagcatcttctgagggatgtcaaggacacaacaataagcacgcttgcgacagaggtaaccagcaagcttgcagccttgaaaggactggacgcaaggctcagggagatccgtgggtacttagatcttgtaattgaagggaagctcccactgaatcatgagattttgtaccacttgcaggatgtgtttaatctgctccccaatctcaatgtaaacgagcttattaaagcctttgcagttaaaacaaacgatatgatgttggtcatatacttgtcttctcttatccggagtgtcatcgcactccataacttgatcaataacaagatgctaaacaaggagcatgagaaagccgaggattcgaagccaaccgccatacctagtgctgctgggagctgaatgtgctttatttgccttagattttggacccagtggaagccaaaagaattgtgacatgttagcatgatggcgtttgaaccaattgtctttgaccttggttttacactttcgatgtttatttcatgtacgataaggtcaacggcaaactttacattctgtgagcttaggtcatactacctcttgagctttcatcttgatcttatatacaatgtttcatggggtgcatcatgttttgtgatgcggattgtcgt

SEQ ID NO: 1423 - DNA, 496 bp, Oryza sativa
  ref <308>: DATABASE ACCESSION NUMBER: AK059460
  ref <309>: DATABASE ENTRY DATE: 2001-12-06
acttgagagctacatagaagctcttgaagaggatccatccttcttgcagtcatatataccgcctccgcatccgctgcaccatcaccatcaccagcatcataatcatcatcatcaacagggccttctccggtgcttccctcgctacagaaccacccgacgatctgcatctctgagagtataatctggatgacggcttcgtcttcgccgtgtatgatgtatgcactttgttttttcagtttcttttttcctttttcaatgcgccggccccctattatgcggcagtaaggcttgctatgatttagtattccccttctttcattttttttctgtttattattgacgattttccatcattaatgcctgcctcgatcgacttacttgagagacgacaagcagcagtttttctggtgattatctatctctgaatgtcgttttatttgggtggtggaacaatggacgagcatctgtaattgtaatataatcgagctcttccgtc

SEQ ID NO: 1424 - DNA, 1580 bp, Oryza sativa
  ref <308>: DATABASE ACCESSION NUMBER: AK059461
  ref <309>: DATABASE ENTRY DATE: 2001-12-06
acgctctccttccttccttccttcttcgcttcttccgacgccacttcacctctccttcctccctccctcgccgccgcgggctgcttcctccctccctcccgccgcgtcccgccactcccggctgattactcgagccgccgcggggcagatccgtgccgggataggcctctcgctcgcgcttcggtcccccgtctcttaccggcggataaaccctaaccggagaggaggaggagggggaggccatgagggggaagaagccgcacaaggagctcaagctctccgtgcctgcgcaggagacgcccgtcgacaagttcctgaccgcgagtggtacattcaaggatggtgaactgcggcttaatcaaagaggtttgcagcttatatccgaggaaactgcagatgaacctcagtcaacaaacctgaaggtggaagatgttcagttgtcaatggatgaccttgagatgattcaagtcattggtaaggggagtggtggtatcgtccaactagttcggcacaagtgggtggggacattatatgccttgaagggcatacaaatgaacattcaagaggcagttcgcaaacaaatagtacaagagctcaaaataaatcaagcaacacagaacgcacatatagtcctttgccaccaatctttctaccataatggtgtaatatatcttgttctagaatacatggaccgtggatctcttgcagatatcattaaacaagtcaaaacaattctggagccatacctggcagtactttgcaaacaggttttggagggtctactgtatcttcatcatgaaaggcatgtgattcacagggatataaagccatctaacttgttagttaaccgtaaaggtgaagtaaagattaccgattttggggtaagtgcggtgctagcaagttcaatgggtcagcgggatacgtttgttggaacctacaactatgtggcgcctgagcgtattagtggaagctcctatgactacaagagtgacatatggagtttgggcttagtaatactcgagtgtgccattggtcggttcccctatataccttcagaaggggaaggttggttaagcttctacgaattattagaagcaattgttgaccagccaccaccctctgcaccagcggaccagttctctccagaattttgtgcatttatctcctcctgcatacaaaaggatcctgcggagcggatgtctgcttcagaactcttgaatcatcctttcatcaagaagtttgaggataaggatttagacctgcgcattcttgtcgagagccttgaacctccaatgaatatatccgagtaacttgtcattgggaggaatgaggttttgtcggtctcttggtagcggcacatgttccctgcatgcgatgtagtgtgtatgatgttgaaaattcgggaggagttgcagtaatgtatcggtataatttttctttacctaaggcccttttgttgcctctttttatggtcctgtgacttgcgagcatgacaatagagggaatcatgatttcaccttcgtattgcatggtgtcttatcgtagttcttgctgcgagtaattggtccccaatgtccttt

SEQ ID NO: 1425 - DNA, 1400 bp, Oryza sativa
  ref <308>: DATABASE ACCESSION NUMBER: AK059462
  ref <309>: DATABASE ENTRY DATE: 2001-12-06
atctggcgaggagaggagagcagatcagagcaggttggcgcatgtcaagtgccgcagtgaatggattggctggtgccggtggtggcatcatcgcccagatcatcacctaccccctccagaccgtgaacacccggcagcagacagagaggtcggcaaaaaagaagaaggccaatggcgcagccatcgccaatacttccaccctcttccagatgcttcagctgttccaaacggaaggatggggagggttgtatagcggcctcaaaccctctcttattggcactgctgcttcacagggaatctattactacttttaccagattctcaaaaacaaggtggaagatctagcagttgctcgcggtaagaagggtctaggggatggtaccgttgggatgttctcctggcttggtattgcagctgttgctgggtcaatcaatgttcttcttaccaatccaatatgggttctcgtgactcgtatgcagacacatacgcaagcagaaaagaagatcatggagtctagtcacgcgccgccgccgccgccgccgcctctctcctccgtcgagcgccgccgacggccgacccactctgtccgaaggcctcaccgtccgcaggtccggctgcggctggaagtgggggtggctctccggtgacatcaaacagttgcggcgcctcactccatttcgagggttctgcttttgcagagtccgagattttcgttccagatccacgtgagttttcttcggtcatggaggcgtcggattagtccactccgggcacgggattgacgcctcctcttcacaaaagtcggaagctcccttcaaattgggcatctcgtactcaggtgactaggaaacaaacttttcaccatcggagacatttccctgtcttattgcaatggaagccaagtttttccggtttctgaagcttgtcggggtcggcttcaaagcaaggacagagcgtgaaggccgtgagttgtttctgaaacttggttacagccacgaggtgcagttcactgctccacctgccgttcgtgtcttctgctttaaacccaacttaatatgctgtactggtatagacaagaatagggtacaccactttgctggcgctgttcgaaacagtaaaactccagaagtatacaaggggaaaggcatattgtacattgatgaagttataaagctaaagccagggaagaagcaaaagaagtaattaaatttgatttttagcctgctaagatgctctgtagcacatttttagtggcgcttatgttcttactgtttcattgtgttggatcatctttgtcccggtaccatacttaaaggcttaataattcgctgtatgcaatgtatgtgaatcatatgatgaaactgcatccaaaccattgggataatccaccatttccgatc

SEQ ID NO: 1426 - DNA, 890 bp, Oryza sativa
  ref <308>: DATABASE ACCESSION NUMBER: AK059463
  ref <309>: DATABASE ENTRY DATE: 2001-12-06
actcacgctctttcgatcttcagctcctctctatttctctcgtcaacaattagcgctctctattcatcgcaaggagcaaaagcagtttcagttccaacctccttctggttccattgctaagaatgggcacagagatagccaccgtggaggtggagggcatcccatttcctcaggagataaccgtcagtaagccattgtcactgcttgctaatggcatcacagacattgagatccatttccttcagatcaaatacaacgccatcggggtgtatcttgaaaaggacaatgtgctagcgcatttggagagttggaagggcaagaaggccgaggagcttgtgcaggatgatggcttctttcaggccctagtttctgctccggtggagaaattgttgaggatagtggtgatcaaggagatcaaaggatcacaatacggcgtgcagctggagagttcagtgcgtgaccgtctcgtgtcagtagacaagtacgaggaggatgaagaagaggctctggagaaggtcaccgaattctttcagtccaagtatttcaagcccaactccgtcatcaccttccactttcctaccacccctggaattgcagagatatcatttgtgacagaaggcaagggcgaggcgaagctgacagtggagaacaagaatgtggccgagatgattcagaagtggtacctgggtggagaatctgcagtttctccgacgactgtgaagagcctggcagatcaattcgcagcactgctctctgcatgaggcatggagtaataaactactgtagtaatgttgcccgtttccctttcatttttaattcgatcatgctttgatttgtccagctgctctcatgtgcatgctacaattgataatggtattgatttccctact

SEQ ID NO: 1427 - DNA, 1253 bp, Oryza sativa
  ref <308>: DATABASE ACCESSION NUMBER: AK059464
  ref <309>: DATABASE ENTRY DATE: 2001-12-06
ttttaatctggccaaacaacaatggaaatgcatgctaacgggatgaattactatcaatgattagggaatccatgcactgcagttgcccgcggtttctcatcaccaaacatatttgcagttatggatccaccaacattcttcacgatctggatgaccgcggcaaatcagcactgtgcgtgtattccacccgcaattgtgcaagcatatgaactcaaggacggtcaaaaaagttggtgacagcacatcaccttaaggtctacattgaactgaggaaagcatctaacaacatgtacatgacagcaggatgggcccagtttatagaagcaactggtctgcaggttcaagagcccgccgttttcagggttttatcaacctcgaagatgcatttcatcatatttgcaaaggacggttatcttagatgcccagttccagacaaacccagagactctgaaccgaccagacaatcgtttcgcacatcaagcccacaagggaaagccactacaattacttcgcctatccaatgctgcatcaaagggaagctaaaacatgatggcacatccacttctgcaagtacacatggcaacaacaggcgcactatcagcgaaatgtgtttctgcaccaaggacatcaggttatcagctgaagtcaagaactacatcaaagatattgcgccattcctccagccctcagacaaattttatgtgactgccataaatgcaacattcatgaaggaagggagagtgtacttagtaaaggaattttcaaagaagtacattgcaccgcttgcacgatgaaaagacagcacaaatcaaggtacgaattcctggacacccctcatccaccatggttctccacagatgctacaacttgaaatcgggatgaacccgttttgtgacaatcaacaacttccagattggaacaatttgcatattccacttttacaagacagatcgcctggaagcaacggcagatgtcttgtgaaggcaatatgcatcggctacaacctgtcatcctcctgttatcgccaagtgactctgccagggctttctaaatatctccagcctgtttctatgtttattattagcgccctttatagcctttctatagacatctaattaccttgtaaatattgcacccaagctagcatgtgtgcctctcactagacaccagggtcgaacaacatctccagtgctgtaatcagttattttggtcgtagctatatgcaatggacagcctatgtgtatctgttccat

SEQ ID NO: 1428 - DNA, 600 bp, Oryza sativa
  ref <308>: DATABASE ACCESSION NUMBER: AK104077
  ref <309>: DATABASE ENTRY DATE: 2002-08-28
ctcgattctcgacttttcttgctgtggggagaagaatcgcgattgcgcgaggggatttcttgctgctcggagatgccgcggattccgctgatcaagttccccaagaggaatctcaagatcccatccccacccccaccagcggcgcaacctgcagatcagcacgcgtccctcttgtcccgattgggagttaaatcagaggcaccatcttcttccggggagattaaaaattaccgctttagatcagatgtgccttccccaccttcttatacggctgttggagggccagcttcactccttcctaaacgcaagccactgtcagaggaagaaattgaggctatcatgcaaggtggtatctactgatattgcatccgatgaataagataccaaaccttttaaatggggtcactagagccatgtcgatatggaccttttcgttgtactccctttttggtgtcaggaagcagctgccctgatactcctttttttgagtattgccaaaatgaccaattcgtgaaaactgaacatgcaatgcatcggttgtttgccaaaatacattgatcatggagttatgccatgcaactcaactaattgtcttattcc

SEQ ID NO: 1429 - DNA, 837 bp, Oryza sativa
  ref <308>: DATABASE ACCESSION NUMBER: AK059465
  ref <309>: DATABASE ENTRY DATE: 2001-12-06
tgttattaggcaagagaatattccatctcacccctagaagagaagatggttcccaactctagtggccttatttggcaggctggggttaggcaaaaatccaggccctttccctagccatgaagaggaaaacaatccacgagtcaaaagtatgatttccaaaaacattcttcatgaagcgtcgcggttggcacctcgcctccatttgtcatctttgctctagggaggaagttcttcatgaagcgtcgcggttggcacctcgcctccatttgtcatctttgctctagggaggaagttcttcatgaagcgtcgcggttggcacctcgcctccatttgtcatctttactctagggaggaagagactttgctcacatctttcaaggttgttcttacacacaagaagtgtggagtagtatcagagggtggttagggcttcgttgctcaacgccgatggagagtcttccctcttggtggtgtgatgctcgcaaagcaatcaagaagcgggacaggagagcttttgatgagagcttttgatgcgggcatcatcttggtgacatggctaatttggaaacagcgcaatgctcgtgtctttgaggggcatgcagtgttgtcggtgaatctttgtgccgcaatcgaggatgagtggaaatcgtggcaagaagcgggcttgacttcctctctttgagttgtaaagtggaggcgtgggttttccctcgccgttgttgtatacataaggattgttttattttgtagtctgtggttgcacgtcgttttcttgggtgtgctaggtgatctgtaaattctttcccccctcttaatatactccgatcggttgttttc

SEQ ID NO: 1430 - DNA, 1149 bp, Oryza sativa
  ref <308>: DATABASE ACCESSION NUMBER: AK059466
  ref <309>: DATABASE ENTRY DATE: 2001-12-06
attgtcggaagtgcatattatgttgctcctgaagtgctccatcgatcttatggcactgaggcagatatgtggagcattggagtaatagtgtatattttgctttgtggcagccgtcctttctgggcacgtactgagtcaggaatattccgagctgtgctgaaagcagaccctagttttgaggaagccccatggccaaccctctctgctgaagcaaaagactttgtaaggaggctgctcaataaagattaccgcaagaggatgactgctgcacaagccctctgtcatccatggattcgtggtactgaagaagtgaagcttcctttggacatgataatttataggcttatgagggcttacataagttcatcttctttacggagagctgcattgagggcccttgccaagacattgacaacagatcaaatctattacctaagagaacagtttgaattgataggcccaaacaagagcgatcttattactttgcaaaatttgaagacggccttgatgaagaactccacaaatgcaatgaaggattctagggtggttgactttgttaacacaatatccaatattcagtacagaaagttggattttgaggagttttctgctgctgccatcagtgtttaccagatggaaggtttggaaacctgggaacaacatgcccggcaagcgtacgagttctttgataaggagggtaaccgaccaattgtgatcgacgagctcgcatcggaacttggattgggtccttcggttcccctacatgttgttctccaagattggatcagacatcctgatggaaaactcagcttccttgggttcatgaaactattgcatggagtttcttcgcgtaccatcccaaaaacctgagataataacttattttcttacatcaaccaaggcaaaagtgtgatgactaaactaatctctggctgtctggagaagcggcatggaaccagtacaaagattaacaaagctgtcttagtgtaacaagtgaaaaagctctcctgtcaggcccgcgaatttcgccttctcttaccagatgattgatgttgtgtttgtattcaggtttgtttagaggtgaatgtacagatgagtttaggaaacaggaaaaatgaggtgctaagaaagtgaaacatggtttaattt

SEQ ID NO: 1431 - DNA, 671 bp, Oryza sativa
  ref <308>: DATABASE ACCESSION NUMBER: AK059467
  ref <309>: DATABASE ENTRY DATE: 2001-12-06
attcgcatcactatcttcccaatctcgcgaataatcgagagagagagagagagagagagagaggggcgacgagacggcgattgctcggttctcccgcgggcggcggcgagccggcgagggcttctccggtggggggcggcgagctatcctagcgcccgccttgggagcgctctcgcggatctcctttggagctttgatagcatagcaaggtcatggcagaggttgcagatttaactggggatggaggtgttcttaagacggtggtcagaaaagcaaaggatgatgctatagctccaactgatagtcttcccttggttgatgttcattatgaaggcacactcgctgaaaatggtgaagttttcgacaccactcatgaagacaactctattttctcatttgaaattgggcaaggagctgtcattaaagcatgggatatagctttaagaactatgaaggttggtgaagttgcaaaaataacatgcaagccagaatacgcatacggaagtgcagggtcgccgccagagattccacccaatgcaacactcatttttgaggtggagttagtggcttgtaggcctaggaaaggttcaagcctgggcagtgtttctgatgagaaagccaggctagaggaactaaagaagcagcgagagctagctgctgccaccaaggag

SEQ ID NO: 1432 - DNA, 1723 bp, Oryza sativa
  ref <308>: DATABASE ACCESSION NUMBER: AK059468
  ref <309>: DATABASE ENTRY DATE: 2001-12-06
agctctatatatcattctccacacccagctgccagctctaggcttctgctagatagcatattgcactactccaatggggcgttcaccatgctgtgagaagattggcctgaagaaaggtccatggacaccagaggaagaccagaagctgcttgcatacattgaggagcatggacatggcagctggcgagcattgccttcaaaagccggtttgcagaggtgcggcaagagttgcaggttgcgatggacaaactacctgagaccagacatcaagagaggaaaattcagcttacaagaagagcagaccatcatccaacttcatgctcttcttggaaacaggtaacaatgaagcagttcactcaagatttttccctcttcaagttacctttacagtagtagtgatccttctgctgcaacatcattgaaaaatcatgacttctttgtttaccggataagataaagtgcattgtcaggccctgtcagactgttgtctgacacttcataacaaagcatatgcatccatttccatcacatctgcaagcaaaaagaaaatatgaatattgcctccatgttgaatttgaactcttgttatgtcacttcatctctgcatccggctgtcctctaagattgatgcaaacaaaagaacaacaaaaatccttgaatattaagctcacaaggttttcccctgttcctgttcaggtggtctgccattgcaacacatctaccaaagcgcactgacaatgagatcaagaactattggaacacccacctggaaaagaggttggccaagatgggaattgatcctgtcacccacaaagccatcaacggcactctgaacaacacggcgggagacaaatcagccaaagtcacagccagtctcagccacatggctcagtgggagagtgcccgcctcgaggccgaggcacggcttgctcgagaatccaagatgcgcatagcagcttctacaccaagcaaactccatgcacagtcaaccaacccacctgcttcaacaccttctccatgcttcgatgtgttgaatgcatggcagagtgcaaagatagacctggagtcacccacctccacactgacgttcgcagggagtaatgctagcatgctgccattctcaacaacaaccgccctagaattatccgaaagcaactccaatgtgtggcagcaaagaagcgatgaactggagggtgaagaaagtgagtggaagtttgtcagtaagcaacaactgcagggaatgcatggtaaagagacagaagaacacttcattggctgtgaggagtcatggttcccagggacagccaatatcggagcaggcttcacaggcatgctgcttgatggatccaatatgcatgatacatcagaatgctgggatgagtccagcaatggccaagatgagcaaagaagccaggtgtcagaagatgcagagaataagaactattggaatggcatcttcagtatggtgaattcagagcagccacccctgcagccacctttgctctagagcagagtcctctccactttttaagaaaggccttctgagcaaatccattggatcatccaatgtcaaaagaaactgaaagagcaaagaaaatagaagctacaagagtctacaactgcttccgcagtttgcaaatttttcctccacgcatttgtgaaatattagggtaccgtgggcctgtggggatgtagtaaataaaccagattgcaatttgtcagt

SEQ ID NO: 1433 - DNA, 1117 bp, Oryza sativa
  ref <308>: DATABASE ACCESSION NUMBER: AK059469
  ref <309>: DATABASE ENTRY DATE: 2001-12-06
agcggtttggcaaactcaacaaaaaggagtatgtgttcagagagccaagagatgttcgtcttggtgacataatggagaagcttagtcatatctatgaggctaaaatggatggcaatcacaccttacacatcattccggattcgagacaagtcaacgctgatgagttgcaacctggtgtctgctatctgcagataactgctgttgatcctgtaatggaggatgaggacctagggagtagaagggaaaggattttctctttatctactggtactgtccgggcccgtgtgttcgaccgttttctttttgatacaccattcacaaagaatggaaaaacacaaggtggccttgaagatcagtggaagaggcgcacagtactccagacagagggttcctttcctgctttggtgaatcgtctgttagtgatcaaatcagaatctctagagttttctcctgttgagaatgcgattggaatgatcgagacaaggacagctgccttgcgaaatgaactagaagaaccacgcagttcggaaggtgaccaactcccaagactccaaagcctgcagaggatactccaaggaagtgtggctgttcaggtaaatagtggtgtattaagtgtgtgcactgcattcttatctggtgagcccgcaactaggctccgatctcaagaactgcagcagctcatcgctgcattgctggaattcatggccgtctgcaagcgcgcaatccgtgtgcattttagattgataggggaagaagaccaggaattccacactcaactagtcaatggctttcagtcgctcacagctgagctttcacactatattcctgcaattctttcagagctataactgtattctagcaagctggcaagtaggtagcatttgaatggttcattctttcagttggggctccccaccttgtccataattccgttagtttggttgtatagttctggaaaactaactaggcttttcaattctgttctgtttgcaatgccgtgccacgattttgggggtgtaaagcttgtgtaatccttagtgtgttgtatctctattaccttgtttatgcggtttgtagactaatagcaagctatatagcagtaactattcgagtggac

SEQ ID NO: 1434 - DNA, 562 bp, Oryza sativa
  ref <308>: DATABASE ACCESSION NUMBER: AK059470
  ref <309>: DATABASE ENTRY DATE: 2001-12-06
catttcctcctcctcctcctcctcctcctctagggtttatccatcggcgactacgcggcggcggcggcggcggcgacggcgagatggtgcagcgcctgacgtaccgcaaaaggcacagctatgccacgaagtctaatcagacgcgggtcgtcaagactccaggttgtctaggaaccgcagaactgtgaaccgtccctatggtggagtgctctctggaactgcagttagggaaaggatcattcgtgctttcttggttgaagagcagaagattgtgaagaaagtcttgaaaatacagaaaaccaaggacaagtcagcctcaaagtagacaactcttggaagtggaagcaaggcgatgtgctataaacaaggaaaacatttttgttgatggtgatgatcaatggtctagcctcttctagctgaatgttttagtataactgtctgagtttggagtacttgaaatccgtctaccattgtgatgcacttgatgtcaaatgttgctgagacatatttgatccgctcttttgttcacttctctgaattgcgaatgaattttacttacttg

SEQ ID NO: 1435 - DNA, 1160 bp, Oryza sativa
  ref <308>: DATABASE ACCESSION NUMBER: AK059471
  ref <309>: DATABASE ENTRY DATE: 2001-12-06
aaaaggcccaagaggaatcctctgaagagtcttctgaagaagatagtgatgaagaggatgaaaaattggccaaaactcctaagaagaaaacgcctgctgccaccaaatcacaaaatgatgaacctaaaactcctgcgagtaaccaaagtcagggaactgagtcagcaaccctttttatgggcaacctttctttcaatttaaatcaggaccaagtgaaggaatttttccaggaagttggtgaggttatcagtgttcgtttggctacacatgaagatggctcctccaggggctttggccatgttcaatttgcttcatctgaagaagctaagaaggcgcttgaattgcatggctgtgatctggatggtcgtccagtgagacttgacttggctcatgaaagaggtgcatacacccctcacagcaggaatgatactggatcattccagaaacaaaacagaggttccagccagtctatatttgtcaagggttttgattcatctcttgaggagagcaagatccgagaatctcttgaaggacattttgctgattgcggagagatcacacgagtctcagttcccatggatcgtgaaactggtgcaagcaaagggatagcatacatagattttaaggatcaggcttccttctcgaaggcacttgaactaagtgggtctgaccttggtggctacaacctgtatgttgatgaagccaagcctaaaggagatagccgagatggtggtgggagaagaggtggccgatctggtgacagatttggcggccgatctggtgacaggtttggcggccgatctggtggtaggtttggaggtagagatggtggcagaagaggtggacgtggtggcagagatggtggcagaagaggcggacgtggcggttttcagagcaggcagagtgctggtacagctagtacaggaaagaagacaacttttggagatgagtaatggagcttgatcttgcacagctacatgcctacatcttatgcagctgtcaaaaggactgcctacctgcaactgtagtgaaatgcgatgagttctactcccatggtttactctatattgccgccgaatggctgtaccagtgaacaagttactgtgctggtatttttgtctgcagttttggtgtgtttccggtgattgtactggacatct

SEQ ID NO: 1436 - DNA, 1405 bp, Oryza sativa
  ref <308>: DATABASE ACCESSION NUMBER: AK104078
  ref <309>: DATABASE ENTRY DATE: 2002-08-28
caaaaaagaaaatctcccgtctcctccgctccttgcgccaagacgagtcgcggctgaacaggggaggggcgccgatctccatccggcgagcagagcagggcaggggaggggatcctgaattgtggaggacttagaggttgtggcacactacagctttgaaccatgtcatcgaagaaaatagagttggaccacaaggacatggtccatgattcagctatcgactactatggcaagcgccttgcaactgcctcctcagactccactgtcaagatctccagcataggcggcaaatctgccccatcccagctccttgcaacactcagcgggcactatggccctgtgtggcgtgtcgcatgggcccatcctaagtatggtactatcctcgcatcctgcagctatgatgggcgtgtgatcatttggaaggagggtgctggaggccactggtctcaagcccatgtatttactgaccacaagtcctctgtcaactccattgcttgggccccatatgaggttggtctttgtctcgcctgtgggtcttctgatggaaccatttctgtcatgactatgcgagctgatgggggatgggacactgcaaggattgagcgagctcaccctgttggtgtgacagcaatctcctgggctccagcaacagcacttggttctctggctggttcaggagagcttgtttataagcttgtctctggtggttttgactcagttgttaaggtctggggatttgtcaatggtggctggaaactggagagtgctcttccttcagatgttcacacagactgtgtgagagatgttgcatgggcaccagtgttgggcttagctaaggcgaccatcgcctgcgcttctcaagatgggaaggttgtcatttggagtagagggaaagttggtgataagtgggagggaaaggtcatgcacgacttcgggtcccctgtttggagggtttcctggtccttgactggaaacatattatctgtagctgctggtgagaacaacataactctgtggaagcaagcatcagatgggcaatgggaagaggtgatgaaggttgagccaacaaaacccgagtcatcggaagaggtgaagaaggctgagcagtaggaagattgtgtgacggcttcagttttttggcatattcacattttgataagattctgccatacctattcttttttttgcaagcaaaccaacagaacattcaatcacctattgtttagtacttagtatctttacatcagctgcatttctactttggatgggttgtgatttagaatgcaacgcttttctgattgttgtacctatttgtttctgtatatctttgggctttgttttgatcattgtcgaacatcacagctattacaagtgttatcatgtactggaaaacgatttggtgttc

SEQ ID NO: 1437 - DNA, 1361 bp, Oryza sativa
  ref <308>: DATABASE ACCESSION NUMBER: AK059472
  ref <309>: DATABASE ENTRY DATE: 2001-12-06
catgtaagttcctgatttcgtgatgtcgggagaacatgaacctatttacattgtccgtaattacctcgttggatttttgagatggcggtgcatcatgtgttttgcagatttgcttgttgggttgttcattgacaccattctgaaactacgtggtgtccctgacagcactcggatctggtctgttgtagcttggttgttcaaccccttcacgttcacaattggcacaagaggaaactgtgagcccatagtctgcgctgtcatactttggatcctgatatgtttgatgaatggtgtagagtattgcaggcatcattctggtatggtctgattgtgcacttcagaatatacccaatcatatatgcaattcctttcgttatagttctgggcaagaattatgctggtcctgctggaaggcctattcttacacagtggacttctaagcaacatttacaaagcgataaatccagtccaagtgtggaaagggcaacatcattgttaactaatttatggaattttctgacaagccttataacaagaaatacgatcctgtttggattactttcaggatctatgttctttctctggactggtgttttcttctacctttatggatgggaattcttaaatgaggcactactttaccatctttctcggactgacccgaggcataacttctcgatatatttctaccacatatatctgcatcatcagcaagggttctcaagtatacagaagctcgcttcttttctgccacagctgatcgtgcaactggcactcattctacgcttctctagggatcttccgttttgtttgtttctccaaacagttgcatttgttgcgtttaacaaggtcatgacagcacaatactttgtgtggttcttttgcctgctacccctcatcctcccttggactaccatgaagctgaagtggaagggtctggcctgtatattggtgtggatggggtcccaactgcactggctgatgtgggcgtacatgcttgaattcaagggccaaaacgtcttcataccgctctgggcagcaggtctcatgttcctggctgcaaacatctttgttatgctcatggtgatcaaccaccacaagttcactccgctcttctcatcatcaacggtgaagtctgcaagcaagattgctgccaagaaggaatagcatataccacccttcttttttattactttaccagctgatgtatttctggagacatggatactgatttttctttttaatgttctactagtatcttatgcgacttgcatccttgctcttttttttttaaccctgagacccggcttggttggttttgtactattaacttcttgtcttaggttgtatggtaagtctgg

SEQ ID NO: 1438 - DNA, 1575 bp, Oryza sativa
  ref <308>: DATABASE ACCESSION NUMBER: AK059473
  ref <309>: DATABASE ENTRY DATE: 2001-12-06
aacgccatcccagcgcagcgcaggcacgcacggcaccggcggcggaggacgcggcaggagcagcagccgcctcctccaatccccgagccgaacactcgctggcgggcgcgcgcgcgcgcagccggggaaccgggggggagacagggtggtggtggtgaggcgggggcgagcgcaatgcaggagccaaagcacaccgatccggcggccatgcgcggggcgcaccaccgccgggccagatctgaggtcgccttccgcctgcccgacgacctcgacctcggcggcggcggcgcgggggcgttcgacgagatcggctccgaggacgacctcttctccaccttcatggacatcgagaagatctcctccggccccgccgccgcggggggctccgaccgggaccgcgccgcggagacgtcctcgccgccgcgccccaagcaccgccacagcagctccgtcgacggctccgggttcttcgccgccgcgcggaaggacgccgccgcatcgctggcggaggtcatggaggctaagaaggccatgacccccgagcagctctccgagctcgccgccatcgaccccaagcgcgccaaaagaattctggcgaacagacaatctgcagctcggtcaaaagagagaaaagctcgttacataacagaacttgagcggaaggttcaaactcttcagactgaagccactactctctcagcacaactcacactatttcagagagacacaactgggctttctgcagaaaatgcagagctcaagatacggttgcaggccatggaacaacaggctcaactgcgagatgctctgaatgatgcactaaagcaggaactggagaggcttaagctcgctactggtgagatgacaaattccaatgagacatatagcatgggactgcaacatgtcccatacaacacccctttcttccctctcgcccagcataatgcagcccgccagaacggtggaacccagttgccaccacaattccaaccaccccgtcctaatgtgcccaatcacatgctatcccatccaaacggtttgcaagatatcatgcagcaagaccctcttggccggcttcagggtttggacatcagcaaagggcctctagttgtgaaatcagagagcagctcgatctctgcaagtgaaagcagcagcaccttctaaccaggcctacccaccgagcccacagttccattagattcgtttgttcatagcctgacatcctcgcgctgctccctgttctgtaagcttattatttattcaattcgttcgatttagttgaaattgttcgtaattgcagtggctgatctattcccttctgtggacatgattcctgtacccctcacatccatttgttttgggttcatctcctgtgtgctgtgtttgggattatcagggcaccaggactggctttctccgagaatactgtgttctttgtggtcgtgtggacttgttcaccatggattcaattcaaccttttgaaaagatgcatgtattctctgatttttttttctcagtcatgtacatgtcactgttatgctagtttgattgatgtgtactgtggaatttgtggat

SEQ ID NO: 1439 - DNA, 600 bp, Oryza sativa
  ref <308>: DATABASE ACCESSION NUMBER: AK059474
  ref <309>: DATABASE ENTRY DATE: 2001-12-06
atgccacagactcagccgccaccgcccgcaccaacgatgcttcagcaacaaatgccgatgaacgtcggaccaccaatgcagttcgcccttcagcagtccggcgcgccgtctttcaggcctttgcagccgcccccggggatgcaattcttccacccccaatctcagtgacatttttggtagtccagctcctgttaaaactgtcgcgttttcggtgttagtattgactggtagacaaaaggttctgactgttgtagggtatactgtttggttgttctttacctggagatgttgtacatgtaatgcgaggaaactaacaggaagattcagttaagtgttgagcctttgctcaatcctgcagagaagggcagaagacgtcacctgtttgtgagctccagatttgttgatgggctgacgaactgggcaagttcgcgtcaaaatcggcccgttgttttctttttctttctgggaaatgggaataacgcggtcgagattcgagatgattgtagtttgtatatgctgcccatttctgttgttctttttttgtaagcagcaggacaagttctagtaaagaggaaaaaaaaaaccccagaactttggatt

SEQ ID NO: 1440 - DNA, 1382 bp, Oryza sativa
  ref <308>: DATABASE ACCESSION NUMBER: AK059475
  ref <309>: DATABASE ENTRY DATE: 2001-12-06
aaaaaatgaagggaaagggtcgagagagaggtcagtagtagcgtagtgagcggcggcggcggcggagatggggaagggcggcgagctgtgggacgattcggcgctggtagacgcgttcgaccacgccgtcgccaccttcaaggctatgcatagcaaaaacacccaagcaactacatcggagaatgaggaaccaggagatcctgctgttgctgcccctgctggagaagagaacatttcggctgaggtggccgatgagctcatagagaaggatggtagccagacagaaccttgtgaagcatcggagacaccatatcagacccatgaggaaagaaagtccactgagcaggctcctcttcaggaaaaggatctggataaagaggcacatttttcagaacctaagatccatgcctcagatgttgctgatgctgagcaaaaagatacctcaaaccagcagacctgggactacaatgaattggtaaaaaagtactatgaacttgaggagcaaagccggaaagttcttgagcaactccatcaaacaaactactggaattaccaagtccctggtcaatcttcagtgtaccaacaaccgcaagttcctgcctatagtgccacagcaccagatccgcattcctcaaccattcaatccccatgctgttgtgcgaatgtacccctggtatcagtctcctgctgttcaactggccagacgagtggggtttcttcttgtatgcaaccaagtggtggttgtagcatatcattgacttgtgatcaatgccctggcacaagtgcgacagattctactggagcaacctgtgtgcagcaggcagaaaaggtgtctactgacagtgatcaagttgctaaggctgcaatgatgactgctgaaggtgccatgaatttcatgagaagtacgatatctggagacttgggctcctttccaagaacagacgctgcatctggaaaggagagcatgcctatgggcatgaatccaaattttgacaccatgggagcagatagtgatcttgctgttgtcttaaatgcatggtacgcagcggggttttacactggcaggtacctcatgcagcagtccatgaaaaataccagacaaggctgacttctattaaaaagccatttggagtatcgccaaagatgtcctttccactccagaaaaatcaagagatctattgacaactcgtggaactgaacattccattagcatatgtaatgctatcagtgcttttctagcaagagttatggtacaattatacatgaatttgctgtaaggctctgattagacattaaggagaaacgatggtactgatcattttgctatccaaatctatcagatgatctgtagaaacaagcgatccctgtgtgatggttttgct

SEQ ID NO: 1441 - DNA, 367 bp, Oryza sativa
  ref <308>: DATABASE ACCESSION NUMBER: AK059476
  ref <309>: DATABASE ENTRY DATE: 2001-12-06
aaaaaaaaaaaaaaaaaactgagcaatgcgaaatggatgaagatgatcctaaagcattgttaccgccacaggtccaaaccaacacgaagatgaactcccgtcgttacagatcaagtagaactgatgatgagtaaaattgacggtacccttgtctcttcagtttaatgttgtaatacaatctacaaatttgaggttccaatgttggagtagttgctatgcaagttgaggagatatgttgatgtacttttgctttgatcttctgatctgagctaaccagttataattctactgtggtacttattgtttaattaatcttgtactgggagctactgtggtcctgtggatgttgatgtaaacttttactggt

SEQ ID NO: 1442 - DNA, 1123 bp, Oryza sativa
  ref <308>: DATABASE ACCESSION NUMBER: AK059477
  ref <309>: DATABASE ENTRY DATE: 2001-12-06
ctcatacactatggggatggtgagaagggatatattttacatcccagaggggctataattggagatactattgtttctggtacaaaagttcctatatcaatgggaaatgccctacctttgaccgatatgcccttaggcacggccatacataacatagaaatcacacgtggaaggggtgggcaattagctagagcagcaggtgctgtagcgaaactgattgcaaaagaaggtaaatcggccactttaagattaccatctggggaggtccgtttggtatcccaaaactgcttagcaacagtcggacaagtgggtaatgttggggtgaaccaaaaaagtttgggtagagccgggtctaagtgttggctaggtaaacgccccgtagtaagaggggtagttatgaaccctgtggaccacccccatgggggcggtgaagggaaagcccccattggtagaaaaaaacccacaaccccttggggttatcctgcgcttggaagaagaactaggaaaaggaaaaaatatagtgatagttttattcttcgtcgccgtaagtaaatacgtaactaggaatatggaaaattgcatttttggaatttgcaataatgggatgggcgaacgacgggaattgaacccgcgcatggtggattcacaatccactgccttgatccacttggctacatccgccccttatccagctaaaggattttctcttttttccattcatcattattctatttattctgacctccatacttcgatcgagatattggacatcgaatgccactctttaaaatggaaaaaaaggagtaatcagctgtgacacgaaaaaaaacgaatccttttgtagctcatcatttattggcaaaaatagaaaaggtcaatatgaaggaggagaaagaaacaatagtaacgtggtcccgggcatctagcattctacccgcaatggttggccatacaatcgcgattcataatggaaaggaacatatacctatttacataacaaatcctatggtaggtcgcaaattgggggaattcgtaccaactcggcatttcacgagttatgaaagtgcaagaaaggatactaaatctcgtcgttaactgaattcagaatagaaagattcaaaat

SEQ ID NO: 1443 - DNA, 593 bp, Oryza sativa
  ref <308>: DATABASE ACCESSION NUMBER: AK059478
  ref <309>: DATABASE ENTRY DATE: 2001-12-06
atgaagaaaggctttcttgctctctccctcttcctcctactcacccttgcctcacaggccacatggtgtgatgccgagagaggccacgcgatcaatggagctcgtctgagacctcatctccagtttgaagaattgcatgtcactgatggcaagaagcttgggcaagcagctgacactgacactgacactgacactgagagccacaagcaccatgacgaggtgaaggttccgatgagaatggccatagcacacaagggcggcggcgatgccggctccggcgaaggcgacggcgtccgtcctggcactggccttcgcatgtgccattgttctctcggctttcagcttctgatcgaagctgtgtgtgtgtggtggtattcttgcaagaaaggtaggagtattatattagtatatgtgtgtttagttgtgtggtaattaatctctctgaattatgtgtatccagtttgtcagaaatgcagtgaaagagtttcatggccaattctcaaccagtatcttatgttcttgatttatcatgtctcatggtgtccgaaatattgttcttggattctgtccagttggaaaatcacatgctcaac

SEQ ID NO: 1444 - DNA, 1515 bp, Oryza sativa
  ref <308>: DATABASE ACCESSION NUMBER: AK059479
  ref <309>: DATABASE ENTRY DATE: 2001-12-06
actctcactggctcgcagtcgcacacactcccacgcctccgcgctcccgaccaccgtcgccatcatcatgccaccacccttgctcctcctcctcctcctcgccgccgccgccgccgccgtcgcgcccgcgcggtccaagtcgacgctggagtcctgctcctcttccaccgcctgcccagcgctgctctcctacacgctctacgccgacctcaagctcgccgagctggccgcgctcttctccgccgacccgctcgccatcctcgccgccaactccatcgacttcgccgtcccggaccccgccgaccgcatcctccccgcggggctcccgctccgcgtgcccgtcccctgcgcctgctccgacggcatccgcagggtcaccaccgtgcgctacgttgcgcgcccgggcgacacgctcgcctccgtcgcctcctccgtctacggcggcctcaccaccccggactggatcagcgactccaacggcatcctcggcgccaagcccgacgccgccgtcgacgccgggacgactctgttcgtgccgctgcactgcgcctgcttcggcggcgtcgacaacggcctccccgcggtgtacctcacgtacgtcgccgggaagggggacaccgtcgccgcagtcgcgcagaggtaccggaccacggccaccgacctcatgagcgtcaacgacatggccacccccgagctcgccgccggtgacatcatcgtcgtcccgctgccagcgtgcacatcatcattcccggcgttcacggcggactacggcctggcggtggcgaacgggacctacgcagttactgccaaccggtgtgtccagtgcagctgtggcccaggcaacttggacctgttctgcgtgccggcgccgctcgccgactcgacgtgctccagcatgcagtgcgccaacagcagcatgatgctcggcaacttcactctcctcatgaccagctccggctgcagcgtcacgtcctgcagctacggcggattcgtgaacggcacaattctcaccacgttaaccacagcactcaagcctcaatgcccaggtccgcatcagtatcctccgctgattccgccgccgacgtcgtccttcttcgagacgtacctcggcccttcgccgacgccgatggcatccgaaggaggcgtcatggccggcatggcgccgacgagcaccccggcggcgagctccggccctcctccggccggccggcacgtcgtcggcgacgttcttggggcgttcgctctctgcctcgtcggcaacctgctgtggtaacagagcggctctcgccgttgatgctacataattttgtacagaagctgtggccggctgtgtttttgtcgggcagcgtcgggttgtgcccaatttttgttgcgttcattcgatttgtctgccactcactcctgtggaatggcaaacacaattacagaagcgcagatctctccagcgcggctgtaatggtcctgaattcctgatgctattgagaatgtgagtaccgagtagtgtgctttttatcg

SEQ ID NO: 1445 - DNA, 527 bp, Oryza sativa
  ref <308>: DATABASE ACCESSION NUMBER: AK059480
  ref <309>: DATABASE ENTRY DATE: 2001-12-06
gttgaatggttacgagaaaataaaagttagctctcttttattcaagtgctggtgaagatgtggttcaaatgtagtattcaagaatgctttcagcaccttggggggcctctgaaggatgcaatttcagttttcatagttctgtggtggaggctggtttcagcatgatcattcaatcgccttcttatcttgtctttttctttccccatttttgaagctagaaaaaaaaaagtttgaagagatgtcatcttgaaattttgcttggatatgctctatatttgtgagactcaatgctattattgcattggatgggttttttttaggtatagcttcaaaagcatggaaattggctgagaaaggcatgtgtagctatgttgtttgctacctcttctcccttgcttagaagaacagacacccccatgtcctttatttgtgtacccccgttattttaggggatatttcattctgtataggtttattcatcagcagctaccgactatgaaaatgactcatcttattggctctttggt

SEQ ID NO: 1446 - DNA, 1098 bp, Oryza sativa
  ref <308>: DATABASE ACCESSION NUMBER: AK059481
  ref <309>: DATABASE ENTRY DATE: 2001-12-06
attgcgcttgttagaggtcttttaccacaagatatataagatttttccactccatgagaagatagagaatattaatgatcagtactggacactacgtgctgaggagattccagaggaggagaaaaatctcggtccaaatgatcggttaattcatgtttatcacttcatgaaagaccctcttcagaatcagcagattcagaactttggagatcctttttatcttgctatccgtgaaggtgagactttagcagaagtaaaggagcgcatacagaaaaaactccaagtccctgatgaggaattctgcaagtggaaattcgctttcatatccatgaaccggccagattacctccaagattcagatgttgtatctgcccgtttccagaggagagatgtctatggagcctgggagcagtatcttggtttggagcatgctgatactgcaccaaaaagggcctacacagccaatcagaaccgtcacacctatgagaagccagtgagaatttacaattgaaatcacttctgactgtgctggccccttggtggtgtcaaatctgaaagcagcaacagagagatgtagtatggagaagttaaactcgaacagggaaaagcagcaacaagttttggccatttgggtgccgtggcctctattcctttctaccggtgctgtttggatgcagaagtgcacttgatttcattgttcatgatgacaaatttttcatgattttccaccatgctttggggcaatggtgcgtgctattgaatttccttaagttgggtgtgaatgcccccttagggtagatgttgcttcatttttagagcaaagtttcggtacataagattttggtaggggggcatatgtatacagggtatagttctgactcatatcgacttcttgtctttgtgtggatgtaacaatggaaaacatcataccaatcttgctgtatggctcaattttatcttcctttcgcagaaaaaattaaccagaattactgccgcagttagtgcggcgctgggttccgtgatagtaatagctgatgtaagcgtggatatgatgtaattcaccagaaatatgaaatatcccgatttccttcgagaaac

SEQ ID NO: 1447 - DNA, 1287 bp, Oryza sativa
  ref <308>: DATABASE ACCESSION NUMBER: AK059482
  ref <309>: DATABASE ENTRY DATE: 2001-12-06
acagccgatgcgccgccgccaatcctcgatctggttgctacctgcgattcttcagcctctcttcatctactttcgattcattctgcttcgatttcttgtttctttgcttttcaattctttcgattcgatcgaagtttcgatcggttctgcttcgatttcttgtttctttgcttccttcgatttgctctgggatgatttctttgcttcggttcatcgtattcgtatctcgtagtattagcgagtgatgtttggaggagaaacgatggaaggaaattcagaggtaacgagcaatgattcaggcagcccctttgtctgatttcaatggcaatggaggtgttgcgttgctcggagagtgattcttctgctcttcagattagctgagagggtaggcttgctttccctcgttgaagcttgtctagtagtcttaagaacatttcgtttaatctttcacccttccctagtttctttttgatctgttaatatgttttttttcgtttttatgcatgcaaaatcagaacgccaaacttctgttcttcggtcttgtatgttctagattctttttacaaaatcataacgccaactttttcttcgagctgtggattggtggacggtttttatgtgatctggatctgtaatttcgttgataaagatctcaacatgacaaacatctcggacaacatgatttgataaccagactaccaaagattaaaattacaaagtttctcatgaaaaaaaaaaagttgagttgcaaagtaaacgaaagatcacggattcatggtagctctgaggcgttggttgaaccgacttcgccggcgagaggcggcgaactcatagctagttctgacttcgccggaggtggtggcggcgctgacgaacacgttggttgaactgacctcgccggaggtggtggtggcgcccggaagagcggccttatgggcggcgccggcttcggcgacggcggcgccctcaccgccctccccgccgccacggcgaccggcgatggcgcgtttgaggtggtggtggacagagcagccaggatggcaactccggcgatgagctcgaacagcctcatcgtagccaagaacagtttgtgactgcaggcgcacggcggctgctgaactcaaactgaatttatactgaaactttcgatggttgacctgaatttgtttgtcttgcgattcgagcgcgcacatgaatgatactctaccggtgagttctttgcaatttgcatatcctagagtataagaattcgagcttccaatttaaaaataagaattccagcttttc

SEQ ID NO: 1448 - DNA, 679 bp, Oryza sativa
  ref <308>: DATABASE ACCESSION NUMBER: AK059483
  ref <309>: DATABASE ENTRY DATE: 2001-12-06
aaggtgctcccctccatcggcaacgaggtgctcaaggccgtcgtcgcgcagttcaacgccgaccagctcctcaccgagcggccccacgtctcagccctcgtccgcgacgccctcatccgccgcgcccgcgagttcaacatcatcctcgacgacgtcgccatcacccacctctcctacggcatcgagttctcgcaggccgtcgagaagaagcaggtggcgcagcaggaggccgagcgctccaagttcctcgtggccaaggctgagcaggagaggcgcgcggccatcgtgcgcgcggagggagagagtgagtccgcgcggctcatttctgaggccaccgccgccgctgggacagggctgattgagctgaggaggatcgaggcggccagggagattgctgccgagctggcccgttctcctaatgttgcatacgttcctgctggggacaatggccggatgctgctcggcctcaacgctgccgggttcggccggtgatccgtcactccaattttacccctttagttgcccaggcatccgctctgtgttacattaaactggaatgatggtatggggaattatgttatctgctacttttggtaatatttagtctggatgtctttgaacggaatgtgctaatctttgtgatccaaataagttctgggtctaagactcatttatgttt

SEQ ID NO: 1449 - DNA, 1326 bp, Oryza sativa
  ref <308>: DATABASE ACCESSION NUMBER: AK059484
  ref <309>: DATABASE ENTRY DATE: 2001-12-06
cttaataagtgatcgggcggcgaggcgaggcgaggtgagtaacagatcgatcgatccatgtcgccagtcgggtggttggtcttgttgttgccggcgctgctgcggcggggcagcagcggggtggctgcggcggggaaggtgccggcggtgatcgtgttcggcgactcgtcggtggacacgggcaacaacaacttcatcccgacgatcgcgcggagcaacttctggccgtacgggcgcgactacgctgacggcctccccaccggccgcttctccaacggccgcctcgccaccgacttcatctccgaggccttcggactccctccctgcatccctgcctacctcgacaccaacctcaccatcgaccagctcgcctccggcgtctccttcgcctccgccgccaccggcctcgacaacgccaccgccggagtcctacttcagtacttcagggagtacaaggagaggctgaggatcgccaagggggaggctgaagccggcgagatcatcggcgaggcgctctacatctggagcatcggcaccaacgacttcatcgagaactactacaacctgccggagcggcggatgcagtacacggtggcggagtacgaggcgtacctgctggggctcgccgagtccgccatccgcgacgtgcactccctcggcggccggaagatggacttcaccgggctgacgccgatggggtgcctccccgccgagcgcatcggcaaccgcgacaaccccggcgagtgcaacgaggactacaacgccgtcgcccggagcttcaacggcaagcttcaggggctcgccgccaggctcaacaaggacctccccggcctccaactcgtctacgccgacacctacaagatcctcgcctccgtcgtcgacaagccggccgactacggttttgaaaatgcagtgcaaggttgctgtgggactggactcttcgaggccggttacttctgcagcttgagcacctcgttgttatgtcaaaatgccaacaaatacgtcttctttgatgcaatccatcccacggagaaaatgtacaagatcattgccgatacagtcatgaacaccacacttaatgtgttcctataaagtttattaattttgtggattgatggatacatatatatacgggcggtgaaagtactgtacaagttgcttaatgcgtaaactaaacaaacaccatagatattcactctcttgggatcatatatatactacgtgattgtacaaggatgaacggactactgtataaatcaaaatatgatcagttttgtaattaaagcatggacgccagtttcaatgccagccacactttagtgcttt

SEQ ID NO: 1450 - DNA, 1233 bp, Oryza sativa
  ref <308>: DATABASE ACCESSION NUMBER: AK059485
  ref <309>: DATABASE ENTRY DATE: 2001-12-06
acgatgacaagcttctagactttttcggaatcgaccgcaccaaagtaaaattaccaaaaatcgttccgtcttcatcgccagatgaattcgggtacataagaaccggtatattagaaggtgtacggattgctggatgcctcggtgatcaatcttcggctttggttggtcaacaagggttcacgcctggttctgcaaagaatacgtacggcacgggttgcttcctgctatacaatgttggcgaaaagcctgtcatctcctcgcatggcctgctggccaccgttgcgtatgattttggtggaaaccggaagccagtatatgcacttgaaggaagcattgccgtagcgggcagtggcgtcaagttcctcatgaacaacatgggcttcattacgcattcgcacaagatcagcgacttggcagcctctgttgaagataacggtggatgcgtctttgtcacggctttcagtggtctttttgctccttactggatcgacgatgcgaaaggcaccatattcggaatcactcaattcacagagcggggccatatcgctcgcgcaacccttgaggcaacatgtttccaaacaagggcaattctcgacgctatggaactagacagtggtcacaagcttaatatgcttgcagtggacggtggcatgagcaattctaatttgtgtatgcagactcaggcaaatattatcggcattcctgtagatcgtccggcaatgcgcgaaaccactgcgttaggtgcagccatcgcagctggatttgccgttggcgtatggaaagaattcgaggagctgaaagaaatcaaccagaaagaccgcatgatctttaaaccaaacgtggacaaagaagtaggcgagaagatgttcaagaaatggggacgggctgtcgagatgtgccgcggctggttggatgctggggaggctaatggggagttctcatgatttgcatctatattggagactaatatatccataaacgcttcagtgcatttcttcttggcgccaggaagtacggagttgggagtgttgcttcagaaaacaccaagtacattgtgatatggatgttcatgctctaagtgggctacaaagtggattgataatcgacgagatggtatgggccagacggggttcctacaaccgcttctagtatagacactgccccagcacggcatgggaatgagatttgacagtatcggtattggataagctactagctcaatccttctatgac

SEQ ID NO: 1451 - DNA, 1062 bp, Oryza sativa
  ref <308>: DATABASE ACCESSION NUMBER: AK059486
  ref <309>: DATABASE ENTRY DATE: 2001-12-06
attcgatgagtgcagttggacgtctaggcaatgaaccctctgctagtgctccaagctacattcctcgttcataccggaatgccatgatggagagaagttctgttggtgctagcagtttcactcatcagacaagctcagagcaaagagttgcacagtcgcaatcgatgttttcattgtcaccctccattctatcaccagagcacctgattgggaatgacagatcatcgttgcgacaagggttgacgtttggaactgtcaagcctgagacactcaaccagtggagagaagagagctctcagcaggcaagcagcagcagcagtagcagcagcaatgatcatggggcagtaagctcaagcaatggaggtgagtttgagaagttttatttgtttggaaagccacggagcaagcaactgtcagaaatttctgccagatctactccatttcaaccacaaggcctggtcagtgatgagtttccgcacctagacataatcaatgacttgctaaatgacgaacagtgtgaaaggcgaacattaaaggttcttcagcggagccaacaggcatttgctcgacaatactcgatgcccaataattccagcacacctgattatggcatgtttgctcaatctgatccatacctgtttgatcaacctgagcaatactatgacgaggaaatcccaaggttctataattctttgaacggtacttctcgggggctaagggagaggagttattcgcattttgatctgccttcatactccaacggccagtttgatgatatgatgatgaaccagtggccatacggccaaacagacctctccttgccaaattttggggcagatatgaatggttacccatatcagtcaagtgattatccgaattccgcaaatgggttaagcaggtacccaccctatcgacctgccaatgggcattgagcacctctaatgattagtgattgcaattcacaataatgtgttgtaatctcatgctgttttcttctgagctgagtgtaattgtaatccttccctatagttttataaagaacggctcctcagttccttattc

SEQ ID NO: 1452 - DNA, 1348 bp, Oryza sativa
  ref <308>: DATABASE ACCESSION NUMBER: AK059487
  ref <309>: DATABASE ENTRY DATE: 2001-12-06
tcctcgtcctcgagtggctcccgctcgacctctccgccgtcgtccgcgccgccgccgccgccaggccgagcgccctccccgccgcgcagcgcaagcgctggatgctgcaggtgctcgagggcgtcgccgcgtgccacagcgccggggtcgtgcaccgcgacctcaagcccgccaacctgctcatctccgaggacggggtcctcaaggtcgccgaccttggtcaggccaggatacttcaggagacaggaacataccaaggtatgcatccatatgagcaaagttcaggagtggagccttgggtttcacaacaacgagcagtgctacatggagtgaaagagaaccacccatctcatgactcagaaactcaaactggtcaggagccagagagactcaccgcagctgattacctacatgagatggaccaactccgggccaaatccacacatggagatgttgacaaaatgagcctacaggatgggaatgcctcctgtcttgccacatgcagcacagcagacattgacgatgatccatttagagcctcctattcatatgacgcagaagaaggcatgttggaagaagagtccggtgctttcacttcttgtgttggcacacgctggtttagagctccagagctcctttatgggtcaacaaactatgggcaggaggttgacctctggtcactaggatgtattttggctgaactgtttaatttagagcctatattcccaggcacatctgatatcgatcagattggtagaattatcagtgttctgggcaacatcacagaagaaacctttccaggctgttcaaatctgccagattacaataagattttcttcaacaaagtcgagaagccaataggcctcgaagcatgcctgcctgatagatctgcttctgaagttagtatcataaagaggctactttgctatgacccaacaaagagggccagtgctgccgacttgctgaatgatccatacttcgccgaagaaccattacctgtacctattgaaggattacaagtcccagaatcaaaggatgaagatgatgacagcacagaagaatgggctaatttcaggggtggagattcagattcagacttcgatgaattcggcagcatggatgtcaccaagaccgacaagggtttcagcatacgcttctcgtgatcaagaatgattgatgagggtaattgtatcttcctgaacatgctggcagaggaatttctgtcgcagcatattgtatggcattttgataattgttttactatttgtaaactgcgatatgttcattatgttgtgtacaacagcaccagctttcctggtaatgagatgaataaactacagtctgcacc

SEQ ID NO: 1453 - DNA, 514 bp, Oryza sativa
  ref <308>: DATABASE ACCESSION NUMBER: AK059488
  ref <309>: DATABASE ENTRY DATE: 2001-12-06
ttcacagttgatggaaaagaagccggtattctgaaaagctatggacctttgagtttcttgaaggtccacgatgctggccacatggtaccaatggatcaaccgaaggtcgctctggagatgctgatgaggtggacctcaggaaacctttccaacgcatcctcgagcttccagaggctcgattttaccatgtgatatacacactctgtcctcttgtgacacgatcagaggaacatggtttccccataaattagtataaagtgcttagtaggcacgtcagaatgattttaggtgatgacaagctcactgctaccgtacagatgttatttcccttgtacggtgcttgagtcactgaagtatcggtgacgccactcgattgttagcatgtaataaagcttagaattgttatggacagaagccaatctctttgttatgagggctgtttatgtccaggtcttgtatgctattataatacttatggcttgtgctatggatggtataatctgtgctccaaact

SEQ ID NO: 1454 - DNA, 761 bp, Oryza sativa
  ref <308>: DATABASE ACCESSION NUMBER: AK104079
  ref <309>: DATABASE ENTRY DATE: 2002-08-28
acacgtttcagctgtctttcagtgttcacgtaggttgtagagagcacaacaacgtacgtacacagcagcaaagactgagactagctagcttagctgacatggctccaaggtgcgcgacgctggcggtggtggtggtgctggtggcggccgtggtggcgccgccgacggcggtgcgcgcggctatctcgtgctcggcggtgtacaacacgctgatgccgtgcctgccgtacgtgcaggcggggggcacggtgcccagggcgtgctgcggcggcattcagagcctgctcgccgccgccaacaacacccccgatcgccgcaccatctgcggctgcctcaagaacgtcgccaacggcgcctccgggggcccctacatcacccgcgccgccgcgctcccctccaagtgcaacgtctccctcccttacaagatcagcaccagcgtcaactgcaacgcgataaactagggcggccggcctgatgcgtacgtgtgtgcccgcgcctcccgtacgagaggagaataaaatgtcattagtaccatcaaattaagctagctagttaagctttacgaaaatcgatccctttcttcctctgtggtgtttagcagtttagggatcgtatgtctccacagttcctactatagtgtcgcttgggcgatggtggagctatattgtgcactttataaggtggtgttattatgtaacgcctgtgctagctttggtcctgatgttctccatgtgaactgtgtcaaccgtccattgttctgc

SEQ ID NO: 1455 - DNA, 1492 bp, Oryza sativa
  ref <308>: DATABASE ACCESSION NUMBER: AK059489
  ref <309>: DATABASE ENTRY DATE: 2001-12-06
acaggctcgagcttactagctaggcggagtagagtccgtcgcactcaacgctctgtttcacacacgcacgcacccatctgaaagcacggcgcgaccaaacgcatcgacctttggtttgcccgcgtctcgtcgccatctttgtactacgccaatggctctccgctgcctagctgctgccgcagtacagcttgatcgttgcccgtaacctcccgtggctccgatcccgtctccggcgcggcgcgcggctcggcgttgagacagtttgccgcctcatgtcccgggagctggagctgctgctgtttttgctggccctacgggcgagcggcgaggtcgtcgcgggttcggcggaggcagcggcagcggcagcggcgtggcccgcgctgcaggtggggttctaccatgccaagtgccctgtcgcggaggacgtcgtgctgggcgagatgaggatgatcctcgaggaggatcccacgctcgcgccgtctctgctccggatgcactaccacgactgcttcgtccaggggtgtgacggatcgatcatgctgaggtcgaggagcgggaagggggagagggacgcgacgcccaaccggagcatgcggggctacgacgccatcaatcggatcaaggcgaggctggagaccgtctgcccgctcaccgtctcctgcgccgacatcatcgccatggcggcgagagacgccgtctacctgagcaaggggccgtggtacgacgtggagaccgggaggagggacggcgacgtgagcgtggccgagtacgccgagaacgacctggcgccgccggactccaacatcgtcgacgtcaagaccttcttcagcgtcaagtctctcaacgccaaggacatcgccgtgctcttcggatgccacagcatcgggacgtcgcactgcggggcgttccagaagcggctgtacaacttcaccggaaggatggaccaggacccgtcgctggacgccggctacgcggcgaagctcaagaagctctgcccgccggggcacggccacgaccacgaccacgacggccatggcggcgccggcggcgcggccaaggtgcccatggaccccggcagcggcttcacattcgacctgagctactaccggcacgtgctcgccacgggcggcctgttccagtcggacggcagcctccgcgacgaccccgtcacgaggggctacgtcgagaagctcgccaacgcgtcgtcgtcggaggagtacttcgccgacttcgcggcggcgatggtcaagatgggccgcaccgacgtgctcaccggcgatctcggggcggtcaggccgacgtgtgacagcctcgtcgactagtttattcggcgtcccgccacatttgtgatctgtagaattttatatggttttctctgtaacatatatgtaatttcgatttagattagggaaaggttgagacttgagagaagttgcagtttctacgcttttgaggagactgattggaacagcgtatgaatctagagttaaac

SEQ ID NO: 1456 - DNA, 1890 bp, Oryza sativa
  ref <308>: DATABASE ACCESSION NUMBER: AK059490
  ref <309>: DATABASE ENTRY DATE: 2001-12-06
gtccccgaagcccagatccccaaccgggtccccgaacccgacaagggccgcccgagacccgataagcgatgccctcctctcgccgccggagatcgtgagatcgccgccgcggccctccccgccggcgatgacgtccgccgtgctcgccggccggaatgaggtccaccaccaccaccaccaccactgggccgacgcccgcgtccccctcatgcccaagcacgccaccaaccctaaccctaggcggcaccaccggccgagccccagcatcccgccgccgccgccgccgcagcggccaccggcggcgactgtggccccgtccgtgccggatccctccccgtcgggccacgtgacgatccgcccctccgagctgtcccgcagggaggcccaggtgctccgcgcgcggctcaccggcgagctcagccgggtccgcgccctcctctccgacatcgacgggtgggaggcgcggcggcggcggccggcggagcctccgcgccagcgggggcacgtgtcgccgcccccggccctccaggcggcgatgcggaagcggtgcacgcagatcctgacgcggctgcggaagcagaagatcagcgtgtggttcaactcgccggtggacgtcgagcggctgaagctgcacgactaccacgccatcatcaggaaccccatggatctcggcaccgtcaaggagaacctcgccttcgggaggtacccctcgcatgaggcattcgccaccgatgtccgcctcaccttcagcaacgcgctgcggtacaatccggccgaccaccatgtccaccgctacgccagtaacctcctcgccaccttcgaggggttgtacaaggaggccttgtcctggttcgagcaggagtgccagcgtctcgagccgccaatgccgctcgctttgccgccgccgccgcagcccccggtgcctatgccgatgcaggcgccgccaaggattgggggtggggggaggaggccgaagcccaaggcgagggagcccaacaagagggagatgagcgacgaggaaaagcacaagttgagggtggagatcgggaatttgcccgaggagaaaatggggaatgtgctacagattgtgcagaagaggaataccgatccggcgctaatgggagaggtcgttgagcttgatttcgacgaaatggatgtcgagacgctgtgggagctcgatcgatttgtggtcaattgcaagaaggcgctcagcaagagccggaggactgtcgcgatgaacggtgatgctgttgatgcgactgctattgttccaactgaggacgataccgtgcaggtgaatgtgcatcatcagccttcggtggttgaaattggggactcggagaatgacacgccggagaagagggtttcagaggttgatatggttgatgagtatgttgatattggcgatgagatgccgacggcaaattaccagtcggtggagattgagagggatgcccaggtagcgagcagctcaagcgggtctgatagtggctcgtctgcatccagtgattctgactcgaggagctctggggactccgattcagacggggatgatgcccagtctcccgattaggtggtgcttcttcctctaacaataggattttagtggttttattaggtgactgaggtccattttggcaacgtatttttagtagcgtggtataggaaattggatgggttcttgttcaagttgttgtgagctatgttcgtgtgtgcgcctgcattcaccttaggttgttggtagtaatggatagctagtttatgtgggtagtttggcaaacgaagaccattgtaaagaagggaatataatcgaaggaaaagagaaaggtagcaatgtgttagcatttaatcatgagttcgtctcaaatcatcttattatgtttttgtgcc

SEQ ID NO: 1457 - DNA, 854 bp, Oryza sativa
  ref <308>: DATABASE ACCESSION NUMBER: AK059491
  ref <309>: DATABASE ENTRY DATE: 2001-12-06
aaaaagatctgaggagggatcgaggaattggagtaaatataggagcttaggaaccgaccgcccagggatcttgcagcggaatcgtccatggcggcggcgcttcgatttgcggcgaggaaggtcagcggtcgcgcccttcaacaggcgacggctttcgtaccgccgccgccggcggttagagaggaacaacggcggttgttgccgaggcttatccccggcgccggcggccggatgccgctcctccgctcattcagctccgccggagctgctccaaacaataaaaagcatgatcatttgcctcaatcaaaacatatcgtggatgtggagctggagctgtctcgtatccctgcgagcattaggccacaagtcaagacctggtatgaccggcattttcctcacgcagaacctactgtgaacggggagtctggtatcagcaacaaagaacctgctagccttagggcacaagtcgaggagaagaaaatcgagctgttccatctgctatcgcagctggaatatagtggtgagaactccaacctggaggacgaaaggatactcaggcagcttccgccataccgtgaacttaagcacctagttaatggttacggaataaagctagtcgtgaaacggattgcaatagcttctgttctgagcgccattttcataacggcgatggtgaagatgtgaatccacaaagtttggtagctggaagcaggatgacgctgcaattatcaattcgtataagtctttctagggactcaagtgctagtgttgattcattttgctgtacgctaatttgcctgctactgtgtgagactgaagttttcaaatactgagtggtaactttttaaattctg

SEQ ID NO: 1458 - DNA, 1433 bp, Oryza sativa
  ref <308>: DATABASE ACCESSION NUMBER: AK059492
  ref <309>: DATABASE ENTRY DATE: 2001-12-06
aaatactgagaagaagcttctcaggatggatgccatggccccaagattatcgatcaatggaaactcgtcgatcaatgggaactcatttaccatatcatccagtgtgaataagcaaagatttgtcatcgagaaatcaaaagatgaatatatcagagatgtgcagagttgcctggattacataagagacggagaaagctatgaattgtgcttaactactcagatgaagagaagaacggattatatggatgctttgaaactctacctgaaattgcgaaaacaaaatccagccccttatgcagcttggcttaacttctcctcagaaaacctgagtatatgttgctcttctcctgaaaggtttctgcgactagaccgaaatgcaattctggaagcaaagccaatcaaaggtactatagcacgtggcagaacaccagaggaagatgaatgcctacgtttgcagttgaaatacagtgaaaaagatcaagctgagaacttgatgattgttgacctcctaagaaacgatcttggtaaggtttgtgaacctgggagtgtgcatgttcctcgcctcatggatgtggaatcatataaaactgtacataccatggtaagtaccattcgtggaaccaaaatgtcggacctaagccctgtcgattgtgtaaaggctgcctttccaggaggttcaatgaccggggccccgaaagttagatccatggagattcttgattcacttgaaactagtccgagaggaatatactcaggatcagttggattcttttcatataacaagacttttgacttgaatatcgtgatcagaacagttgtcctgcacaatggagaagcttcgattggggcaggcggggctattgtagcattgtcagatccagaagcagagtacaatgagatgctgcttaaagcaaaagctccaacaaaggtggttgaagagtgcagtcaacaaatatacaacccagatcgttcggattcaatgcagacaaccgtaagttagaatggagggtgaaaacgagtcttcttatgaaaacacaaccagcattacaaggtttggtatacaatgaccatcagtttggatctgaaaaattcgatctccgctgttggtgcacatattaatggctaaactacaaggaagtcgcagcacacctattctataattgggaattctaaaagcaacaaaaggacattttgctgaaagaaaggtgcctatgccaaggtggtgaaaagcacattggagcaaaattcatggtgtactacaatgtagagttagactagattacagctgacatgccttctccacaaaacaacagtgcacatgattttattgattgattgattcccctattgtggtgattgcactgtgtaataataataaactgataaaagaaagaaacccatactgaaatgcatttcatagcagattcatatat

SEQ ID NO: 1459 - DNA, 741 bp, Oryza sativa
  ref <308>: DATABASE ACCESSION NUMBER: AK059493
  ref <309>: DATABASE ENTRY DATE: 2001-12-06
agcctcacaagcatcacctcacatcaaaagaaacacagtagccttccagaacacacaaaaacaacagtcacttaccatggcttcttctggttgtcatcttctggttctgctcctggccttctcagccttccattgcagctacgcagctcgtcatcttttggacacagcagctgcagctgcagcaccagaggcagccccagctcagccctccatgccaacagttccaaccacgctgcctccgataccttccatacctgcagtccccaagctgacagtgcccccaatgccatctgttcctatcccaaaggttaccattcccccaacagccgctggcacaattccatctcttccaattccggccattccgaccaccataccaaccattcctacagttcctgttaccctgccaccaatgccctcaatcccaaccactattccatccattcccaccacaatcccgacgacgatccctaccattcccgggttccagatgccaccaatcccattcatgtcctcacctcccaaaaccactagcccctgaagttcttcaagaggatgagactgatattcatggttactagtcagggatttggttaggcatatgttgccatcatatcagtgtgtacatttatttgtgttctgttattggagttatactggcttgcattggtgtgattgtaaatgcagctaggcagttgtactatcatgtttgtgaataaatcatttcttggtttgcataac

SEQ ID NO: 1460 - DNA, 1809 bp, Oryza sativa
  ref <308>: DATABASE ACCESSION NUMBER: AK059494
  ref <309>: DATABASE ENTRY DATE: 2001-12-06
gtttcttcccttcgtcctcgtctcctcgacctcaccacccgtccatccctacctacctccctacggattggtcgccatgctagagaaccagaggcaagcggaggttctttggccgaggctggtggcgaacaagctcttcaggaagccatccggcagccatgccttcgtcgccgacttcccgatggccgttgatgacgacttcgatggcgaggcggtgccggcggcggtggagtcgttcgacgacgatggttgcagccccgacgccgacgcctgccgcagcgtgaagcggccgcggccgcggccgcagcagcgagcgagcaacaagacgctcaagtacaggctgttcgcgagcacgtggaacgtcggcggcgtcgcgccaccggacgacctcgacctgtcggactggctcgacacgaggaacgccgcctacgacatctacgtcctcggattccaggaggtggtgccgttgagcgcgcggaacgtgctgggcgcggacaagaagcgcgtcgggatgcgctggaacgagctcgtgcgcgcggcgctgaaccggtcgtcgccgtcggcgccgaactcctcccgtgaccagagagaggccaagggcaccggcggcggcgcagccgcagccgcagccggaggaggggagataaagcagcaggcggcgcagcagaaggttcacccggtgcggggcggcatcggcggcggtggcggcgagctcgcctgcagggactaccggtgcgtggtgagcaagcagatggtcggcatcctcctcaccgtctgggtccgcgccgacctcgcccgcttcgtccgccgcgccagcgtctcctgcgtcggctgcggcgtcatgggctgcctcggcaacaagggcgccgtgtccgtcaggttctggctccacgacacgagcttctgcgtggcgtgctgccacctcgcgtccggcggccgcgacggcgacgaggcgcaccgcaacgccgacgccacggagatcctctcccggacgaccttcccccgggggcactcgctcaacctcccccagaagattctagaccacgaccgagtgatcctgcttggggacctcaactacaggatctccctgccggaggcgaagacgaggttgctggtggagaggcaggactggaagacgctgctcgaaaatgaccagctgcgaagcgaggtggaatcggaaggaggcgcattccatggctggaacgagggtgccatcgccttctcgccgacgtacaagtactaccccaactccgacacctactacggctgcgcctcccatggcaggaaaggcgagaagcggcgcgcgccggcgtggtgtgaccggatactatggcgcggcgccgggctgaagcagaagcggtacgaccggtgcgagtcgcggctgtcggaccaccggccggtgagggcgctgttcgaggtggaggtgggggcgccgaggaggaacctcaactcgctgcggagcttcttcctgtcggagaggttcgacggcgggaggagcgccgccgccgacctgctccgggaggatggcaccgccagcagcgcgagattcggcgacaccatttgatgctttcttgcagataaacagagagaggatcagtggaagaagaggatgagagatctagagaaagagaatcagagagacagagagggtgtaatgtaaattgattattctgtcctgagtaaatgttcgtatataatctgcagtatagctaggatacagactgttcctgacttcctgtaactatacatatgtactcttcatgatcagaaattcacaataccagatcaatttgtctagaatttgcttgg

SEQ ID NO: 1461 - DNA, 1551 bp, Oryza sativa
  ref <308>: DATABASE ACCESSION NUMBER: AK059495
  ref <309>: DATABASE ENTRY DATE: 2001-12-06
agatggcatttggtgggcgttatgttatccttctgatggcattgttctcaatatactgtgggcttatatacaatgagtttttctcagttccatttcatatattcgggaaatcagcgtatgaatgtcgagagaaaacctgcagtgatgcacatactgctgggctcattaaagtccgtgatccctatccttttggagtggacccaagttggcgtggaagtcgatctgagctaccctttctaaactccttgaagatgaagatgtctatactaatgggtgtaacccagatgaacttggggattgtattgagttattttgatgcaaagtttcatggaaatgctcttgacataaggtatcaattcataccacagatgatctttctgaacagcctctttggctacttagcactcctaattctcatcaagtggtgcacgggctctcaagctgacctatatcatgtgatgatatatatgttccttgatccttctggcaatcttggagaaaatcaactattttggggccagaaggaacttcagatacttttgttgcttatggctattgtagctgttccgtggatgctcttcccaaagccttttatcttgaagaaacttcacaaggagaggtttcaaggtcacacctatcgctttcttgggacctcagaaatggatccagattctgaaccagactcagcccggtcacgtcatgatgacttcaactttagtgaagtttttgtgcatcaaatgatacattccattgaatttgtacttggcgctgtctccaatactgcatcgtatcttcggctttgggcattaagtttggcgcattctgagctatcaacagtcttctatgagaaactgctggtacttgcttgggggtatgacaatcttgttgtgaagttagtggggcttgtaattttttcttttgctactgcctttatattgctggggatggaatcattgagcgccttccttcatgcacttcgtctacactgggttgagtttatgaacaagttctaccatggggatggctataaattcagacccttttcattcgctctgctagctgatgacgaagactgatgcatacaaaattcagcagataaagagattaagcttgtttcttgccatttttggagcacgtgagtggaattctttcgaccaagatgggtttccccaatacacagcattttgtcagaccgccgggcttcttccgaacgcatgtgtgcagtcctggttgagattgccagcgtggtgggaggagattttgtaagttcacggcaatactgtagagggcaggtttctcgtacagttcctccagtggagaagcagattatagatgctaacaacaaagatagaaatgtagatttgctatgtctacttttagctcttatactttgtccaagtgactgtcccagtatcccttaccacttgaaaatggaagttgcagtcgttttttttaatcattacgtgattaggttgtaacgaagggtgacaattattgaactacaatgtttgtcaattcaaataagaaaagctaaagcatatatggtttccc

SEQ ID NO: 1462 - DNA, 1677 bp, Oryza sativa
  ref <308>: DATABASE ACCESSION NUMBER: AK059496
  ref <309>: DATABASE ENTRY DATE: 2001-12-06
acgcgcgcggggacagccttccgacctcctcccctctgatccggcgcggccatggcgtcgagcgggagcagcacggtggtgggagagatggagagcagcttggagcgggtgaggcggcagctctcgtccacctccagccgccacctccttcagggccctctcctgaagcgatccgatacactaagaaaatggaatgaacggtgggttatacttgatcctgcaactggaaagatggaatacaagattcgtagaagtgatgcagctgtgaggggaataatagtgtttgattcaacaagcactgtgacgttgtcgccaatgaactttcatggactgccgaaatatgatggatgctgtttctatattggaaccccacagaaaaaggaatattttctttgtgcagaaactcctagtgctgcaagagcttgggtgtccactttacatgcttctcagttggtgctacaagctcacaaagaagcagtgaattcgttgggtggaaatggtcctaccaaattgggaaaagttgctacagttgtggctgtggccaatgcgactgcaatcgaagcatccaaagaggtagaggcagcgatgaaggtatccctgcgggcagctttgggctcaactacaaataaactcagtaaaggtcaattagatgatctcactataatgatggagacccttcgagttaaagatgatgaacttcaccagttattgcaagatatccgtgcacgtgatgcaaccatcagagagattacagataaattacaggagactgctgaagcagctgaaactgctgcttctgcagctcattcaatagatgagcagagaagatttttatcttcagaacttgaacgcctgaaacaagatcaggaaaaacaaattgaattttcattgcttaggttaagggaatcggaagaaaaggcaaagcttctttcagaagagagggagcatttactcaaggaaagagattctgctcttcaagaagctcaaatgtggcgttctgaactaggaaaagctagaggaaatgctgtaattttagaagcagccgttgtgagggcggaagagaaagcaagagtttcagcagcagatgctgatatgcgaataaatgatgctgcgagtagactcgattctgcgacaaaagaaaaggaagaactcgtagctcttgtggacgcgctacagttgcaaatacgaagccaagacactagcacaaaacaagtctgcgaggagaggtcggagctgtgctccacgtcttcaaagcatgtagacatggaagatgataatgtggataaagcttgcttaagtgatacagatccaatacccattactgagaacatagttgatttggatgatgatggagtcgatatccctacaattggggtcacggagtggaataatcctcattcttctgaagtatctgatgtaagagaagtaaccactgaacctgaagataacagcttggatattcctgttgatagccaaccagtatctgagaatgctttccacggttaacctggcttgtttctattcttaaccccgttggcttgtattctatgttctcattttagttcattgcaaacattcatatattcaaattaaagctcgctatgagctcatggactttagttccacaacgtgttcactgtatccaagtggaataaaacagtgcaattgtgggtgtgt

SEQ ID NO: 1463 - DNA, 1243 bp, Oryza sativa
  ref <308>: DATABASE ACCESSION NUMBER: AK059497
  ref <309>: DATABASE ENTRY DATE: 2001-12-06
gaaaaagggaaagcatatagactctacacctggaacaccatgcccgccatgccaagaagttgttttggtgccatgctttggacatcatcttggccaagaacgtgcaatactttgctccaaaaggaggcagtttccatgtcagaatttatgtggtaaccctctcaactgtggcaatcattattgtacgaaggcttgccatgtgttacagattccattgagtcagcctgaaggagatcaatcggctatactgtctcttgctagtgcaagtgcattcgctgagccttgcgaagaatgtaacctgccttgtcaaagggtcagggagcctccatgttcacatccctgccctttgccatgccatcttaacgattgtccaccttgcaaagcccttgttaaaagaccatgtcattgtggtgctatggtacacgcttttgagtgcatgtattataacaacttaaatgctacaaaacagcagaaagtaaggtcctgtggtggcccatgtcatagaaaattaccgaattgtccccatctgtgctcagaaatatgtcaccctggtcagtgcccatcagttgatcagtgcatgaaaaaggtcaatgtccgttgtgcatgcaacaaccttaaaaaagagtggatatgtcaagatgttctgaaggaataccgtcagtctggtcgtgacccaaaacaaatacctaaaaatcaatatgcagttggcctacttgcctgtggtgaagattgtgttaaaaaggttaaagctgcagattctgagttgcatctccggaaaattcaggagatcaagacccctgctgtggaagttgaaaatgtgcccaagcgcaggaagaggcgtaaccgtggccaagaaagtgttgaaagctcaaaattccaggaaatcaaagctgttgcgttgaaatttctcctggttatttttctgtgcataatcgttgtagctggattgtaccttttgtggaaaggtgtttaccggctttctgattggatgaatgacatggaggagcagagggccaggcagaggcatttgaagcctggaagattgtaaattaaagactacggagggtgtttgtggaatattcacaactgagatgtgcatcggttcaccgtcagggattggtttcggatatatggtagtgaaagatgtcatcattttgttattggagccaagccccggagtttgtaactagtttggtctcttgtccgaagctactggttaatggaaactaaagttatccgtgtc

SEQ ID NO: 1464 - DNA, 1573 bp, Oryza sativa
  ref <308>: DATABASE ACCESSION NUMBER: AK059498
  ref <309>: DATABASE ENTRY DATE: 2001-12-06
aatgggcggagacggtgttgaagatgtagttattgcttgcaactcaactaagaaaattaggagtaacagcaatgctggcatcgcctttggagcccccggaggtattatatgtgctaaggcatcaatgttactgcagagtgttcctccagcagtactggttcgatttctgagggagcatagatctgaatgggccgattacaatattgatgcatatttggcttcaactctgaaaacaagtgcatgttcacttactgggttgcgacccatgagattttctgggagccaaatcatcattccacttgctcacacagttgagaatgaggagattcttgaagttgttcgccttgagggtcaacctcttactcatgatgaagctcttctttcaagggatatccacctgcttcagctctgcactggaatagacgagaagtctgtgggatcctcctttcagcttgtgtttgcaccgattgatgatttcccagatgaaactccattgatttcttctggcttccgtgttataccacttgatatgaaaacagatggtgcatcctctggtaggacattagatttggcatctagtcttgaagtaggttcagcaacagctcaagcctccggagatgcatctgcagatgattgtaacttgcgatctgttctgacgatcgcttttcaattcccttacgagttgcatctccaagacagtgttgcagctatggctcgccaatatgtccgtagcattgtttctgctgtgcaaagagtgtcaatggctatctctccctctcaaactggtctaaatgccggacagaggataatctctggtttccctgaagcagcaacccttgctcgatgggtttgccagagctaccattaccatctaggggtagagttacttagtcaatcagatggagatgcagaacaattgttgaagatgctatggcattaccaagatgctattttgtgctgctcattcaaggaaaaaccggtgtttacatttgccaacaaagcaggactggacatgctagaaacttcccttgtcgccttacaggacctcacattggacaggatctttgatgagcctggaaaagaagcattgttctcaaacattcccaaattgatggagcagggccatgtctacctgccatcaggcgtgtgcatgtcaggaatgggtcggcatgtttctttcgatcaggccgtggcttggaaagtgcttgccgaggatagcaatgttcactgcctggccttctgtttcgtcaactggtcctttgtgtgaccatcccacatccactgcgaagtgaagattcatttttgcttgttcaagactgttttgcactagatctagacctgagaatctagtagtatttgcgaaatttctcgcttatgtaaatgtaatctcgctcccattccatcaagtacccaagtacaaggcagtggccaagtggttttagttgtagggggatcggagcaatcctgacggttgggtacttgggttccttccagcaatgtaaaatcggatcctgtagggcgtcgaaaactgcattggcaagattcttcgaaatgcagaccaaatttagctagt

SEQ ID NO: 1465 - DNA, 1200 bp, Oryza sativa
  ref <308>: DATABASE ACCESSION NUMBER: AK059499
  ref <309>: DATABASE ENTRY DATE: 2001-12-06
tgaagctgtcaggaggttgccaacttccagaatgtattccctgtatgcaaaattttggatgggtgttctgtttgctgatacagaagattccatctcattgtttcatggcggtgaatttgatgcttcagggttcacttcatgtatactgaaagtctatcaaaatgccgaatcaagcggttgtcttactgaagatcttgcttgccaatatgtgtctctttatttgagacttggaggtttggaggaggcacctggaagattagaggaagctaggaatcttgccaaaaagctctgcaatggtcctctttcacatgctgcggatttgtggaacctgagagcatctattgagatgaagtcacttgctacttctactggcatttcttcgttcagcaaggagaacttgagttctctatttgatctatttaatgttgcacttccaaagttacccatacctgaggctgaggaattgtggcacacggccatgaaattgttttctcatgagaaggtttatttcgaaaagctggtgaaatgtgcaatgttatcattaagttctgctggtggaaatgattgtggagcttcggtttcttctgctattgttggatggattttacaaagagatggtatcaagcaagctagaaagatgtataagagatttctggctttaccacgtccaagcttcaagttcttccagtactgcatagagttggaaacaaaccttgcatcaatcggaaaccaagacagccttgtgaatgctcgtaagctgtatgatgcagcgctcgatctctatccccaggaaagagaactttggaggaactactacaacatggagctgaagttgggaacatcagaaacagcaaatgctatatactggcgcgctcgtaaggtgctcggtgattccagtgccctggacattccccacagctagcaatgtgtgacttgtgtatcatgcaatatcatttttgatctgatttgattactttgttgtttaagcgtatcaagtcaagtagcgcggtggaagaaaattttggctagtctatctgttggatttgtgttatgagcccctaactagggttaaaatttgcatgctctgtatgattgccgattaaaagcttgtacagatacggcgatagtggccgatccccgaaacatactactagctattggtgtttgtgtcaatttagtttgtgccaagcttgccttgac

SEQ ID NO: 1466 - DNA, 1150 bp, Oryza sativa
  ref <308>: DATABASE ACCESSION NUMBER: AK059500
  ref <309>: DATABASE ENTRY DATE: 2001-12-06
agtgcatctcatccttttggagagcagccaattaatggaattccaaacactgaggcagctgttgaggttccttcattaaaggacacgttgaacattaagaatgaaattccagttgcagagaaagaggttcattcccctctggaagaagacccagttgttattcctgcacccccttaccctgtcaaggaggctccaattctcagagaagttcctgtgcatatttcccctgtcagggagacttcattcctgagagaagttcctgcacccgtatccccagtcaaggagactccaatcctgagagaagttcctacaccattgaaggagacacctgttatattgacagaatctccaccccctccaacagatacctcttccattactgtcgaatctctccatcctttcgaacaaaacctagcaagtttgaaggaatctcctctagaagaaactcttccaaaagcagctgtcgtgttaagtgagcaaggggctgtcaatgtgcagagtcgtcaactatgccatgtaacggaagatgttcagaacctgaagtcaaagctcaatggtctcgaagtaaaattggaagaggctgaaaaaatgataataaagctgagagaagagagcagaactaccacccaggagcgggataagttacagcaagaaatgatgtttctacgaaagaagggaacaccaaggaatcaagttggtttccccttgctgtttgtggtttatgtggcacttcttggtacttctctgggttacctcctgcgcttatgaggtcaagttcttccaaaaacccatcagctggacacttcagtttgtcacaagaattggagggcagctacgcatcaatcttgaaaggggagcattccttagcatcgtatttcactagccattatggttttgcatataacaaaggtaccaattgcctgcgtgcatagaacagcttttacatctgtacagaaccgtccaagagatgctgctggctcagtagactaacccgggatttcttttctctcccctcactggggtttttatagtgtgttggattcggttctttcttagaatcggtgcagttttcttcgttgttttccttttcacctgggctggtgtcagtttgaaaactgtcaggttgtatttgatttgacatttgtaaggc

SEQ ID NO: 1467 - DNA, 886 bp, Oryza sativa
  ref <308>: DATABASE ACCESSION NUMBER: AK059501
  ref <309>: DATABASE ENTRY DATE: 2001-12-06
aaggccagtggttgtcttggagaagcttgatgttattccagagcataatctatatttccaggtttactacaggttcaacaacatctctctactcagagaaccgatgatgttgatatggcttctttctcctcttcatggcctgtattgtttacatgcgcactgacatgtcaatctctaagaattctccttcttatctggcaaaggtgcagtgggatgaggtacagagcatcatccagcaaatccaggctatcttcaaccaatgtctagcagctcatgataaactggagacctcattacacgagttatctaggtcaggagatgttaaatcatgcaaagtggctcgtaagacagctgatgcacagtttaaggaattagcaaaagagttgaagccattgttgacatccctgcagtcatcctctcagtcttaccagatatggccaaaggtagaggaattggttgccaaggagagagagttgcaggataagctcatgacaaggcattccactgtggttgacagctttgaaaagaagttgcgagggcaagatgtggagaacaggattgctgcccagcagcagaaagttgctgccctgaggcaagaggtcgaatctcttttagagtacatcagtgagatctgagcgaatccggcgctgcatggtatgtcaatttagcaattagactggagaatggatcacctggtttctcattgtgcgaatttgatatgctcgaattcgaatcaaatactcgtagatttcctgttgataacctgtctcagtcattcaggctgggagtttcaaaggaccttgtaacatgataagcacttgtgaccgcctgaaactgattgaaattttgcacttaatagcaaatcacgcgacctttcaccttgttt

SEQ ID NO: 1468 - DNA, 709 bp, Oryza sativa
  ref <308>: DATABASE ACCESSION NUMBER: AK059502
  ref <309>: DATABASE ENTRY DATE: 2001-12-06
agctaaaccctgtcccttgttaattcttcttcttcttcctaactactccaagctagctcagaatcagatccatccatggcctcctccggctccaagtccaagaccaacaatggcttcttcgtcccttctcctgcaactgcaatggcgccatgcttcctcctcttgctcatcttcttcttcctccatgtcgatgcttctgctgctgctgcttcttcttcttcccatccacagctggtgcagcagatgcaggtgaagagggcgagatccctcctgcaggctccaaagatagactgccaggggacgtgctcggggcgatgcgccaacaactggaagaaggagatgtgcaacaagatgtgcaacgtctgctgcaaccgatgcaactgcgttcccccgggaagtgggcaggacacccgccacctctgcccttgctacgacaccatggttaatccacacaacggcaagctcaagtgcccatgattccttccttcctattagctgctgctattgctctcagagagatcagagtacaatgtacttggtagtatgtgtacgtatgtgttccatgcatcttgatgttcaatccctacatctctctggctgtcactactagcttagctactacataggactgctctatataatagatgcctttctactttcttcaatctccagcaccaggaataaaacaaacatatcatgattctcttct

SEQ ID NO: 1469 - DNA, 1159 bp, Oryza sativa
  ref <308>: DATABASE ACCESSION NUMBER: AK104080
  ref <309>: DATABASE ENTRY DATE: 2002-08-28
acggccacaccacccaccaactgagagctgagcaggcgagcgagcggacatggcagcatcgctccaagccgcggccaccctgatgcagccggccaagctcggcggccgggcctcctccgccgcgctgccatcgcgcccgtcttcgcacgtcgccagggcattcggcgtcgacaccggtgccgccggcaggatcacgtgctccctgcagtccgacatccgggaggtcgccaacaagtgcgccgatgccgccaagctcgccggcttcgccctcgccacctcagctctgctcgtctcgggcgccagcgcggagggcgtgccgaggaggcttaccttcgacgagattcagagtaagacgtacatggaggtgaagggaaccggcacggcgaaccagtgcccgacggtggagggcggcgtcgactccttcgccttcaaggccggcaagtacaacatgaagaagttctgcctggagccgacgtccttcaccgttaaggcggagggcgtggccaagaacgcgccacccgagttccagaagaccaagctcatgacccgcctgacctacaccctcgacgagatcgagggcccgctcgaggtcagctccgacggaaccatcaagttcgaggagaaggacggaatcgactacgccgccgtcaccgtgcagctgccgggaggcgagcgcgtgccgttcctcttcaccatcaagaatctggtcgccaccggcaagccggagagcttcggcgggcccttcctcgtgcccagctaccgtggttcgtccttcctcgacccaaagggccgcggtggctctaccggctacgacaacgctgtggcgctccccgccggaggcagaggagacgaggaggagctcgctaaggagaacgtcaagaacgcctcgtcgtcgacgggcaacatcacgttgagcgtcaccaagagcaagccagagaccggcgaggtgattggcgtcttcgagagcgtgcagccgtcggacacagacctcggcgccaaggtgcccaaggatgtcaagatccaaggggtgtggtacgcgcagctcgagtagggaatgaacaaatgttttgtgcgtggccgggttgatatatcgatacatggagagagggaaggaaggctgcaatgtgtgtatctagtaatgcaaactcgatcgggctgt

SEQ ID NO: 1470 - DNA, 1232 bp, Oryza sativa
  ref <308>: DATABASE ACCESSION NUMBER: AK059503
  ref <309>: DATABASE ENTRY DATE: 2001-12-06
tgtcctttctgaatcgagcctctttgtgtacccatacaagattgtgatcaagacctgtgggactaccaagctcctgctcgccattccgaggattcttgagcttgctgaagagctatctctgccacttgaagctgtgaagtactctcgtgggacattcatttttcctgaagcacagccctctccacacaagaacttctctgaggaggttgcagtcctgaaccgctacttcggcggtctcaaatctggtggcaacgcatacgtgattggagatcctgcaaagccagggcagaagtggcatgtctactatgccacccagcacccggagcaacctgtggtcactcttgagatgtgcatgactgggctggacaagaagaaagcttctgccttcttcaagacttctgctgatggacacacaacatatgctaaggaaatgaccaagctctcaggtatctctgacatcatcccagagatggaagtctgcgacttcgatttcgagccctgcggctactccatgaatgccatccacggccctgctttctcaaccattcatgtgactcctgaggatggcttcagctatgccagctacgaggtcatgggcttcaaccctgcttcccttgcctatggtgaccttgtcaagagggtgttgagatgctttggcccgttggagttctctgttgcggttaccatctttggtggccgcaaccatgcagggacctgggccaaggggctggatgtcggggcctattcttgcagcaacatggttgagcaggagctgccttctgggggtttgctcatttaccagagcttcactgctactgctgaaatcgccaccgggtcgccacgatctgttctgcattgctttgctgatgaaaacacggagaaagctggtaaaatggaggctctctactgggaagacgatgctgtcgaggagatagatggcacagagggtaagaagatgaggagctgctgatgagggaagcgcactgaagattaaagaatactcaaaactccagtagcgatcactctgttactttgtgaagcagccagccagactattcatatagtactagtatatgctatgaccaatgttctttattatcttgcatatattctgaataaaagggctctaggtggtctgctttgtctgccacagtgagcaaaatgtatccgaatatcaaactttaatgttgggaatataatacaagtcattttataataatgtcggcattgtc

SEQ ID NO: 1471 - DNA, 1796 bp, Oryza sativa
  ref <308>: DATABASE ACCESSION NUMBER: AK059504
  ref <309>: DATABASE ENTRY DATE: 2001-12-06
aacgcttcgcgaatcgcaaatccctctcgcttctctctctctctctctcctcgcgccgccgccgccaccgccggcgccgcggccatgggcgactacggcagcgggatgatgcgggggaacccggacggcggcgggatgcagtcccgcacctagggccagcgcgtcaacgtgcagcagctcaagctgatggggcagggacacccgacgggcctcacccccaacctgctcaagctcttcgagccccgcccgccgctcgacttcaagccgcccgtcgagaagcgcaagttgccggcctacactgggatggcgcagttcgtgtcgcagtttgcggagcccggtgaccctgagtacgcgccacccgtccccacatgcgagaccaaggctgaaaagaaggataggatccgcaaaagtaagcttgaccaaggtgcggctaaggtggctgaagagcttcagaaatatgacccacagagtgaccccaatgccactggagatccatacaaaacactctttgttgcaagacttaactatgagacgtctgagcatagggtcaagcgggagtttgaagcttatgggcctattaaaagggtacggcttgtgaccgacaaggaaacaaataaacctagaggatatgcattcatcgagtatatgcacacccgggacatgaaaaatgcttacaagcaagcagatgggagaaaagtggacaataggagggtgctagttgatgtggagcgtggtagaactgttccaaattggcgtcccaggagattgggtggtggacttggatcaagcagaattggtggtgaaaatgctgaacagaagctctccactagggatcagcagcacgctggacgcccaagatcggaggagcctaggagagatgagcgtcgtgcagatagggaccgcgagaagtctcgtgaaaggccacgggaaagagatcgtgatgagagaactcgtgaacgatcccatgaccgtactcgcgagcgtgattcaaaagaagatagacaccaccatagggatcgggacaggactcgggacagggaacgaggaagggaccgggagagagatcatggtcgtgaccgtgaccgtgagcgtgatcgtcgtgatagagatagggacagggatcgtggtcgggattatgagagagaccgtgaccgtggtcatgatcgccatcgtgagagaggcagggaccgtgagagagattacgagcgtgcaagtcatgaacgggaccgtggtcacatgcatgagagagatgctgaatttgccaacggtgagccaaaacatgatcaggaatatggctataactatgagcaacacaaaagccatgatgcttatgagacggagcgctcaaagcgacatgagcatgagtactatcagatgcaacctaacaacacagaacctgaaggccctgaagagggcgaggcatatgatgaaggtgactaccagtatcaccaagctgctgatgagcacaataactgaaatttgattgctgcactgcttgaacggttgttctaggtgctcgtcattgttgccaaaagaggcagaagcatgtttacttgttgcctggcgcttgagctctgccgctttgcaaggctggatatgtaataccggtgttactgtctgttgttccttttgtggtttgggagttaagatgtttttgcacttccctgcttttgtattgtatgagacgctagaacttgttttggattcatcttttgcttcagtactctgttcagaaaggttttgtaattcgagcacatgaactacagttatttcgtatggaattccaatattgaagt

SEQ ID NO: 1472 - DNA, 940 bp, Oryza sativa
  ref <308>: DATABASE ACCESSION NUMBER: AK059505
  ref <309>: DATABASE ENTRY DATE: 2001-12-06
aagaaaaaactccatcctaccgccgctcgcgcccctctcgccctcgcgcgccgccgccgccgcccgccgtcgccggagctaaacccctcgacgccgccatggggcgcatgcacagccgcgggaagggtatctcgtcgtcggcgctgccgtacaagaggactcccccgagctggctcaagaccgccgcctccgatgtggaggagatgatcatgaaggccgcgaagaagggtcagatgccgtcgcagatcggcgtggtgctccgtgaccagcacggaatccccctcgtcaagagcgtcaccggcagcaagatcctccgcatcctcaaggcccacgggcttgccccggagatcccggaggacctctacttcttgatcaagaaggctgttgctattaggaagcacttggagaggaacaggaaggacaaggactccaagttcaggcttattcttgttgagagcaggatccaccgcctcgcccgctactataagcgcacaaagaggctcccacccacctggaagtatgagtcaaccacggccagcactctggtggcctaagagaacactggcgtgctcttagatgcttcgatatggacctggttctagaaatcaatttatgtactgctttgagtttggagcgagttagacgtggacaagaaactgcaagtttttctatgtttactcgggggatcctataaaccatttttggtttcacaattctgtctgttaaacatgcatcggtattttgttatttacaattagctgttaccttaccataatgttcggcatcgtttgcatccagctctatcccgtactttggtattgtgtttgaactcatcgtacgatgttagttcataattctggttgatcgaggctaatttgctcacaagcgcttctcatagaacttttcacaatatttgtgagagaaatccggtgctatgaat

SEQ ID NO: 1473 - DNA, 563 bp, Oryza sativa
  ref <308>: DATABASE ACCESSION NUMBER: AK059506
  ref <309>: DATABASE ENTRY DATE: 2001-12-06
ccgaagttctttgaaccatatgaggttgcagaacgtattggctctgtggcttatcgtcttcttcttccgccgggtgcttggttgcacaatgtcttccatgtgggtctgctgaagccttttcgaggagtaccgccagcttcggtaccgccgttgccaccaactcaacatggggaagtttgtctccagccggcgttggttttgcagagtcgtttggcccgtggcgttcgtgaagttttggttcagtggaaagacaagccagctgcggatgcttcctggatggcgctggatgattttcggtcctggtacccagattttcagcttgaggacgagctgcttctccagggagggagagatgtcatgtgggacttcaataccagcgccgccgccgcaggtctcctagcgccaatgcgtgacggcaaactgtttcgttttccttttggattggagtttgttatggagtttgttagtttttatctcttggtttgttaggactttatcccttagttatgcatattctgtacgtgagtttagttggaatcaatcaatcaagttcagattaatct

SEQ ID NO: 1474 - DNA, 1198 bp, Oryza sativa
  ref <308>: DATABASE ACCESSION NUMBER: AK059507
  ref <309>: DATABASE ENTRY DATE: 2001-12-06
aaaatcccctctcccccccaatcctcaaagatgccgtcctcctcctcctactcctcctccgttagcaaccctggtcccgagctacctaggtcagcgcgccaagaaccatgctcttgtctcctccagctccaccgccgctgaagccgcccgtccgcctgaatcgactcccgcagcggcagccgggaggcggcggccggttcttgctgccccggaggaggccaagaacgccgcggtcctttggcgtggtggtgtgcatggcggagatggccagggttgggaccgggtcctcgtgggaggaggagttgggcgtcccggaggagagcgacgcgatcctgggaggcggaggcggggacgggcaaaggcggcaggcgaccaggtgggagctcgtcgaggcgagactgaaccagacgagtaaatggctggtcgcgggttgttatacttctgcagccatttggaagcatgatgctcttattatgtgggctatgattggtgctgttctaaactctatgttttcaaatcttcttaaacggatattcaaccatgaaaggcctgtgtctgctttgcggtctgatcctggaatgccttcatcccacgcgcaatcttttctctattctgcggtgtttctaattctttcattgttctactggctcgggagaacttatctgtcagttattcttggggttgcaattctagcaatgtgctgctatctttcgtggttacgagtgtcgcagcacctccatacactgaaccaggttcttgtgggtgctatagtaggatcagcctttggtgctatgtggtttgcgctttttaatttgctcgtgcaagaggcgtttgcttcttccgtaccggttcagattgcggtgactatcgggacggcaatattatgcatcggctttgtcatccatgtcgttcgccactggttcaaggatgagtgaatagcaatatgaaatcgcaatgaccaataggtgattgattgagacacaaaatcaactggtaacggaaggctctgtatactctatgggaagatcatactggaattatttgggagtgggttcgcaagatagtcacagatagcaacctcagttcattttttggcatttttgctgcaggatagtcacagcactgattcttgtaatacagaacagtttatgcttgaaatttcttccacgaaatgataatgatgtccttgctttgcgtc

SEQ ID NO: 1475 - DNA, 979 bp, Oryza sativa
  ref <308>: DATABASE ACCESSION NUMBER: AK059508
  ref <309>: DATABASE ENTRY DATE: 2001-12-06
aaacaatgcaggattgaggtggagaactgcttctccctctctgaaaatacagggtccatggtggacatgatcaatgtcgcggcacgatgtgcctttttactttgtgcaagtgagatttcatatgatgttggagaacgctacaatttcgcgagcattctgcttcatttcagatacacctgttgctcactgcacaaactcctggatatggatatccatgtgaggtcatcagagtagcaagttgatggatcatcgccatgatgctattgctgcatacggaagatgacctgatttatctataaatgatgcagtggtgctgatgaccaatgccatctctgcatcagtcaggtccaagtgaaagcgaaaaaaaggcttttcaggagacaagatcaagtgactggacggtcacaatgagagcaaactcgggacttatctttgccgtgatgatcctgataatgtgtggcgcatctgcagcttccagtgacaatgatgagctggtggcaccgttcgacacatccaatggcctgagaacgctgtgaacggccacttgggctgctaccccgggtgcttcagagactgtgttacaaggatgcctgaatgctgttctgtgaggaaatttgctgtcagcatggccgatctccttcggttcacgcatcagtaattcatctatttgcgttcagataacgttgtgaccatttctttcagtagcagtagcttgcgtcgctctccgcatgagtaatcttaagtctttggcaattcactgtaatatatactaatatgctcttccgcggggtcccccattttaattcttcaagccggcgaggtgtgtaatagattgggatggcctatggccgtgatctaagggcagttgatgtttgtgaattcagactgttcctgtcgatgtcatggaacgcattgtggacttgtgcttggttgtatgaggtgatgtttgattcactagcagtcactgttggttagatgc

SEQ ID NO: 1476 - DNA, 300 bp, Oryza sativa
  ref <308>: DATABASE ACCESSION NUMBER: AK059509
  ref <309>: DATABASE ENTRY DATE: 2001-12-06
aaaaaaaagcaatggaggtgagacaattccatgagatgggagctggaggtttccatcaaggcacatctttttgcatgatctgcagttgccaaatccaagataacaatctaggcgattaccttgacaacccgcacttgtgattgtattccgttatccatttttcgaggacttgtgtgcatatggagacctgatagagaaacagatcgtatgcatgctgtgtttctgttccaagtgatctaacctgtgtgagaggcagaaatctcatcactgaaatagaatgtaccttgacattgaagcgtc

SEQ ID NO: 1477 - DNA, 2055 bp, Oryza sativa
  ref <308>: DATABASE ACCESSION NUMBER: AK059510
  ref <309>: DATABASE ENTRY DATE: 2001-12-06
atcacaaatatcttcccataaagaaaccctaggtgctcattccaccgccatcgcctccggcgaactctccaccgccccctttcctacatcccaccactattttataagccagcccttcatctcatctggagatctggttctactcatccaggaaagccccaatctttatcatagcaaggaggtcatgtcggaatcggccctcgacaaacatatagtggtgaaaattcccgatcattttctgccagatgctttcataggagaaagtgttggtaaaggtaaagaagatggagcaaccgtagataacatggacccgtcccgcccttttctagttatcaagaagtctgatttggataaggctggtgagtgggttaaaataaaatatgcttggatggccaagtccttaacaaatgatataatcatcccagaccctacccctcaggtggtgcgggatgccttctttgatatatctccccgcttggactccgtcttgagaaaggacagtgtccggtgcttcttccgtttgttcgcggaatgtactgcggccatggcatttaagtgtaacatcacctcagaaaccttatcctgcattgtcaggcataatgccttgcgatgtgcgaaaactgtattggagggcaaggcacctcagctcagttgtatgcatgccaatccaaactgcattaacccatatggaatttttccactccatggagctgctgaacggttctctgttgacatgatcaagttgctgttctgccatggtgcttcagccaatttacacacagtcaatgatgctggcattcccggactactcccgctccatgttgcagttggaaatacttgcttgcataaatatctggaggacaatctatctcctgtgcagtatcatgaggattatatctacaagctcattcatctgctgtgtctacctgagatgaaggtttttttggatacagttagactgcttgctgaaaaaacagataatctagctgatgagctctggaattacatgaagaatgacaagcttgtagaatccgcagttttactcctggcagcccgaaaacatatccgtgagggcaaacctgatgggttcgacattatcgcgcaacgtatatatgaggactatgattccctagtgtgtgataaaggtgatactgcagaggggcagaagctgctggaggaaagaagagcacttttgaaatgtaaatgtctgattgtcactataatttcgcaagctggtgaggttttggataactacattcaagcacattcagaggtgcccaatgtggaggtccttgcgcgtgtttcatatattcttaaggaattcgggttttgccctaacgaagaatacattgacaccatgatcctctgtccatataacaagatttcttacagcgacatagttcacaaagatgtaaccaaggctgttgcacaaatgtctacttctctgcctgctgcagaaaaaaaggctgcgagaaaaaaggcacttaaaggatgggatccaacattcataaagagaaattttttcccctactggagatcagtattaggggcccagctgtctgtatccaatggagcagcagatgaaaagtcaatgcttcatcgtccacagttccgtaattcagtagtgagtaacgagtcttcgagtctgaaccataatattagtttcttgggaagaattcagcaactgagtggtactcatgaatcgagaaggtacagtactgctgcattcagaatgctcacgaaggtgctaaagacatgagcaaaaaggtgcctagtggcatgttgctgttgataaccataggtctgcaaagtattatgctgcgcacgtcttttgcggacaccttaagaaggttgcgaatatacatgtgaccaccaaaaccttgttcaaagtgatgctaagtactttaaattatgatgaaatgcaacatgccgtgtgttgtattcggcttgaaccctcgacccgcgagatgtggacatgcgtgccagcatgttgtacttgtaccaggttcaacgttagcttgaacactgaacaagttaaatgtgttgcaaaatgcc

SEQ ID NO: 1478 - DNA, 1422 bp, Oryza sativa
  ref <308>: DATABASE ACCESSION NUMBER: AK059511
  ref <309>: DATABASE ENTRY DATE: 2001-12-06
atccatcgtcctagctatctcacgtagtctccctctcccggtcttcgcgacgacgctagctttacacgttcgtgataatggcggcgctgctgctgctggcggcggcgatggtggtggtggtgttcgcgcacgcggcggcggcgcagcggtacaatgctatctacagcttcggcgactccatctccgacaccggcaacctctgcgtcggcggctgcccgtcgtggctcaccaccggccagcccccctacggcaagaccttcttcggccgccccaccggccgctgctccgacggccgcgtcgtcgtcgacttcctcgctgagcactttgggctgccgctgtcgccggcgtcgaagggcggcggcgacttcaagaagggggcgaacatggcgatcatcggcgccacctccatggacgccgccttcttcaagtccatcggcctcagcgacaagatttggaacaatggccccctcgacacccagatccagtggttccgtcagctcctcccctccgtctgcggcaacgattgcaggagctacctgtccaagtcgctgttcgtggtgggcgagttcggcggcaacgactacaacgcgccgctcttcgccggccgcgccatgacggaggtcagggactacgtgccacaggtcgtcagcaagatcatccgtggcctcgagacattgatcaggatgggcgcggtggacgtggtggtgccaggggttctacccatcgggtgcttcccgatctacctgacgctctatggcacatccaacggtgcagactacgatcgcaatggttgcctcaagagctacaatagcctctcctcctaccacaacacgttgctcaagagaagcctctccaacctccagaggacgtacccacatgccagggtcatgtacgctgatttctactcgcaggtcactgctatggtccgctctccccaaaacttcgggctgaaatacgggctgaaggtgtgctgcggggcgggagggcaggggacgtacaactacaacaacaaagcgcggtgcggcatgtccgggtccagcgcctgcgccgacccggccaactacctcatctgggacggcatccaccttaccgaggccgcctaccgctccatcgccgatggctggctcaagggcccctactgcaaccctcccatcctccactgatttattaatcctacatgtataatatctgcagagagatgagatgtgacccaattaattgtgcactgtttgcttaattaggccgaagtgtgtgtttgtatttgtgtgtgggttaattaatatttgttcatggggtttacttaattagagtttggttgtgatttggagagggtgattttaagcctgatgatgtatttagttggggatcgaatcaaactgatccaagtgaataatgaagctcaaacaagggcttttccatttt

SEQ ID NO: 1479 - DNA, 1349 bp, Oryza sativa
  ref <308>: DATABASE ACCESSION NUMBER: AK059512
  ref <309>: DATABASE ENTRY DATE: 2001-12-06
gtgaagcccctgcgatctaagatcatatcatttctccaccgtatggttgagatattaggcatttcggtgcttccatgtattccaattgcactgcgacagttgctcgttgataatgaggcaaaagatatgtcggaatttctgtacttaataaaccaaataatatgcaagtttaaatcttcagcaaatgccttattggaggatgtgtttcctgccatcgcaagtcatttatctgtgatactatcacacgatgccttttcaaatggttttgcaagcaatactgaggaaatgcgtgagctgcaagagctggaaaagagattttacgcattcttgcttcatatagcaacacatgatctgtctacagttctcctaactcctagttgtaggcattatctagagaacataatgcagttgcttttgattacttcatgcagccataaagagatatcacatcggaagacatgcgtacagacttttgtcaaccttatcaaagactggtgtagtagctctgaaattgaagataagcttcctggcttccgagtgtttatgattgagaagttcgctactggttgctgtttgcagagtgtccttgacaagtcatttaacttccgtgatggaatttcgattgccctgtttggtgaaatcatgatggctcaaaaggttatgtatgaaagatttggcgagaactttgttgtaaattttgtaacaaaacttcgagaagcacactgcccaccagaccttgctgaacagtactaccaaaagttacagggaaatgatatcaaggcattcaagtcattttatgaatcacttgtcatgaaaataagacaacagcagaatgggagtcttgtcttcagatagcgtcattcaattattttaaatctgtttgccagtgaaagattcctcagttctacaatttgaatatagggtagttgtatcatctatgtacataaagctctaccatttctgagatcagaagatgtatactgcgggaatatttttaccgagcctggctaccgtggcaaagttccttgatcaaggcatgttagtgagatgcaggggatacatccccagagtttctgctgtgagcatacagggtttcattatgtttgttttgatatttctctggaagtgatcattgttctgctccgagcttgaaattttttgtaaggcgattcgggtgaagctaaacagatgggataggcaaaagagtgatgtgtgggccgtgtttttcctgacagaaactgtcacaccgcctgttgtcgtgttaccaaattttggcagtggtttttcacccctttgttagctggggtgctgtacagattctttaatatagttgcgtcgttcgcattaat

SEQ ID NO: 1480 - DNA, 1380 bp, Oryza sativa
  ref <308>: DATABASE ACCESSION NUMBER: AK059513
  ref <309>: DATABASE ENTRY DATE: 2001-12-06
tttctgcatgctaacgcagccaagtccagcagcatcacaagtttcaagaaatttctcgataatgtgctcctgtaccgcaatcctgttccactgaagggactttgggtttctgccgcctgcgacaactctgatgattcccttgattattccgacatccatcgatgggttcatcatgttcttaggagcaatgcacgcgaagttggcatattcgttcgttgtggttccaagcttctttctatagatggttatccctttgctttcaactcggtgcacttgtctaagttggtgcttttcaagtttacagtaaatgactgttttgccaagaagttttcttctggttgcccggttttgaaggatcttgtgttgataagctgtggcatcgatgtcaccatgttttcctcaaccacattgaagagtttcgtcattcacaatgcagaagacattgaacatctgcccaaacaaattgagtatcttgtcatagaaatgccaaacttagttaccctgcatatagaggagattccaagaagaaatattcaccttgtggacttgtcgtcagtgaaagaggccacaatttacttttttgagcactcttttcgaaattccgctgttgactgcaatattctcagtgctctttcaaatgccacaagcttgaagctgatatgtgattctgtctatgatgaagtgtcaaaggtattaatgcgtgatcttccaaggtgtaaggcatttgacaacctgaaaaggttgaagcttggtgagtggtttctgagaaatggatgctatccgctactcttcttgcttcggtactcacctcacatagaaaaacttcgcctgcaacttaccaagcttggagctgaggagtatgagaagtttccaactgctgcagcagcaatagatcctccatgcaaagaagcagcaagaacgtttcattgtgaaaaacttacagagattgaaatcgtctaccctcagggcgataaaagggtgcacatcattgtgaggatattgattgcgaacattagccctctccctgaaattaaaatcaagccctttccgaaatccggattatcatggtgatctgtggattttggtgactgaggtgtctatctggctggattagatattctgataccaaggatgatgtttttggaagacttgttcagctatcctttatgttcatagtgcatgtctgcaggaaccaattatcagaacagcgagctcatcatcatcagacgaaccaattatgttcttagtttctgaacagccaagtgttctgaagcttctcattcctgtttacaatccggctgtttttctgtttcctgtatgacggtactttctcacttgtccatttcaagattgcgatttgcaaacttcttatgtgcgacc

SEQ ID NO: 1481 - DNA, 1295 bp, Oryza sativa
  ref <308>: DATABASE ACCESSION NUMBER: AK104081
  ref <309>: DATABASE ENTRY DATE: 2002-08-28
tgtttacttgctgtagaacctcagaataggggtactgctgcttcggcccttggaagcgaattcttcacgacaaagccttatgcttgtgatccatcaagtctacctaaatatcctccaagcaaggaatatgatgctaagcttcgagacgaggaggctagaaggcaaagagcagctgcagttaaaggacatgaatctgaagctgggcgtagaaagcaacttccagcaccaaatggcaacaacgaattgcagcaacgacgggttcagcttaatccaaaaagcagcagtaataagtttattccaaaggaggatgctgtcactggcttcccaattgatcctccaggaagagctggagacaatgtttaccctcagcgtgcgcctctgatgcatgctggtcgttcatcctctactctgggccgatcaagtggcactgatcagaatgctcagaggttttacacatctcaaattgctgctgctgagatgtctactgcaactggtgggcagcgaggcaatgccactaagctgtcctccaaccttggggagagtgccaggagacaatatttgagagagcatcgatctagttcaagatatagtcaacttgctgctgctgaaccctctgacagacctgaatggacacaccaattccaagaaagaccatcatcttcccaccgcaaagatgatggggcagcaaataaggaacctactgtggtgaatggcgctaagaagagcaggatccactactcaggaccattaatgcctcctggagtaaacatggaagaaatccttcgagagcacgagcggcagatccaacaagctgtacggagggcgcgcctcgacatgggaaagggcaagaatcacgtcgagagagaccagtcggaatcgcttctgtacactacccagaatggcagaccgtaggcgaaaaaaacgctcaggatcgcgattcaatgtgttgtggagcccccatttcagccatgaaaaacaatagaaagtagcgtatgtttctgcgccgtcaaagcggagaggtttctttctgctagatgttccacccattgcagtggtttggttttcaccagcaaaaggaaacctgttcctgtagagattcaccgcctgtccaagcttagcatagggcgtcgaaaatatttgctgaagatttggttgtccacagccaccaattgtatatctcgagagagtatcctccccttgaaattgattcttacacctgttttttggcagatgacaagagaaaaaataatataatggaagtacagatcattggtgccctctggtgtttaccttgt

SEQ ID NO: 1482 - DNA, 731 bp, Oryza sativa
  ref <308>: DATABASE ACCESSION NUMBER: AK059514
  ref <309>: DATABASE ENTRY DATE: 2001-12-06
catccagaagaagactatcaaagtcttgctagttgatagcgatgactccaccaggcaggtggtcagtgccctgcttcgtcactgcatgtatgaagtcatccctgctgaaaatggccagcaagcatggacatatctagaagatatgcaaaacagcattgatcttgttttgacagaggttgttatgcctggtgtatctggaatttctctattgagtaggatcatgaaccacaatatttgcaagaatattccagtgattatgatgtcttcaaatgatgctatgggtacagtttttaagtgtttgtcaaagggcgctgttgacttcttagtcaagcccatacgtaagaatgaacttaagaacctatggcagcatgtgtggagacggtgccacagctccagtggcagtggaagtgaaagtggcattcagacacaaaagtgtgccaaatcaaaaagtggggatgaatccaataataacaatggcagcaatgacgatgatgacgacgatggtgtaatcatgggacttaatgcaagagatggcagtgataacggcagtggcactcaagcgcagagctcatggacaaagcgcgctgttgagattgacagtccacaggctatgtctccagatcaattagctgatccacctgatagcacttgtgcacaagtgatccacctgaagtcagatatatgcagcaatagatggttaccatgtacaagcaacaaaaattccaaaaaac

SEQ ID NO: 1483 - DNA, 1341 bp, Oryza sativa
  ref <308>: DATABASE ACCESSION NUMBER: AK059515
  ref <309>: DATABASE ENTRY DATE: 2001-12-06
ccgaggcttgtcacaggaggaagtactttgggtacacttccattgccattggctgcttttgtgagcctaaccattacatacaaacttgacaaggcatcagagcgtttccttaaccttgccgggccagctttagagaaccttgctgcaagctgcccatggccaagcatgccaatcgtcgcggcactgtggactcagaaggtgaagcggtggagtgatttcctagtgttctcggcttcacgcacggtgttccaccataacaacgacgcagttttccagctcctccgaagctgcttcaccgccacccttggaatgtcgtctaccacatcagtatgcagctgcggtggcattgccagccttcttggtcacggcttcggctctcattgctccggtggcctctccccagtcgcgccgggaatcctctatctccggatattccggtgcatcaaggactgctccatactcgcggaagatatactgcgcctcctcatgctctcggtgaaagacatagccgaaacaacggtgtcgaggcaccgatccgacaaggtcaggaagaccaagtacgtgatgagacatggccaggtatccctctcttccgccctgacgcaggtgaaggtggcggcgtcgctcggcgcgacgctggtgtggctctccggcggcacggcgctcgtccagtccctgttccaggagatgctgccgtcgtggttcctgtccgtgcaggacctggggcgaggcggcgcggcgagcgggggcacggtgtacaagctgggcggccacgcgctggcctacctcgccgtctacgccggcatgttcgcctggaggatcgacccgacgccggtgtcgcggcggcgggagcgggtgatgtggtcgcacttcgagttcctggcgagcgcgctggacggcaagatctccctcggctgcgacctctcgctgtggcgcgcctacgtctccgggttcctgggcctggtggtggagtgcacgccgtgctgggcgcacgaggtggacctgagggtgctcaggaggctcagcgccggcctccggcagtggaaggaggacgagctcgccgtcgcgctcctccgccgtgccggcccggaggccatggccgccgccgccgagctcatcatcggcggcgactggtgacactacgccggcgatctgtacataactattgccatgtgcatgcgtgtgtagttgatttcgatattgtggtagtaattgatgactttgctgatcgatcgctaggctcgttgctctctttcgctaatgctagtgtccacttattagtatatcttggaaggaaggaaactgctcaatatatgtgtgttaaaaatggtgttcttgaag

SEQ ID NO: 1484 - DNA, 1586 bp, Oryza sativa
  ref <308>: DATABASE ACCESSION NUMBER: AK059516
  ref <309>: DATABASE ENTRY DATE: 2001-12-06
gaatttcgaagaccttctccctctccacctcgctcctctctcctctcgtggccatggcgatggcagcaagggcgcgctgctcgaggcaacccaactcccatcgcctcctcgccgtggttgtcctcgccgctattctgctccttccggtggcctccgcggcggcggcggtggtggcggcggtggcggagggggacggggtggagaaccggtcggcggcgaggcagtgggcgacggggaaggacgagggggagctggtctccggggaggagtcgaggggaggtgggtcggtggtggaggacgagttcgcgggtgggttcggctccctcgacagcatgctgcagtgggcgatcggaaattctgatccggataagttgaaagaacaggcagagggtgtgcagaaattgtctgcagatgagctgctcaagcggcgaatggagatcaaggagttgatggagaaattaaagatgccgtcagatgctgacttaatgaagattgcaattgctgacttaaataattcttccatttcactggaggatcggcagcgtgcactgcaggaactattaattctcgttgagcccattgacaatgctaatgatcttgacaaactaggaggcctcgttgctgtgattcaagatcttaataatgcaaatgaagaaataaggaccacttctgcatgggtcctgggtaaagccagtcagaataatgcccttgtccaaaatcagatcctaggttatggagctttggcaagattagtgaagatgggctatgcaacttctgcagaagaagctacaaaggcgctgtatgctatatccgctttggttagagacaatataaatggtcaggaggcatttcattcagaaaatggaagtgcaatgttgcagcacatattggcgagtaatagtgttgacgttcggcttcagaagaaggcagtgtttctagtgacagatctagcagattttcagctaaattctggaaattcaggacttcctttcttaagtgaccgtatttttcttaagtcattggttgatatgctgtcaagatttgacctcgaccttcaagaaaaggttttgttggctatcaagagcctactgaagctttcatccactgaagccacagatttcgagtcctgtgacctcagcagtgtactgtacagattgggcgtgcagttggaggagttgccatcagaagagcaaaaagagtatgctggggaggtggatgacctccggagagaagtccaaattctgttccaagacaagctcaaagagggcacaaagactgcattgtgatgatattaggacgaattaacgacggatgtagtatgcaatggaggcattaaatttttcaggagtatagttgatgtttggggccattcttgcagtgatcagaatcctcagaggatcaaatggagtcatggaatatttatctgtggatcttcggccaggtggtgacatagtgtctgtaggatttgatgtaatcgtaggttaggattattaactgtatggcttcttttcctgaagctacctatggttaattcatcattccctgcactatattttaaccactgcaatgaagcaaattttcccctt

SEQ ID NO: 1485 - DNA, 1336 bp, Oryza sativa
  ref <308>: DATABASE ACCESSION NUMBER: AK059517
  ref <309>: DATABASE ENTRY DATE: 2001-12-06
atgatacagggacagacccacctaaccgatgcaccaagtgtgctgccggtgggaactcagcaacagagccatatattgttgctcataatatcatcttatctcatgctactgcagttgatagataccgtaacaagttccaggcaagtcagaaaggcaaggtcggaatagttctcgattttaattggtatgaacctctaactaactcaactgaagaccaagcagcagctcaaagagccagagacttccatgttggttggtttcttgatccgttaataaatggacaatatccaaaaaatatgcgagatattgtgaaagaaagattacctactttcacgcctgaacaagctaagctagtcaagggctccgcagattattttgggatcaatcaatatactgctaactacatggcagaccaaccagcacctcagcaagcagcaactagctactcatctgattggcatgtttcatttatctttcaacgaaatggcgtaccaattggacagcaggcaaactctaattggctttatatcgttccgactggcatgtatggagctgtgaactacataaaggagaagtataataatccaacaatcatcatatctgaaaatggaatggatcaatctggaaatctcactcgtgaagagttcctgcatgacaccgaaaggattgagttctacaagaactacctcactgaactgaagaaagccatcgacgatggtgcaaatgtggttgcgtacttcgcatggtctcttctcgataacttcgagtggctgtcaggttacacatcaaagttcggcattgtctatgttgatttcactactctcaaacggtaccccaaggactcagccaactggttcaagaacatgctgcaggcatcagggcctggctcaaaatctggttcaggcacttcagattctcaagttggttcagcaacttcagcaagccatccagttggttcagccatctcaagtagccatcggctcttgcttcccctgttggtttccttgcattttcttttcccttccttcttcatgtttttatccctgtagaagtagcaatttagcagtgattaataagtagtggatgccagcagtatgttcgctttaaaaaatgtgctgcagctaagaggagctgagagagaccaacctgaaggccatcttgtttaattttcgcgtgcttttcgccagtagtgagcactatgattcagaaccagatttgtagtacttgtggtgattacgttattgtgtgtttcagtgtttgtatttgtagtatgtattgattaaactacatcaacttttcgggttcagaacttcagatatcctggactttggcctgc

SEQ ID NO: 1486 - DNA, 1686 bp, Oryza sativa
  ref <308>: DATABASE ACCESSION NUMBER: AK104082
  ref <309>: DATABASE ENTRY DATE: 2002-08-28
accagcaactccctgactccatcggagtatattagctcgtagctgagtgcggctcagtctgccagctcgatcggaggcgctttcatcgatcggcggcggcagcgatggcacgctccgccgtgttgttgcacgccgtcctcctcgtcctcgccgtcgcggtgtcgtcgtggcgtggcgtggtctccggcgacgcggcggtggtgctcggccggaaggccgccgggatgagtagtgctgcagcgtcgtcgtcggccgacgacgacctgccggcgctgcagatctcggcgaggaaggacggcgccgggaacgataagtacgccgtgatcttcgacgccggcagcaccgggagccgggttcacgtcttcaggttcgacaagcagatggacctcgtcaagatcggcgacgacatggagctcttcgccaaggtgaagcccgggttgagctcatatgctggcaaaccacaggaagctgcaaactccattgctcctctgctagagaaggctaaaggtgttgttcccaagcagcttcagaaaagaactcccctcaaacttggggccactgctggtctaagactgattggagatgagaagtcagagcaaattcttgaagcggttcgagatcttgtccacagcaagagcaatttccagtacaaaccagaatggatcagtgtccttgggggttctcaagaaggatccaacctctgggttgctctgaactatcttttggggaagttaggaggggattactcaaaaaccgtaggagtgatcgatctcggaggtggttcagttcaaatggcctatgccatttcttcagatgctgcagaaaactctcctccagtccctgtcggcaaagatccttatgttacaaaggagtatctcaagggaaaagattataacctttatgttcacagttacttgcattatgggctccaagcttctcgcgtcgagattcttaagacgaagaatgggcaattcagctcctgcatgcttcgcgaattcaatggtacatacaagtacaacggcgaggagtacgacgcggcggcgtcgccggaaggggcggaccacggcaagtgcggcgaggaggcggcggcggcgctgggcctggacgcgccgtgcgagtcccggaactgcagcttcaacggcgtgtggaacggcggcggcggcgccggcatggccgacctctacgtggcgtcctacttctacgacagggcggtgcacggcgggttcgtcgtcgacgacgcgccgagcgccgtgaccaccccggcggcgttcgcggaggcggcgtcgaaggcctgctcgctgagctccggcgaggccgcggccgcgtacccggaggcgttcgacgtgcagttcatatgcatggacctgacgtaccagtacacattgcttacaaagggcttcggtttgaagccaactagggagatgacgcttgtgaaacaggtcaagtatggggattgctacgtggagtcggcgtggccgctgggtactgccatagaagccttgtcctcccagaagagtcatcagtctgcatgatccatttagctatatcacgcaaggatgcctacatatatgtatgtgttctgattcacgtacgtttgagcggtggagaagatgtttggcagatttgagtagcaaattcataacactgcgcaattaataacttaataaaatggtattgtttgacggc

SEQ ID NO: 1487 - DNA, 1242 bp, Oryza sativa
  ref <308>: DATABASE ACCESSION NUMBER: AK059518
  ref <309>: DATABASE ENTRY DATE: 2001-12-06
cttcgtctactaggagaggcgaagtagccaactaaccgcggcgatgtcggcggttgagaggaagacggcgtgcgtgaccggcggcagcgggtatatcgcttcggcgctcatcaagatgctgctgcagaagggatacgctgtcaagacgacagtcagaaaccccgatgatatggagaagaactctcatttcaaggagttgcaagcactaggccccttgaagatcttccgcgccgacttggaagaggaaggcagtttcgacgaggcagttgccggctgcgattacgccttcctcgtcgccgctccgatgaacctcaagtctcagaatcctgagaaagaactgttggaagccggcgtccaaggcactctgaacgttctgaggtcgtgcgtgaaagccggcacggttaagcgcgtgatcctcacatcgtcggcggccgccgtctccggccagccgctgcaaggagacggcaacggcagcagccatgtcctggacgagtcgtcctggtccgacctcgactacctcagatcaaccaacgggatatctcctgctcaggcttacgcgatcgccaaggttctctcggagaaggaagcgagcaagctggcggaggagaacggcatcagcttagtggcggtgtgcccggtcgccaccgtcggcgcgtcgccggcgccggtggccaacgagagcgtcgccaacgtcctctccttgctgtccggcaacgaggagatcaacaccctgagaatgattgaccagtactccggcgggctgaagctggttcacgtcgacgacctctgccgcgccgagatattcctcgccgagaaagcgtcgccgtcgccgtcggggaggtacatctgctgcgccctcaacaccaccatgcggcagatcgcccgttccctggccgccaaatacccgcaccacaacgttgacatcgatgcactcggcggcggcctccctgagaagccgacgatcctcctctcgtcggagaagctgaccagtgaagggttcgagttcatgtacaagacggtggatgagatgtacgatgatgccttcgtggagtacggcatggcactcgggattctgcactactgacgccgacgacaatgctgttactacccagcttcgcaaccaaacggctcttgcaaaaataagtatgtgtaaaacagcagtgaatttgttcccatccgcttttatgaaaaacgtgcctattgacacgtcaaactgttcaataaaattgtgctcctttcaac

SEQ ID NO: 1488 - DNA, 1242 bp, Oryza sativa
  ref <308>: DATABASE ACCESSION NUMBER: AK059519
  ref <309>: DATABASE ENTRY DATE: 2001-12-06
tctctctctctctctctctctagcctcttccggcgaccgagcgaaccctaacccgcgaccagattccccaatcccccggaggaggagtaggaggaagccgacgaggaggaggaggcagcggcggccacgatgctgagggttgcggggaggaggctctcgtcgtccctctcatggcgccccgccgccacggcggcggcggccgccggggggccgaggggtggcccgctcgccgggaagaacgacgacgacgacaacaacggcaacggccgggtccagccgcggttctccatcgagtccccgttcttcgccgccgccagagggttttcttcatctgaaacacttgttccaaggaaccaagatactggcttggctgaactacctgcaaccgttgctgcactgaagaatcccaacccaaaggtggtgtacgatgagtacaaccatgagaggcatgcacctggggatcccagcaagcgtgcatttgcttactttgttctaagtggtgggagattcatctatgcatcgttgctgcggctcctcgtattgaaattcgtgctgagcatgtctgcaagtaaggacgtgcttgcgcttgcttccctggaggtggatctctcaagcattgagcctggtaccacagtgacggtgaagtggcgtgggaagccagttttcatcagaaggaggacagaggacgacatagcgctggccaatagcgtggacgttgggtccctgcgccatccccagcaggacgcagagcgtgtgaagaacccagagtggctagtggtcattggcgtctgcacccaccttggttgcattcctctccccaatgctggagatttcggaggttggttctgcccgtgccatggctcccactacgacatctctggcaggattcgcaagggccccgctccattcaacctggaggtccctacctacagtttcttggaggagaacaagctcctcataggctaagagcctgagaccactctctatatctatctaccttctgcactggggtgagagtccctattgtgctgtctattttgttacagtttggctagaaaattttttgttccgcaacgattattgccatgttggctgttactttccgaggtgcattttggagcgcgaaataatttgctactatgatgctactgaaatgtaatctgtaagttacctgggacgtttatttctgggggtacaaacaataggaagcactctgagcacctacctgcccttcacccatgt

SEQ ID NO: 1489 - DNA, 2028 bp, Oryza sativa
  ref <308>: DATABASE ACCESSION NUMBER: AK059520
  ref <309>: DATABASE ENTRY DATE: 2001-12-06
atgctgagctccggaagaagcttactgatggtgttgaaatcgatgatttgaaggggatgcttggcaaggtcacgattgattcggatgctgtatctgttttgcggggtgtgtacaactccctgctcaagttcagggatatccttgcatgggaagcagctgttgccatggcggtgatcgaaatggatagttcaattgagaagccacaagcttgtgaggagaatgaggcgggcagttcaactgaaaatccgcatgctagtggagagaaaccaaaaggtgacaagaagagcaagaagaagaaaactttggggaagggtacttctgctgtactgatgttgcttagggaccttgtgaccaacggaaaggaggttctttcggtgaattctgcactacttgcagagtggggaaccgagctctcactgttgtttgatccaaagtgtcccagattggtgtcccttgtggacaaggtgaaggagattgttgagaccaatgaagtgaggagattgcctaaaattcccaagggaacacgtgactttgggaaagagcaaatggccataagggagcatgccttctcaataataacaggtgtattcaagatgcacggtgccgtttcacttgatacacctgtatttgagctgagagaaacacttatgggcaaatatggtgaagactcaaagttgatttatgaccttgctgatcagggtggagagctttgctctttgcggtatgatctgactgttccatttgcccgatatgttgctatgaataacataagttcattgaagagataccagatagctaaagtatacaggagagatagcccgtccaagggaagatatcgagaattctaccaatgcgactttgacatagctggagtatatgaaacaatggaaccagattttgaagttatcaaagttttaactgagttgttggatcagttggatataggcacgtatgagataaaactaaaccacagaaagttgcttgatggaatgttagagatctgtggtgtgcctcctgaaaagttcagaacggtttgctcaagcattgacaagctagacaagcaaacatttgaacaagtgaaaaaggaactggtggacgagaagggcatatctaatgaaactgcggataagattggtgatttagtgaaaactaggggaccaccgctggaagttttgctggaattgagaaaggaaggtagcaagtttatggggaacgctgggtctgttactgcactaaatgagctggagatactattcaaagctctagataaagcaaatgcaataggcaagattgtttttgatttaagccttgctagaggccttgattactacactggtgtgatatatgaagctgtgttcaagggcaccactcaggttggctccattgctgctggaggcaggtatgacaaccttgttggtatgtttagtgggaagcaagtccctgccgttggtgttagccttggaatagaaagagttttcgcaatcatggagcaacaggagatggaaaagaatcagatccgggccaccgagacggaggtattggtgtcgattatcggcaaggacctcatattggccgctgagcttgttagtgaactgtggaatgctgggataaaggcagagttcaaactcactactaggatacagaaccacttgaagtacgcgacgcaatctggcattccgtggatggtgctggttggtgagtctgaaataagcagtggaaaggtgaagctgaagaacttggcagccagccaggaagaggaggttgacaggacagagtttgctcaggtgttgaaacagaaattgagaaacccatagagaagatttttagaatataattttgtagttcatgtttcaacttgtgatgcatcatacttgcctgtgtgagttcctggaaaattccgttcggcgttttgatttatactggctgtttgaattggtttacatgttaaagcgcttggtgtaattgaatcaaattaccaaattcaaaacattactctactgattggtgaccaactcatagtgaccatgc

SEQ ID NO: 1490 - DNA, 1056 bp, Oryza sativa
  ref <308>: DATABASE ACCESSION NUMBER: AK059521
  ref <309>: DATABASE ENTRY DATE: 2001-12-06
ggagctctcgatactttagccgcgattcggagggaaaccctagctagctcccgctctcgatcccgcgcccgccaccgcactcggcaagatgttcctcacgaggacggagtacgaccgcggggtgaacaccttctccccggaggggcggttgttccaggtcgagtacgccattgaggccatcaagttggggtcaactgcgatcgggttgaagaccaaggatggtgttgtccttgctgtagagaaacgtgtgacctcgccactgctggaaccaagcagtgtggagaaaatcatggaaattgacgagcacataggctgtgccatgagtggccttattgctgatgctagaacattggttgagcatgctcgtgttgaaacccagaatcataggttctcatatggggagccaatgacagtagaatctactacacaagctatctgtgacttagctctgcgttttggtgaaggtgatgaagagtcgatgtcacgaccatttggtgtctctctccttattgctggtcatgatgagaatggacccagcttgtactacactgacccatcaggaaccttttggcagtgcaatgccaaggcaattggatcaggttctgaaggagctgatagctcattacaggagcagtacaataaggagttgacccttcaggaggctgagaccatagccctgtctatcttgaagcaggttatggaagaaaaggttactccaaacaacgtcgatatcgcaaaggtttctcccaactaccacctctacacccctgcagaggttgaagctgtcattgcacggttgtgagaagattgccatcgcgtgttattttaatcagccctaagacagcctctgtatgaacttcctaaatggattatcagtccattgtttgctatggctgtcatgttatgttaacaagatagtggctgctagagtttattactggctctaatagtctggtgtgcagcccagtcatttgcttgttttcagcagtgttgagaccatgtactatcaaaaagagaacgacaatcctttccaagatttggttgcaacatttcgac

SEQ ID NO: 1491 - DNA, 1842 bp, Oryza sativa
  ref <308>: DATABASE ACCESSION NUMBER: AK059522
  ref <309>: DATABASE ENTRY DATE: 2001-12-06
gtctagcctttcctctctactcctcatcaccgccgctgccgccgccggtcgcacgcctcctcccaccgtcggcgcgagaagatgctcgacatcaacctcttccgcacggagaagggcggcgacccggagctgatccgcaagtcgcagcgcaaccgctccgcctccgtcgagctcgtcgacgaggtcatcgccctcgacgaccagtggcgccagaggcagttcgagctcgacaaaatccggcaggagctcaacaaaaccagcaaggaaatcggcaagctcaaggctaaaaaggaggatgcatcggctctgattcagagcacggaagaaattaagaagaggttggctgccaaggagacggaggtgcaggaggccaaaggcacgctggatgccaaactcgtgacgatcggaaacattgtgcacgaatccgtccctgtcagcgatgatgaggcaaacaatttaattgtacggacatggggagagaagaggatggaagggaatttgaagaatcacgtggatctttgcaagatgcttgacattgtagctttggagaaaggtgttgatgtagcaggtggaaggggttactatttaaaggatgaaggtgtgctactgaacttggcattgataaattttggacttgcttttctgagaaagcgaggcttcaagccaatgcaaactccttttttcatgagaaaggaaaccatgggaaaatgtgcccagttggcccaattcgacgaagagctttacaagctaacaggcgatggagaggaaaagtatctcatagctacatctgagcaaccgttgtgtgcgtatcatcttggtgatcgaatttatcctgctgaattgccaattagatatgctggatattccacctgtttccggaaagaagctggttcacatgggagggacacggctggtatcttcagagtccaccaatttgaaaagatcgaacaattctgtgtcacaagtccaaatgacaatgaatcttgggagatgcatgaagaaatgattaaaaattcagaagatttctacaaggagattggcctaccgtatcaacttgtctccatcgtgtctggtgctcttaatgatgctgcagctaagaagtatgatttagaagcatggttccctgcatcaaaaacctacagggaattagtgtcctgctcaaattgcacagattttcaagcaaggagacttggtataggttatggccagaaaaagaatgacgaacaatccaagcaatttgttcatatgttgaactcaacattgactgccactgagaggaccctttgctgtattttggagaacttccagagggagaatggtgttgaagttccaaaagcattgcaaccttacatgggtggaatcgatttccttcctttcaagctggatagcaaacaagttgctcaactccaaatcaaataagacagtcaaaggtctctacctctaacaatcccctttctctaacatgtgcgttttctttttcatttgggtataatcttgacagggaaatgctatctgagctagatgaggaatcaacaaagatttcttgctttcagacactactggatattattcatacttatagcaatgatcatgatgttacagttttgactctcattttggtgtcttgattagcccattgtctgaccatgtactggcacagtgatattgcatagaatgtctggcaatcttggatatctgcgttttgtttaccgtaaaagatgtattcattttcaaggcctttcgtgcctatactaatttgtggcatacagtgacgctattactacttgtctgaatatttgttataatcggcttgttatggccaataaagttttattctcgtct

SEQ ID NO: 1492 - DNA, 1515 bp, Oryza sativa
  ref <308>: DATABASE ACCESSION NUMBER: AK059523
  ref <309>: DATABASE ENTRY DATE: 2001-12-06
aacgccacgccgagttcgctcgtctccgctctcgctgcgtcggtgatctgatggcggcggcggcgtcggcggcgccgcgcgtcctctccgcggagccgaggaggagggatccggtcgccgtgggagtccccccgtggcggctgtcaccggggagtagggttcgcgccgcctcgcgcgctcgccaggaaaatgttcgtcgtggccagttgatatcgactaatatcaaatcaaggccattgctgtgccctccatgccgttgtgttcagatggcattggccaacacaaggattgcttatcagcctgatgttcagaagcatagtggagttttggcctatgagccggttcaagggagccttgtgcaatggaactcatttatggacaaatcagtacctgatccaccaacagctgttctccttcatggcatccttgggagcaggaaaaactggggatcttttgcaaagaggctggctcaggaatttccgatgtggcagttcctcttggttgatttgcgttgccatggagattcagcgtcaattaagaaaagaggaccgcatactgttgcctcaactgctcttgatgttctaaagctgatagtgcagctcaggctaaccccacgggtgctggttggtcacagctttggtggaaaagtggctctgagcatggtagaacaagctgcaaaaccgcttgcacgtcctgtcagggtatgggttcttgatgctactcctggcaaggttcgtgctgggggagatggcgaagatcaccctgctgaacttattgagtccctcagaagaatgcctatgcaggtttcttcaaagcaagaagtggtggatgctctagtcaaagaacaattttctgtggatgttgcacggtgggtggctacaaatctccgacgaagcagtccattagggtcactatcgtcttcaagcttctcatggatttttgacctaaatggcatatctgacatgtacaagtcctatgaagagactaacttatgggggattgtagagaatgtaccaaggggtgttcatattaatttccttaaagctgaaagaagtttgcatagatgggctcttgatgatctccagagaattcatactgctgaggaactggctgcagatgagggtggaggagttgaaatgcacgtgcttgaagatgctggacattgggttcatgcagataaccctgatgggctatttagaattctctcatcaaccttccgcatcgaggctaccataagagggatgcagaattgaggtgcagaagccccaaaacagcttctgcactatgcagtactactgtacgtgcgtagggtagacaatacattacatgaagagagaagacacatgaaaggcatcaacacaaacttgtattcagttttgtagaatatgaagagctgaaaaaacttcagcgagggatcaagctaactgccaacattgttgtgtgtgggtcatttgttcattcatttgattcttcgatcttgtatgtaacatgacagtcggctgcagttcttggagg

SEQ ID NO: 1493 - DNA, 1265 bp, Oryza sativa
  ref <308>: DATABASE ACCESSION NUMBER: AK059524
  ref <309>: DATABASE ENTRY DATE: 2001-12-06
gtcatgtctgatgttgctcctgctaggtatgaggccatgctctggttcatttttaccatgctctcagtaagcgccgccgcctcttctcctccccccgttagatgaccacgccattagaggattgatgaagtattgggtttagcagtgaattttggtttcttgacatagagataaaatcagattttagatttagccatggactcggaaattattatctgaaccctagcacagatttaatttatcatgaagcataagaactataacaactctgtcaattaggctagatcaattatagttcatatagtagtccgtgagtagcatatttttaataaagagatcaatttgaataattagggagtctatgaacagaaacatagacctttataattatagcatgcatgcagttatgtgcgggcatttctcattaactctttcttagactcattactgggattttgtacatggcagttaaggagaaacaatatgaaacgtatggaatagttaatttgagtgtgcttgatttccttcggccattgttcttactgaaagcaatattttcttaatttgagtgtgtttgatgcgaggacgggagctgcgcgacgtggtgggcgggagcggcgggctcggcaccggcggcggcggcctcccttccccgacctcccatgcgtggcggcggcatcccttccccgacggcggcgggcacggcgacgacgacggcggcgggtggcggtctgcggccgtccccttgtccccctgccgctaccgccggagggctgggacagtgggactgagccatggctgccatcgcctgtgtgcacgcgtgcaagtcatctctgaaatcacgcttgcagcagccatatcgatgcacgggtaacatctgatttcgatacatcggttggtgaagtcagcttttactgttgattaggacaaactctttgttggagatggcagagagtaaccggaaatgtacacagtttggcaaagaagggagaaaagaagaggaagagtatgtattgctagagttggatgattgtctttattctgacataaaaccaaatactccatatgtgatctctggtatctgattccttctggtcgtcgtcgtcttgatccagaacaagcgtgatcccgacctacgcgcttactttctcggcttggattgattgattgattgattgtgtgtgtgtttctcaggaagccatgctttgggccgcctcctgtaattaggttgaatctgagatgaactattgtttgaattctgttgt

SEQ ID NO: 1494 - DNA, 1339 bp, Oryza sativa
  ref <308>: DATABASE ACCESSION NUMBER: AK104083
  ref <309>: DATABASE ENTRY DATE: 2002-08-28
gatccaatcgcgtcgctaaaaccctagcggctggctgatttgggggattgctcgtcggagagatgaagatccagtgcaacgcgtgcggcgcggcggaggcgcgggtgctgtgctgcgccgacgaggcagcgctctgcacggcgtgcgacgaggaggtgcacgccgccaacaagctcgccgggaagcaccagcgggtgccgctgctctccgacgacggcggcgccgcgcccgccgccgccgccccggccgtgcccaagtgcgacatctgccaggaggcttctggatacttcttctgcctggaggaccgtgcacttctttgcagagattgtgatgtttctatacacacagtaaactcctttgtttcagtacaccaaagattcctactaacaggtgttcaagttggccttgatcctgctgatccagttccacctgttgctgacaagcatgttaagagtgctggtggttcagtggattcagcaactaaacatttgcaaaggaatcctacagacttatctggtgaaaacagtgcatctttgcccagccaaaatgtaatcaatggtaattattctaggcagagttctgttacaatggccaagacaggacaggtcaattggactatgagcaacaacacaattagatcaatagaccctccacccaagtattcatcagaggaaagtccagcacttctgctagctagccacactagcaccatggcagcgtactccagtcaaatcagtaaggatagtgatcggatctacaacttaccattcacaggtggtaatgggtcagatagtctacatgattggcatgttgatgagttctttagtaactcagaatttggctttgctgagcatggttcttctaagggtgacaacgctaagccagggagtgctggtggatctccgcagtgccgtctggctgaaggcctgtttgtcgaaggacttctaggtcaagtgcctgacaatccatggacagtgcctgaggtcccctcgccaccgacagcctctggtctctattggcaaaataatttgctttgcccttcgtacgacagcaccatgttcgtccctgagatttcctccttggagaactctcagaacaacttcactgtatctgctggtttgaagcgccgaaggaggcagttttgatctgccgatagcatcagacaccattcggtttagttggcaggtcacgttgagaggagggcttcttgcctgcctgaccaaagccacaaaacacagggatggatgatcatccagtggtcagtctaaaaatatgttgtaatgtttgtgtttcgactatacgtttgttgctgaagtttaaaggcgagggaattgttgtg

SEQ ID NO: 1495 - DNA, 1199 bp, Oryza sativa
  ref <308>: DATABASE ACCESSION NUMBER: AK059525
  ref <309>: DATABASE ENTRY DATE: 2001-12-06
aaactactctctgttcttgccctgtggtttcttctccgtttgcaggctttattgcattgcaggaaaagatggcggcttctcatggaaatgcgatctttgttctgctgctgtgcactctctttctcccgtcccttgcatgtgacagcggtggcgtgaagtttgggtacactggttctatcggccctgacttctgggggaatttgagtgccgacttcacgcgttgctcgaacggaaagcagcagtccccaattgacatcgacaccaacaacctggttcatgaactgaatatggagccactccatagaaattataccgctgcaaatgctactcttgtcgacaacatcttcaacgtcgcgctgcggtacgaagaggcagcaggggttctgagcattaacggggtgaagtacacgctgaagcagatgcactggcactctccttccgagcacaccatcaacggcttcaggttcccactggagctccacatggttcacaccaacgaaaatggcaacatcaccgttctggcctttctctaccgatttggcaggccagacccgttcttcgaacagattcaggataagctggctgcgctcaacgcggagggctgcaaggcagagaaaggcagcccggtccctgccggatctgtgagcttgctgacgatgaggcagcacgtgcacatatactacagatacgttgggtcactgaccacgccaccgtgcgccgagaacgtgatctggaacatccctgccatgccgagagagatgacaccgcagcaggccgccgatctgatggctcccctggacgaaggctaccgccggaacagcaggccgacgcagcagatgaacggccgcaccgtgcagctctaccacaggttctgggggaagaagaagaggaggagctccccgtaggctgacgacgacgacgtacgacgacgcgctggcagcgccatcgatccatcccggccgatggagatcgctgcgtgttttggggtcccttgtgttgtgttctgtccagcagtagtagtttgtttctgaagtcgtgtgtttatagcgtctaggtttgctttcttattttggttaccggccatagtttgccccggttttgctagcagtcctgaactggctttgatttctgtactaagagaccggtcttttgtcaccctctttaattacctactaatgaagaactactgagttctcaac

SEQ ID NO: 1496 - DNA, 1323 bp, Oryza sativa
  ref <308>: DATABASE ACCESSION NUMBER: AK059526
  ref <309>: DATABASE ENTRY DATE: 2001-12-06
caagaaaccaaccaccaactagctactgtagttgactgacagtgatagtggcagtcatgcaggtcgtgggaaccgtgcgtgtcagtggctgcggcgcggtggtggcgccctcgcgccggcagtgccgcgtgtccgcggcggtgctgacggccgcggagacggcgacggcgacgcggcgccgcgtgacgcactcgatgccgccggagaaggcggaggtgttccggtcgctggaagggtgggcgaggtcgtcgctgctgccgctgctcaagcccgtggaggagtgctggcagccgacggacttcctgccggactcgtcgtcggagatgttcgagcaccaggtccacgagctccgcgcgcgcgccgcggggctccccgacgagtacttcgtcgtgctggtcggggacatgattaccgaggaggcgctgccgacgtaccagaccatgatcaacacgctcgacggcgtccgcgacgagaccggcgccagcgcctgcccctgggccgtctggacgcgcacctggaccgccgaggagaaccgccacggcgacatcctcggcaagtacatgtacctctccggccgcgtcgacatgcgcatggtcgagaagaccgtccagtacctcatcggctccggcatggatccggggacggagaacaacccgtacctggggttcgtgtacaccagcttccaggagcgcgcgacggccgtgtcgcacgggaacacggcgcgcctcgccagggcgcacggggacgacgtcctggcgcgcacctgcggcaccatcgccgccgacgagaagcggcacgagacggcgtacgggcgcatcgtggagcagctgctgcggctcgacccggacggcgccatgctcgccatcgccgacatgatgcacaagcggatcaccatgcccgcgcacctcatgcacgacggccgcgacatgaacctgttcgaccacttcgccgccgtggcgcagcgcctcaacgtctacaccgcgcgcgactacgccgacatcgtcgagttcctcgtcaagcggtggaagctggagaccctggagactgggctctccggcgagggccggagggcccgggacttcgtgtgcgggctcgcgaagaggatgcggcgggccgcggagcgggctgaggacagggctaagaaggatgagcagaggaaggtcaagttcagctggatctatgatagggaagtgattgtctagtttaacttgtcttggttgaattctgaattcccagtcctagatgatcatgccatttcgttatcatctctgttcttgtgttctctttgcaatgcagtaaattggtaatagttaatggtgcttt

SEQ ID NO: 1497 - DNA, 1281 bp, Oryza sativa
  ref <308>: DATABASE ACCESSION NUMBER: AK059527
  ref <309>: DATABASE ENTRY DATE: 2001-12-06
aaagtgtcaaagtcaacgacgtagtacatggtcactgtcgaataccaaagtattcttctgcaagtgatcgccatggccaatgctaatgctgccataaaccagagcgctgtcgttgtcgggctggatgctctcaaaaacaacgatgtcgagtttgcattactcgaggaagcgtttggccccgcgagtctgggtatcattgttgtaaaggatctcccgtcgagattccatgatctgcgccacagactgctctcgtatgcatctgctcttggaaacctgtctcaggacgaactggcaaagcttgaatcgcccgcttccaagtggctagttggatggtcatgtgggaaagagacgcttaaggatggcaaatacgacactctaaagggttcatactatgtcaactgtgcgcccggctttgaagagcaacaaaaggcagtagccgagaaatacccgtcgttcccagagtacacagcacccaacgtgtggccatcggaggaagtgctgccaggcttcgaggagacgttccgcgagctgtgtacgctgatcattgacattgcagcgctggttgcgcgagcatgtgacaagtatgctgaagcgaacattgaagggtaccaaagggggtacctcgaacatgtggtcaagacaagtgtttccacaaaagcccggctactgcactatttccccagccccgcatctggctcggagatttcgaacggcgacgaggacgactggtgtgcgacgcatctcgaccatgggtacctaaccgggctgacgtcggccatgtttgtggatgaaggagcaaatgtgccgcgagcaggcgcatccttcgcgcccctcgaagaacttgagcgatcgccggaccccaaggcaggcctctacattcactcgcgcacgggtgccgtgaccaaggtcagcatcccacgcgactgtctagccttccagactggcgaggcgctcgagatcatcacccaaggcaagttcaaagcggtgcctcactttgtgcggggcgctggagcgggagctggaggtggaaaggttgcgaggaacacactggcggtgtttacgcagcccaacctgtgggagaaggtggacgacaagcgggactttgcagcatttgccaaggagattgttgagaagaatcactagcggatgtgttatgcagctgtagcctgggcgtagagcacgtactcgactgtatgtaagtactgtacactgcacctatgcctactgcatgcacgtaagtactctagagtagcaaacatgaagaagcaagcaaatcaaagc

SEQ ID NO: 1498 - DNA, 1332 bp, Oryza sativa
  ref <308>: DATABASE ACCESSION NUMBER: AK059528
  ref <309>: DATABASE ENTRY DATE: 2001-12-06
atgcacagcagcagcagcttgtatcatcctactagtagtagcttgcaacaatggcggcttcaatgaattcgaagcttcccctggctcttgtgctcctcctgctgtgcggcggcgcatgcgtagcggtagccatgcccagtgaattgtccatagttggctactcggaggaggatctggcgtcgcatgagaggctgatggagctgttcgagaagttcatggccaagtaccgcaaggcctactccagcttggaggagaagctgaggaggttcgaggtgttcaaggacaacctcaaccacatcgacgaggagaacaagaagatcaccggctactggctgggcctcaacgagttcgccgacctcacccacgacgagttcaaggctgcctacctcggcctcaccctcactccggcgaggaggaacagcaacgatcagttgttcaggtacgaggaggtggaggcggcaagtttgccgaaggaggtggactggaggaagaagggggcggtgacggaggtgaagaaccaggggcagtgcggcagctgctgggcgttctcgacggtggcggcggtggaggggatcaacgccatcgtgaccggcaacctgacgcgcctgtcggagcaggagctcatcgactgcgacaccgacggcaacaacggctgcagcggcggcctcatggactacgccttctcctacatcgccgccaacggcggcctccacaccgaggagtcctacccgtacctgatggaggaaggcacctgccgccgcggcagcacggagggggacgacgacggcgaggcggcggcggcggtgaccatctccgggtacgaggacgtgccgaggaacaacgagcaggccctgctcaaggccctggcccaccagcccgtcagcgtcgccatcgaggcctcaggcaggaacttccagttctacagcgggggtgtgtttgatggtccgtgcggcacgcggctggatcatggcgtgacggccgttggatacgggacggccagcaagggacacgattacatcatcgtgaagaactcgtggggatcgcattggggtgagaaggggtacatccggatgaggaggggcaccggcaagcacgacggcctctgcggcatcaacaagatggcctcctacccaaccaagaacgcttaaattaaatcagtttcttaatttcaaggatacaaaataataacacaagaagaggactctcttaattcatcctgcttgtaaagttcgttgttgttatctcggcacttccaagtgtttctcagtactcgtattcattgttattcattttcaattcccatccacatttcaagattgtttgtctctcatt

SEQ ID NO: 1499 - DNA, 740 bp, Oryza sativa
  ref <308>: DATABASE ACCESSION NUMBER: AK059529
  ref <309>: DATABASE ENTRY DATE: 2001-12-06
ggcaaactcgcgcccccgggagttttctcagaaacatcattccccccaccccagccatcatccgtctgctccggaacccggctctgagagagtgagaggatttgagataaagaggccggctgtggccttgatcctgcctcgcaagctggcgttgtcacaggcatgtcttcagtgtcgccgagaaaacagccgcttgttcagcgggaggcatccacgagcatgaatgataacgagggcggattctcatggctgacagctctgggattcggtttccttaccttcaactccgggatggcgatctaccggtccgatggcgatcgtggatcggtggcgttcgtattaacatcgtacatcgatctcgtgctgctcttcgcgtgcctccgtctcttcgagaaagcgccgagggactctgcccgccgggaatggctcaaggtctttgtatggggactgacgacgttgctcacggtggtgttctcgtacaaggtggcggcaatcatgccgccggtggtcgccgtgatcgtctgggcgatggcatttgccacaatcggtggtgggttctacgccttcttcgtgcaccaggacaaggctgctcagctagagcaggccaacagatagattcgcgtatgttttggttcattgttgtgtcgtctgtaaacatagtttctactgctaccactactacgagtgctggatgtaatgtatttcgaaataaatgcaataccaagaggaatattactggt

SEQ ID NO: 1500 - DNA, 839 bp, Oryza sativa
  ref <308>: DATABASE ACCESSION NUMBER: AK059530
  ref <309>: DATABASE ENTRY DATE: 2001-12-06
aaaaaaaaaaaatcttttgagcattcaatctgctcaagataaagtgcttagcctgagatctagtctcaagaaggcaatggccaaaaagagtaagggagcaatccttaaagtcaacacacacatgaacggtgcacagagctcaagttgctcaccaggaaagggtaaagtgcttgaaagatcaccaagggacatgtcggattgtgatatggatgatgccgccatgcccgagagtgctctttcaagttatggagaagctaatgatatggatatttttgaaagcaccatgagcttattgtcggctgaagttccacatcagatgggagaatttcaccagagttctgaagatgtattgattgacaatcaagcagctgaggaagggtatcagaactttgaggtgatcagccatccatgcaagcgcctaagggtatcggtcaagagagaaagcggggcgcactccgaggatgagagtgttgcccccacagtctctgtgaagaaagaagctcaggaagaagccacaaccagcttcggtctccaggcagcgttttttaagcccggctacacaggcaagcggagaaggaggatgcctaaaattcaaagacgaggcggttcatccgcctctcctttttcgtcttggatttcctctcgtattcgtaaaaagcggcaattctaaggggggactagctacctcagacaatcgatcttccagtttagcttctgatctgaacttttagttagatgagatgatgacggcaactgcagttcttttccctttctctttgtacctgatatattaacgatgacatatgagcaatctggaaatgtggcacgatggcttcatc

SEQ ID NO: 1501 - DNA, 1451 bp, Oryza sativa
  ref <308>: DATABASE ACCESSION NUMBER: AK059531
  ref <309>: DATABASE ENTRY DATE: 2001-12-06
agcccccacccagagccagcggactgcacctcgcagtccggcatggctggacagatgctaccgccgattgcgcttgttgctgtggccatctgtatcaccgcggcggcggcggcgaaggtgccggcgatatacgtgttcggcgactccacggccgatgtcggcaacaacaactacctgaccggcgccgccgtgccgcgggcaaacttcccgcacaacggcattgacttccccacgtcgcggcccaccggccggttcagcaacgggtacaacggcgtcgacttcttggctcttaacatgggattcaggcgcagccccccaccgttcctcgccgtggctaacaaaaccagcaacccattgttcaggggctccagggaacaaactttgcctctgcaggatcaggcattctcgactcaacaggtcaatccatcatcccaatgagcaagcaagtgcagcaattcgccgccgtgcaacgcaacatctcagcacgcatcagccagcaagccgctgacaccgtgctgtcgagatccctgttcctgatcagcaccggcggcaacgacatcttcgccttcttctccgcgaacagcacgccgtcgtccgcggagatgcagcggttcgtcaccaatctcgtatcgctctacacaaatcatgtcaaggatctgtacgttctcggggcgaggaagttcgccgtgatcgacgtcccgccgatcgggtgctgcccctacccgagaagcctgcaaccgctgggcgcttgcatcgacgtcctcaacgagctggcccgtgggttgaacaagggagtcaaggacgccatgcacggcctcagcgtgagcttcagcggcttcaagtactccatcgggagctcccatgccgtggtgcaaagcatcatgaagcatccccaacgactcggattcaaggaggtcacgacggcttgctgcggctccggcaagttcaacggcgagtccgggtgcacgccgaacgccacgctgtgcgacaaccggcacgactacctcctctgggacctgctgcacccgacgcacgccacgtccaagatcgccgccgcggccatatacaacggctcggtccgcttcgctgcgccgataaatttcaggcagctggtggatgaccagcactagccagagcgtggcagtgtcaccgtgtaacgtagtactactaattgttgtacgtcgccgactatgtgtctgtttgtctggtgatattggtgcgtaggatatgctgggctgtgttcatcagtggcttgtgctttaggcggtggtgtagtttggatacacataccaaaatgtcatctccgttattattgttgcccttgttggtatttgcggtgtttgtgttcccaagtcgggataatttgagcctggagcggatgagccaaggacatcgcagctgcttacttggtgccaaatcggaatacaaactctaaacatgtaggtacatac

SEQ ID NO: 1502 - DNA, 428 bp, Oryza sativa
  ref <308>: DATABASE ACCESSION NUMBER: AK059532
  ref <309>: DATABASE ENTRY DATE: 2001-12-06
gttgacgcggaagagtgccggggacataatttcgggtcaatctggggccgttgatctgaccgactgggttcaaatgtgcaacagggaaggacagggaactgattgtttcgatcgagacatcacgggcttggaagaatctccaagggtgatggacgagctgcttgcgatctctcttaggtgtattcttcctgtaaatgagaggcctaacatgaagacggtctgtgacgatctgtgttccataaccgtgtgagtttcgttttaatttcccgtgtacatgtaaccgatttttcgttcatcccaattttttctgtgggttttccagagccttgtagccagggtttgtttggttggtaactcgagtagtgtaaagaggatttgatcccatccatcccattgattgattgataccattgccatctttcttcatg

SEQ ID NO: 1503 - DNA, 1337 bp, Oryza sativa
  ref <308>: DATABASE ACCESSION NUMBER: AK059533
  ref <309>: DATABASE ENTRY DATE: 2001-12-06
tgatgaagatgatgcatgtgttgacattgaagatgatgatgaaaccattgtggaggacgcggaggttggggacactgattctactgcagacggactggatgaggaaatggatgatgattcagctgatgaagtagatgaaggtcaagatgatttgaaagaatcagttgcccatgagtcaaaggatggagatggtgcagaagttaccaaagatggggatgactcagatgattcagatggtatggatgatgatgctatgttccgcattgatccttacattgcgaggattttcaaggagcgcaaccttcctggcagtgaaactaagcaatctcaacttatgcggttcaagctccgtgtccttacattacttgagatatatcttcagaggaatacaggaaataatctggtgctggaggtctattctttcttaatgcaagcttttgtgaagtcacatagtgctgatggcagtgagcaattcaagcaacgtataggtggtatattgcagaaaaggatattcaaagccaaggattatcctaagggtgatggtgtagagattagtactcttgaaagtttgctggagaaagctctaaaattggcatcgcggtcacgatacaccacggttgcttctgtagcccaaaatgctgcattttggcttctgaagatcatcaattcaaagagtcattcgaaacaggagcttgcgagtgttgtcgaaaagttccaatatatattgaccgactacttcaacaacaagaaatcgcggttgaagcttgggtttgtgaaggaggctgtccggaggaatccttgggtaggagaggagctctttggatttgttctgcagaagattggatgcacaaaagctgaatatcgaagagttcaaacgctagaattggtagactgcatactcaaatcttgggctggtgatgattcgagtgcatcgaaggtgttgaagaagcacctttctcagttgtgcgagctgatacaagaagttcttacaaagatcccagaaaacaagtcacgtcgtcaagaagtccggagattttgcacccgagtattgcagacagtgacaaagcttaacctcaaagaccggtttcagaagaaattgaatcctgaaacgctctccctttgtgaggcacagctaggagctgcttttgttcgctttcaaaaatgacattacatttatgaggagactgtatttgttccctttcgaaaatgatagtcactagaaatattttgagctgagctaagttttgttcctcatttcagctacatgagtagattctatcaaattaagctgtatcggtttttgtgacagtatctgaaaggaaaagatattcactgtt

SEQ ID NO: 1504 - DNA, 968 bp, Oryza sativa
  ref <308>: DATABASE ACCESSION NUMBER: AK059534
  ref <309>: DATABASE ENTRY DATE: 2001-12-06
ccccccctcgccactcgttccccttccttcctctcctcctctcgcggaaccttctcgaagcttccacacccccaacctcgcctccaccaccaaccccccatggcggaccagctcaccgacgagcagatcgccgagttcaaggaggcgttcagcctcttcgacaaggacggcgacggttgcatcactactaaggagcttggaaccgtgatgcggtcccttggtcagaacccaactgaggcggagctgcaggacatgatcaacgaggttgatgctgatggcaatgggaccattgacttcccagagttcctgaacctgatggcgaagaagatgaaggataccgactctgaggaggagctcaaggaggccttccgtgtgtttgacaaggaccagaacggtttcatctcggctgctgagctccgccacgtcatgaccaaccttggtgagaagctgaccgacgaggaagtcgacgagatgatccgtgaggctgacgtcgatggcgatggccagatcaactacgaggagttcgttaaggtcatgatggccaagtgaggagggttcccattaaataagttctgtctgaagtgaactaaaactgtcagggcctacaacaaagctgtactttgtgatgttccttttaagtacctatctttgctggtggtaatgttgagtagcgatcgggttaggtggtctagtcatgcgaaacaacatcagatgcctggtttcttttgattgtgatgcttatcttgcgcctgccggagcataggatttgttggggtttcatcatttttcttggatcgttgtgcagatatgcattgcctggttcctttctatcatcatctttacttccctgttgcgtgctgaattgaatggttgcagccatcccccgcatcctgaggctacccatgtgaccatgttttgatgatcggtgatcctggttgaattttagctgatgtctgcaaaattatcgc

SEQ ID NO: 1505 - DNA, 1006 bp, Oryza sativa
  ref <308>: DATABASE ACCESSION NUMBER: AK059535
  ref <309>: DATABASE ENTRY DATE: 2001-12-06
ctagatacaagaacttcgacgagctctacatgtactgctactatgttgctggaactgtggggctaatgagtgttcctgtgatgggtattgcacccgagtcgaaggcaacaactgaaagtgtgtacagtgctgctttggctctcggcattgcaaaccagctcacaaatatactccgtgacgttggagaggacgcgagaagagggaggatatatttaccacaagatgaacttgcagaggcagggctctctgatgaggacatcttcaatggcgttgtgactaacaaatggagaagcttcatgaagggacagatcaagagagctaggatgttttttgaggaggcagagagaggggtgaccgagctcagccaggcaagccggtggccggtaagaagagtcacttgattctcaaggaaacataaagcagattattattgtcggtgcttctatgccatggtgtcaaaaggaaaataaaatatcactgcattgccccgttgcaggtctgggcgtctctgttgttataccggcaaatccttgacgagatagaagcaaacgattacaacaacttcacaaagagggcgtacgttgggaaggcgaagaaattgctagcgcttccagttgcatatggtagatcattgctgatgccctactcactgagaaatagccagaagtaggaggcgggaagaggagataaagggaagatgatgagcaggttaggcttagataggaaaaatcagacagcatctgccttccgattaatgttgaggaaattatattattgtgtgtatcatacatagcatgtatagggaaaatgctgcaggcaggcaggcaggctaggtgatggttgaatatttccttcacatcatgtatgtatatccttccttgatgctacagcacatatgtatgtatgactctgaagaaagagcaacctgtatagtagctaaccggctatggcctatgtatgggccgcagaggtgagcaaacaaaaatcatcatccatggattgattg

SEQ ID NO: 1506 - DNA, 1166 bp, Oryza sativa
  ref <308>: DATABASE ACCESSION NUMBER: AK059536
  ref <309>: DATABASE ENTRY DATE: 2001-12-06
tatgtgcttgattcggtgcgtgacgaggggctccaggccacggcgaggacttgcaagaagctccaggttctccatgtgcttccattgaacgcacttgaggatgccgatgagctggtgtcggaggtcgggcttactgccattgctgagggctgccgagggctccgttcgacgctttactcctgccagagtatgaccaacgctgcggtgatcgccatttctcaaaattgcgtggaccttaaggtattccggttatgcataatgggacgtcaccagcctgaccatgtgactggggagcccatggatgaagggtttggtgccattgttaggaactgcagcaagcttactaggctctccacatctggacacctgactgatcgagctttcgagtacattggcaagtatgccaagtcgctccggacgctctctgttgcgttcgctggagacagcaatctggcgttgcaacacatcctccaggggtgctcgaagctggagaagctggagataagggattgcccatttggggatgctggcctcctctccggaatgcaccatttctataacatgcggttcctctggatgtcaggttgcaaccttacgctgcaaggttgcaaggaggtcgcacggaggctaccaagattggtggtggagctgataaatagccagcctgagaacgaaaggaccgacagcgtggacatcttatacatgtatcggtcgcttgaagggccaagagaggatgtaccaccattcgtgaagatcctataagctgcttctgcagagtggcacttgatacgctgaatgcggcctaagcaacaagggaaggtaagatagctggagtcaggcgtatgatcattttttgtatgcttgaagttggaaggagttctaaagccatctatcagagctgcaaatggttaaattgttgtactactagtagggggggcatcggtatatgcaaaattttctaccgcaagatcataagtgcatcagagcaggcttcttcgagggggcttcatcccctcagttttgtttgctgctctgatggccttctgtttgaggggggcaatctatctatgccggcacaaccaccatggttcctctaatttttttcccaactgaagcttgtcatcagattaaattcattaacacatttcctgtttcttgcctttaac

SEQ ID NO: 1507 - DNA, 1234 bp, Oryza sativa
  ref <308>: DATABASE ACCESSION NUMBER: AK059537
  ref <309>: DATABASE ENTRY DATE: 2001-12-06
tttatgtgttataatggttgaaattactaacaacttgaaactcctgccgttaatcatgcttgtgcttctgatttctaaggccgtgggtgacttttttaatgaagggctgtatgaagtgcaagcccaattaaggggcatccctttacttgactcaagacccaaacaggttatgagaaatatgagtgcgaaggatgcctgcaagaatcaaaaggttgtgtcccttcctcgcgtttcaagaattgttgatattatttctgttttgcgaagcaacaagcataatggcttccctgttgttgatcgtgggcagaatggcgagtcacttgtcataggtctgatacttcgtagtcacttacttgtacttctgcaatctaaagtagatttccagaatagtcctttcccttgtggacctggtatactcaacaggcacaatacaagtgactttgttaaaccagcatcgagtaaaggaaagtcaattgatgatattcatttgacagaagatgagctagggctgtatttggatctcgccccatttctaaatccttctccttatatagtgccagaggacatgtccttagcaaaggtgtacaatctcttccgccaactaggattgcgacatatatttgttgttccacggccttctcgtgttgttggattaataacaagacaagatcttttacttgaggagaacggcaataatgtgacaactgagctccagtcgactagtgtaaggggtcagctgaatggcaaaatgctcagtggcagcacacatctggggcatcctcttcttgatagtattgtggttgaggagtaaatacatgtgaccataatctctcaagataattttgaccgcaagcagctaacctgtcactgcatcctggggcatgtttagctcctcgaacaaggcggccctggactctggctgatgcaacatgaattggattctgcaatcctatgcgacagaaagggtagcaatgagctatcctcatgtagtggctaattaggtgatttgccccataccttggatactagttaggtgattgtaagttgtaactcgtagaaatgtttagatgtttatacccatcatccgtgcataccacgagaaaacatctgattatgtttacacaacgattttataggattcatttttctttacaggagtttgcgcatgtaaataccttttttttttcttaacgggaattacagggaagccccagacctgaggcatgagttcctt

SEQ ID NO: 1508 - DNA, 1539 bp, Oryza sativa
  ref <308>: DATABASE ACCESSION NUMBER: AK059538
  ref <309>: DATABASE ENTRY DATE: 2001-12-06
gttgatgccaacgacgagaagaacaagcctcttgctaccaagtatgagatccagggtttcccgacactcaagatattcaggaaccagggcaagaacattcaggaatacaagggcccgagggaggctgagggcattgttgaatacttgaagaagcaggttggtcctgcttccaaggagatcaagtcaccagaagacgcaaccaaccttattgatgacaagaaaatctacattgttggaatcttctcagaattaagtggcactgagtatacaaacttcatagaggttgctgagaagctgagatctgattatgactttggccacaccttgcatgccaaccaccttccacgcggtgatgctgcagttgagagaccattggttaggctattcaagccctttgatgagcttgttgttgacagcaaggattttgatgttactgctttggagaagttcattgatgctagcagcacccctaaagttgttacttttgacaagaaccctgacaaccatccttaccttctgaaatttttccaaagctcagctgccaaggctatgctatttttgaacttctccactggaccgtttgagtctttcaagtcagtttattatggtgctgctgaggagttcaaggacaaggaaattaagttcctcattggtgacattgaggccagtcaaggtgccttccagtactttgggctgagggaggatcaggtaccactcatcatcatccaggatggtgagtccaagaaatttttgaaggcacacgttgagcctgaccaaattgtttcttggttgaaggaatactttgatggtaaattgtctccattcaggaagtctgaacctattcctgaggtcaacgacgagcctgttaaggttgtggtcgctgataacgtccatgattttgtcttcaagtctggcaaaaacgtccttgttgaattctatgcaccatggtgcgaacactgcaagaagctggctccaatcttggatgaggcagctacgacgcttaaaagcgacaaggatgttgtcatcgctaagatggatgcaactgcgaacgatgtgccaagcgagttcgatgtgcaaggttaccccaccctgtacttcgtcacccccagtggaaagatggttccctatgaaagcggcaggacagccgacgagatcatcgacttcattaagaagaacaaggaaaccgctggtcaggcgaaggagaaggcagagtcggccccagccgagcctctcaaggatgagctctaaacaagtgagtaggagagggcatggatgcttgtggctgtagacatggaggagacgggacctgacggctaacatgtttgacagctccaacgccagattttgccaaggttctgaaagacggtgagatggagagtagtgagagtgggggaaatagttgatgtttcggcatgtctgtcccattgagaaatactgtacaatcaacccgtggtacctagttaattttacccatgcaaaagtgatagtcggtagagaagtggttctggacaagttgaataaagctgcctcggtcgcatc

SEQ ID NO: 1509 - DNA, 496 bp, Oryza sativa
  ref <308>: DATABASE ACCESSION NUMBER: AK104084
  ref <309>: DATABASE ENTRY DATE: 2002-08-28
aaaacgccgccgccgccgccgctctcttcggtctcgcttcccttctccgggagattcagtcgctgttgtggtgtttgcttcatccaccgccaccatgcagaacgaggagggtcagatggtggacctctacgtccccaggaagtgctcggccacgaacaggatcatcaccgccaaggaccacgcctcggtccagatcaacattgggcatgtggatgagaatgggctgtacgatggccgcttcaccacctttgctctctctgggttcatccgtgctcagggagatgctgacagtgctctggataggctgtggcagaagaggaaggctgaggtcaagcagcagtagatcttgctactagttttacctggaagaactcgtttcaatttcatgtctctctagctacttcatgcaatgcctgtgttatcagttcgtactccgaaaaaattcgtgtgacttgatcggtttatcctgataatgttttatccatgttgaagcttt

SEQ ID NO: 1510 - DNA, 1415 bp, Oryza sativa
  ref <308>: DATABASE ACCESSION NUMBER: AK059539
  ref <309>: DATABASE ENTRY DATE: 2001-12-06
agcaagatgctgtggattaccttacttggaccttcatgtacaggcggctgaccaagaaccctaactactacaatctgcagggcgtgagccacaggcatttgtcggaccatttatctgagttggttgagactgtattgaatgacctagaatcaagcaagtgtgtggctatagaggaggatatgtacctgaagcccctcaaccttggtctgattgcttcgtactactacattagctacacaactattgagaggttcagttcaatgctaactcaaaagactaagatgaaagggctcctggagattctagcctctgcttcagaatatgctgagcttcccagtcgccctggtgaggaggatttcattgagaagcttgttcgccaccagagattttccatcgagaagcccaagtatggtgatccacatgtcaaggctaacgcactgctgcaagctcatttttcaaggcacactatcttagggaacctggcagccgaccagcgggagatactcctttctgctcatagattgctccaggcaatggttgatgttatctccagcaatggatggcttacgcttgctcttaatgcaatggagctgagtcaaatggtgacacaaggcatgtgggatcgtgattctgttcttttacaacttccacatttcaccaaggagttggcacggagatgtcaggagaatgaagggaggcccattgagagcatctttgatctggctgagatgagcatcgatgagatgcgggatctgttgcagcaatcaaaccctcagctgcaggatatcattgaattcttcaagcgtttccccaatgtcgatatggcttacgaagttcgcgagggtgatgatatcagggctggtgacaatgtaactgtacaggtgaccctggagcgtgacatgacgaacttgccttctgaggtggggccagttcatgcccccaggtacccaaagcccaaggaagaaggctggtggctggtaattggtgatagctctaccaatcagttgcttgcaatcaagagggttgcacttcagaagagggctcgagtgaagcttgagttcaccgctgcttcagaagctgggagaaaggagtacatgatctacctgatgtccgattcttatctgggctgcgatcaggagtacgagttcaccgtcgatgtcatggatgctggaggggattgatcccaaggccagaaagaggatgaaagctttgcccagcccccaggtgtgtatggagctgggtggttgcttgtacgctcgtagcaattcctaatgtcctatccacacttgtatgtgtttgtactcgtttttatctttagccattttcttagtgtaactgatgctcacctctgctgctacctgtggtcatctttggggatctttattagctagcctatggctgtgcttcttgtgatc

SEQ ID NO: 1511 - DNA, 934 bp, Oryza sativa
  ref <308>: DATABASE ACCESSION NUMBER: AK059540
  ref <309>: DATABASE ENTRY DATE: 2001-12-06
tcattgcgggatgactccacaaaagctccctgaccttgttgaacacaatccactcattgctgttgaaattctttcgaaattgatgaactctcctgacattgatggttacttagatgttcttgtgcatatggagatgagcctgcattctatggaagttgtaaacaggcttactactgctgtagaactcccgacagagtttgtccatgagtacatctcgaattgcatccaatcatgtcagaacgttaaggataaatacatgcagaacaggttggtgagactagtttgtgttttccttcagtctctcatccgaaacaagatcataaacgttcaagacctcttcatcgaggtacaagctttctgcattgagttctcacggataagggaagcagctggcttattccggctgctcaaatctttggagtgaagaaatgaattatatgttggtcgtatcgtcatcaaatgtttggagatttctggttttgggttagttctctggactctgggtgctcaaggcctggtgatgtgtaccattttctatcagaatctgcagcacaccctccttacagcagtgcacacgcttgaaagagttattaagaagactataccaagaacagattcagtactcaatttatactcggtgcaaagttagatctgcttgtaagtccactgtacggtgacaaataatagatgcatgtttttgatataatcttcaatatctgtagcgtaattgggcaaagaaaaacattctgtcactaattattcttgtagtatatgtttactcggtgcagcatagtcggacattctgtgttaacaccaagcctgccagtggtctgcagttttatacagcaaggttgcggcgtcttggtttctgtcagcttaaattcctgtgcacggaagacagcttgttgaatacatcgtttccatgtctatacac

SEQ ID NO: 1512 - DNA, 1160 bp, Oryza sativa
  ref <308>: DATABASE ACCESSION NUMBER: AK059541
  ref <309>: DATABASE ENTRY DATE: 2001-12-06
aaaaaaaaagtgaacacaagaagctcttgttctgaagattcagaaagagcaagaacttgttgatttcaatcaagaaatcaaagatatgtatccttacagattcagcaacgtgatgatcggatacctgaacctggcgacgctgctggcgtcgatcccggtgatcggggcggggctgtggatggcgaaggggtcgacggcgacgtgctcgtcgatgctgcagacgccgctgctggtgatcggcttcgtcgtcctcctcgtctccctcgccggcttcgtgggcgcctgcttccacgtggcgtgggcgctgtggctctacctcctcgccatgatgctcctcatcgccttcctcctcggcctcaccgccttcggcttcgccgtcaccgccggcggcggcggcacccaggtccccggccgcccctaccgcgagtaccacacctccgactactcgtcctggctgcagaagcacatccaggacgccaaatactggcgccccgcgctcgcatgcgtcgttggatccaaggcttgccccaagatcgccaattggtcacccatggattacctccagcatgatctcaccccaatccagtcggggtgctgcaagccgccgacggcgtgcgcgtacagcggcggggtggccgtcggagcgcaggacgaggactgcttccggtggaacaacgcggcggggatactgtgctacgggtgcgagtcgtgcagggccggggtgatggagaaggtgagggaggattggcacaagatctcggtgctcaacgtcatggtgctggtggtgctcatctgcatctgcgcctgcggctgctgcgccttcaggaacgcccgccgctccgtctccgagtacccttacggggtaaaccgcatgcacaagatccacccccgatgggactactactggtggcgatggtggcgtgataggagagaacagctctactaggctagctatttgtattctacccttgtatgatattttgatcttgcccaagaaaattaaaatagttgagagttgatcgttcctcaatattgtactctgaacatctgaaagtcttcaactctctgggttttcatatgtacatcttccttcagtgcgaataattaagctgttgtacatatttgggaaatgcaaagtagcactcagcagatgataaagc

SEQ ID NO: 1513 - DNA, 589 bp, Oryza sativa
  ref <308>: DATABASE ACCESSION NUMBER: AK059542
  ref <309>: DATABASE ENTRY DATE: 2001-12-06
cggatcggaaaggaaaccctaagcgaagcggaggagagaaagcaatggcatccctgagcaagcgcggcggcggcggcggcgagggggagggcatcctggcctccttctcccggtcttcggtggcggcgcatgggcgcgaggcggcgaccatggcgaagaagctgctgcggagcacggggaaggcggcctggatcgcggggaccaccttcctcgtcctcgtcgtcccgctcatcatcgagatggaccgcgagcagcagctcaacgacctcgagctccagcagcaggcgctcctcggcgggccgccaccgcccgcgcctctcaaatgatccatccgtccatccttagcttctactgctgcctacctatgtcgtcgtcgtcgtcgtcttagtctttttcttcttttcttcttctcttagtgtacactgctgctactagtgtttttgcctgtctagtcggacaaatcaaaactttcttgttttcatcatcgatctatgctatgctgctctgatgagatgtcgctttttctttcctgctgctactttattttcacgctcatcttatcatgccgaataaatcgatcggttactat

SEQ ID NO: 1514 - DNA, 611 bp, Oryza sativa
  ref <308>: DATABASE ACCESSION NUMBER: AK059543
  ref <309>: DATABASE ENTRY DATE: 2001-12-06
agaggactttgtgaaatgtgtacgatgtatcaggattctttctccacaggaagaaatgcagatgagattagtcggcgactttggagacagctttctacccaaccaagcttgcagcagctctgatgggggtcatccctggaggataaccggcgactagaatgtagaaactgatcaaaacccactttacatacatactgtagttgctgtcgcctcaagaccgacttttttttgactgttagtctcatgacagtgcaaaggatggtagtaggcaatgataattttggcttcgaaactttgagcttacagtaaatttatcgacaaggaaactcaataaatatggatacaagaggaaggctgtgttggagtgcccagaagcctccatttataagtttactccattattcagactattgtctctgttgcagtcttgtagatgtgctaattctctgtatgtttttatggccttgttaccctcttgtatagcccgtccatatgtctatactacagtgtatatattgctgctgtataagctgcagaatggagattgtcagatatcaccatctgtaagctgttacagatctaaatgggtaaaaaaaaacaacattttatac

SEQ ID NO: 1515 - DNA, 1177 bp, Oryza sativa
  ref <308>: DATABASE ACCESSION NUMBER: AK104085
  ref <309>: DATABASE ENTRY DATE: 2002-08-28
tggatgagatagttgaactggcaaagaaactccaggaggagaccaatataaaaccactgtgggggactgcacagcttttcatgcacccgcgctacatgcacggtgctgctactagcccagaggttaaagtgtatgcttatggtgctgctcaagttaagaaagctttagaggtcacccactacctaggcggtgaaaactatgttttctggggaggaagagagggttaccaaactcttcttaatactgacatgaagagagaacttgaccatttggctagttttcttcaagctgcagttgactacaagaagaagattggatttaatggaacactcttgatagagcctaaaccacaagaacccacaaaacaccagtacgattgggatgttgcaaccacattctctttcctacagaaatatggtctaacaggagaattcaagataaatgttgaatgcaaccacgctactctatctggacatagctgccaccatgagcttgagactgcaagaattaatggtctgcttgggaatattgatgccaacactggtgatccccagatcggttgggacaccgatcagttccttacagatatttcagaggctactttggttatgtcaagtgtggttaagaatggtgggcttgcacctggtggattcaactttgatgccaaattgaggagggagagtactgatgttgaggacatgtttctggctcatatatcgggaatggacaccctagcccgcggccttcggaatgttgtcaagctgatcgaggatggttccctggatgagcttgttcgcaagcgctaccagagttttgatagtgagatcggtgccttgattgaggctgggaaaggagacttcgagacactagagaagaaggttctggagtggggtgaacccattgttccatctggcaagcaggaactggctgagattctgttccaagctgctctatagatggtgccgtggtgctgttcatagttctaggaataaagcctagcacgcctttggaaacggaatgtgcattctatcattgtctaccacgagcaataatctagttatagtttagttattagccttccatgcaatgaacttttgtacactacagcatggaacttaaataatgatgagttgtgcctttctaaactgaaataaaagagtcggtacctttatgaatt

SEQ ID NO: 1516 - DNA, 1177 bp, Oryza sativa
  ref <308>: DATABASE ACCESSION NUMBER: AK059544
  ref <309>: DATABASE ENTRY DATE: 2001-12-06
ctcacccacatccgccgccgccgccgcagaatcggaagcaatccgccgcgagtcgcgaccatttcttgcgagtagtagtagaggggagagtgagtgaggggcgtgctgcaatggcgactgaggaggttgtccctgaggttccggtgaccgaggtggaggctgccgcggcggaggaggccgtcgaggagacgacggcggcggaggagaaggccgccaagccggcgaaggagaagaagaaggccggcaggccgccgaaggagaagaaggaggccaagccggcgaaggagaagaaggtgaaggaggccaaggccaagaagccccgcgtcgccgccgcccacccgccgtacgccgagatgatcatggaggcgatcgtggcgctgaaggagaggactggatcgagctcccaggccatcggcaagcacatccatgccaaccatggcgccaacctgccgcccaacttccgcaagctcctctccggcaacctcaagaagctcaccgccgccggcaagctggccaaggtcaagaactccttcaagctctcctccacccgccctgccgctccggccgccgccgacgccaagcccaaggccgcccccgccacgaagcccaaggtcaagaccaccaaggccgcgaagccggctgccaaggcgaaggctcctgctaccaccaaggccgcgaagccggcgaccaagaccaagatcaaggtcgccgccgcgccggcggcgaagcccaaggcgtctcccaaggcgaaggccaagaccgccacctcgccggtgaagccccgcggccgccctgccaagtccgccaagacctctgccaaggactcgcctgccaagaaggcggcgccggtggctgccaagaagaaggcggcggcgaccaagaagaaggcgtcggtggctgcggcgccggctgctcgcaagggtgcggcgaggaagagcatgaagtagaggtcgccggcgatgatgccacctggattggattgcccaccttttgatctccacaggcgacagcgccattagcatcatcatcagcaagtagtagcagaaattgtgttctgtaaatgcttgttcgtcttagttcgtttcacctccctctaggcggtatcatcatcttctcgcctgtaatgataggatcccatcatcctcaaaaaccataatacaaatatctatttcgtctt

SEQ ID NO: 1517 - DNA, 1386 bp, Oryza sativa
  ref <308>: DATABASE ACCESSION NUMBER: AK059545
  ref <309>: DATABASE ENTRY DATE: 2001-12-06
ttattcaggagcgtgctcgtcaacttccaccacagagaagtaagatatggactacacctatttactcatctcttccatcagagcagcaaatgaatgcttttaagcctgcaccagctggaactcgcaaggtggttttagcaacaaatattgcagagacttctgtaacaatacctggtatcaaatatgttattgatcctgggatggtcaaagctcgtgcttataatcctgtaactggaatggaatctctgatcattatccctgtttcgaaagcacaggctcttcagaggagtggccgtgccggacgagagggaccagggaagtgctaccgattgttccaagaaagtgagtttgataagctggtggattctactgtgcctgagatcaagcgatgtaaccttgcaaatgttgtactacagctcaaagctcttggaattgatgacatcataggttttgattttatggagaaaccatcaaggacagctattttgaaatcattggagcagctaattttattaggtgctctgactgatgattataagttgtcagatccagttggtcgtcagatggctaggctacctttggatccaatgtactccaaggcactaatagtagcaagtgaattcaagtgcttggaagagatgttgattgttgtctctatgctttcagtggaatctattttcttcagcccacgtgagaagttagaagaggcaagagctgctaggaagagttttgaaagctctgaaggggaccacataaccttggtgaatgtatatcgagccgctaaagaatgcttggagaaaagcaaaaatgcaaatgccaaagagaaaacaatggaaaaggcattgaacagatggtgcagggaaaatttcatcaattaccggtctctaagacatgcttgtgatgttcacagccaaattcagggccatgtccaacaaatggggcttaacgtatcatcgtgtggggatgacatggttctgttccggagatgcctcacagctgctttcttcttgaatgccgcaatgcgacagccagatggatcatacagggctcttgcaaccagccagagcgtgcagatccatccgtcatcggtgctcttccaaaagaagccagattgtgccatcttcaacgagttggttcgaacgagtcagaattacgtcaaggacctgacccggatcgatcccgtgtggctggctgaacttgccccgcaatattacgccactgaggattgattttgatctgctgccatagttcactgtaaccttgtaaacaccagagtctgcttagttaatcacagtgtcctgtcctggcactactcactagtgtggcgttcaaagctgtgaaacactcatgtctttgtttgaaagaaagctagtctcagttttgatc

SEQ ID NO: 1518 - DNA, 1057 bp, Oryza sativa
  ref <308>: DATABASE ACCESSION NUMBER: AK059546
  ref <309>: DATABASE ENTRY DATE: 2001-12-06
acgggatcgagtacggcgacatgcagctcatcgccgaggcctacgacgtgctccgccgcgtcggcggcctgtccaactcggagatcgctgacgtcttcgcggagtggaaccggggggaattggagagtttcttggttgagattactgccgatatattcacggtggccgacccgcttgatggcagcggcggcggtgggctggtggacaagattcttgacaagacggggatgaagggaaccgggaagtggacggtgcagcaggcagcagagcttgcgattgctgcgcccacgattgcagcatcactggatgggaggtacttgtctgggttgaaggacgagcgtgtggcggccgcaggggttctagaggcggaggggatgccatcagggctactcgagacgattaatgttgataagaagatgctagttgacagggtgaggcaagctctgtatgcgtcaaagatttgcagctacgcgcaggggatgaaccttctgcgagcaaagagtgtggagaaggggtggaatcttaacctcgcagagcttgcaaggatttggaagggcgggtgcattatccgggcgaagtttcttgataggatcaagaaggcgtatgacaggaaccctgagctggccaatctgatcgtggacagggagtttgcaagggagatggttcagcggcagaatgcatggcggtgggttgtggctcgtgctgtggaggctgggattagcactccagggatgtctgctagcctttcatactttgacacctacaggtgtagtcggctgcctgcaaatctgatccaagcacagagagacttgtttggggcacacacctatgagcgcattgaccgtccaggttcgttccacacagagtggactaagctggcgagaaagagtaatggtgcggccatttgaggacttgaatggtatcagtaactctgtgtggtgtctctttgtgggttctctttgaattcactactgttgtctttatgattctaggtctgaattctgtactttgaataatgaagtgtcatgtgcggtatgcatggaaggaacattcatgt

SEQ ID NO: 1519 - DNA, 626 bp, Oryza sativa
  ref <308>: DATABASE ACCESSION NUMBER: AK059547
  ref <309>: DATABASE ENTRY DATE: 2001-12-06
ctagaaagattgaagaaacagatgacacaaggaatcagtcttatcccgtccctgttgcaacaaggacaaccacaatgcctaataagcatagtgttaggctggctgttgtcttcggtctgatatcatctgagattggatcccctattcttgtcaagaagaatgtgcgtatatgcaaccactgtcatcatgcattgaagttgatatcaagatattcaggacggaggattgttgtcggtgactcaaagatctatcatgaattctctgatggctcttgttgctgtggtgactactggtgaatggatatcactgtttcagtatttgacaatgttcttcacaccttcggcaacaccaatggaacgcctgaatgaataggtgttgtggcaaaatatcatcataaagtcacagcttagatgaaccatcgagtatgagtccaaatgctacagctgtatcaattttcggggggcacatagacgagaaatcaattcccaggtactggtacagtgttactccggtagcagcggctcaaagtgaaagggtgaatatgcacactggacaggaacctcctcttaatactgtaacacattgatatgatgtacaaagtccattcttttcgagtgaagattctg

SEQ ID NO: 1520 - DNA, 848 bp, Oryza sativa
  ref <308>: DATABASE ACCESSION NUMBER: AK104086
  ref <309>: DATABASE ENTRY DATE: 2002-08-28
aaccttccaaaaccaagagaaaatcgaaaagaaaaaaagaacgcatctttcctgcctttcctcctcccaaagctccaaatcgcgccccgccccccaaatccacgagcaccagcgatcgccgtcatcctccgccatgatccggttcatcctgctgcagaatcggcaggggaagacgcggctggccaagtactacgtcccgctcgaggactcggagaagcacaaggtcgagtacgaggtgcatcggctggtggtcaaccgggatcccaagttcaccaacttcgctgagttccggacgcataaagttatatacaggcgatatgcaggactgtttttctcaatgtgtggggatatcactgacaatgagttggcatacttggaatgcatccacttgtttgtcgagatattagatcatttcttcagcaatgtgtgtgaactcgacttagtatttaatttccacaaggtttatttgatattggatgagtttattctcgctggagaacttcaagagacaagcaaaagggcaataatagagcgaatgggtgagcttgagaagctggaataagaagaaacggtgtacactagcgtacatgggcagatgatcaagagtgttgccatctctttctctgccgtgccaagaattgctctgcattttgtacaattctttgtagctattgtgttatacctagctcacctacattttcaccggctgttcatctgtgtaagtctcctttgttgcttggtgaggctactacacactgctagattgttctgttgattaccatggaatcagtcatctttgtgcatttgcttgaagtaatcatcattatagcaatctcttttttttcacc

SEQ ID NO: 1521 - DNA, 728 bp, Oryza sativa
  ref <308>: DATABASE ACCESSION NUMBER: AK059548
  ref <309>: DATABASE ENTRY DATE: 2001-12-06
gaagccctagctcctcccgccgccgccgccgccgccgccgccgcctctccactcgagagacccagccgccgccgccgccgccgccgccatgtcgctgatcgccggggaggacttccagcacatcctgcgtctgctgaacaccaacgtcgatgggaagcagaagatcatgttcgcgctcacctccatcaagggtgtcggccgcaggttctccaacatcgcctgcaagaaggccgacatcgacatgaacaagagggccggtgagcttacgccggaggagctggagcggctgatgaccgtggtggcgaacccgcggcagttcaaggtgcccgactggttcctcaacaggaagaaggactacaaggacgggaggttctcccaggttgtctccaacgcgctcgacatgaagctcagggatgatcttgagaggctcaagaagatcaggaaccaccgtggtctgaggcactactggggcctccgtgtgcgtgggcagcacaccaagacaaccggaaggaggggtaagactgtcggtgtgtccaagaagcgataagcctaagaaccacccgagacttgatgaagcgtttcgttgggtgatgttttgccctaggataatattttgcagctatggaaccttgtcgtaatgtatcttgaagagtgtctttgggaactaagagtaatttacttttcttgaaactattgcagtattgactccttgtttattgcttttctcc

SEQ ID NO: 1522 - DNA, 1367 bp, Oryza sativa
  ref <308>: DATABASE ACCESSION NUMBER: AK059549
  ref <309>: DATABASE ENTRY DATE: 2001-12-06
agcggaaggcaatggggatgcaagacatacagtaagaaatggcagcacaaaatcaaatggtggaaatcacaaagaaatgagggagatgagattgagtgctcgtctgagcaatagttcatcgaatggagtttcacgactgatgtccattggtagcaatgaagctggtccaagaagaggaatggttcttccatttactcctctatccatgtcttttgatgatgtgaactactatgtcgacatgcctgcagaaatgaagcagcaaggagtggtggatgataggctccaattgttacgtgacgttactggatcatttaggcctgcagtgctgacagcactcatgggagtcagtggagccggaaagacaactcttatggatgttttggcaggaagaaagactggtggttacattgaaggagatatgagaatttctggttatcctaagaaccaagaaacatttgcaagaatttctggctactgtgagcaaaacgatatccattcacctcaggtcacagttagggagtctttgatatactctgctttcctgcgccttccagaaaaaataggagatcaagaaatcactgatgatatcaagattcaatttgttgatgaagttatggaactagtggagctcgacaatctgaaggatgcgttagttggcctgcctggaatcacagggctttcaacagagcaaaggaagagattgacaatagcagtggagcttgttgcaaatccctcgatcatcttcatggatgaaccgacttcaggtcttgatgcaagagcagcagccattgttatgagaacagtgaggaacacagttgacactggacggacagtggtttgcacaattcaccagccaagcattgacatatttgaggcttttgatgagctgctactactgaaaagaggagggcaggtgatatactctgggcaattgggtcgtaattcccagaaaatgattgaatatttcgaggcaattcctggtgtgcctaaaatcaaagataagtacaatccagctacatggatgcttgaggtcagttcagttgctgcggaagtacgcttaaatatggactttgctgagtactataagacatcagacctgtacaagcaaaacaaggtattggtgaatcagctaagtcaaccagagccaggaacatcagatctgcatttgagcacatctgcagccttacatatgatttagatgtaacatgtattttatgtggaaacgttacatctgtttgcccatgtaactctagtggactatcctgggggatgacactcgatctgcagttcctgaatgcctgtaaagcgcattctggtgtatccatcggtgccttgcaatggttaagaaatttagtggaccgataagc

SEQ ID NO: 1523 - DNA, 800 bp, Oryza sativa
  ref <308>: DATABASE ACCESSION NUMBER: AK059550
  ref <309>: DATABASE ENTRY DATE: 2001-12-06
cttcgccgccgcctctctcccgcaccaagccgcctgagccctagccgccgccgccgccgcgcgccaccaccgccgcaaccatggccgccgcgctcacccgcccgccgccaggcacggtccagtgcttcgggcgcaagaagacggcggtggccgtctcctactgcaagccggggcgcgggctgatcaaggtgaacggcgtcccgatcgagctgatcaggccggagatgctccgcctcaaggcgttcgagcccatcctgctcgcggggaggtcacgcttcaaggacatcgacatgaggatccgcgtccgcggcggagggaagacgtcgcagatctacgcgatccgccaggccatcgccaaggccctcgtcgcctactaccagaagtacgtcgacgaggcatccaagaaggaggtcaaggacatctttgcccgctatgaccgcactctactcgtcgccgaccccaggcgctgcgagcccaagaagttcggtggtcgcggcgcccgcgccaggttccagaagtcgtaccgttgagcgctcgccggatcgattcggagcggtgttctcttttccaccctatcaatggagctattttgctggttctacatctagctactgctttacttcaagtttagtctttttaagcttagtcccgaacctttttgacattgtgaaatggatgcgactgaggcgtttaagactatcgtagtctctggaatatggttttgcatgttacctatgtccagggaagttgtgatactattgccttaattaatgtttatgctatgttatgagttttattct

SEQ ID NO: 1524 - DNA, 767 bp, Oryza sativa
  ref <308>: DATABASE ACCESSION NUMBER: AK059551
  ref <309>: DATABASE ENTRY DATE: 2001-12-06
agatccaattccacacgagaatacataccagagttgagggcttgaagcgctcggagtgaagggagaagaagagcggcggcggcgatggaggggtgggacaaggggacgaagagcgtggtgggcgagatcccgctgctgtcgacgcgggcggggccccgggacggcgaggcgtggcggcagcgtctcaaggaggagtaccgcgcgctgatcgcctacacgtcggtgaacaagtccaaggacaacgactggttccgcatctccgccgccaaccccgagggcacccgctgggagggcacctgctggtacgtccacaacctccgccgctacgagttccccctccagttcgacatccccgtcgcctacccccaggtcgcccccgagatcgagctccccaccctcgatggcaagacccacaagatgtaccgtggcgggaagatctgcctcaccgtgcacttcaagccgctgtgggcgaagaactgcccaaggttcgggatcgcgcacgcgctgtgcctcggcctggcgccgtggctggcggcggaggtgccgattctagtcgattcgggcatggttaagcacaaggacgatgaggcggctccggccgatgcagcggctgctgcgtctggatctgccgctgcttcgtaattgtaagtctgtgtcatgtggctgtatcagggttggaaatccacccagttgtgaactaataagaataacacctatacaatgttgatgcgctgatttctggttgaagatacagttagttgttgact

SEQ ID NO: 1525 - DNA, 1800 bp, Oryza sativa
  ref <308>: DATABASE ACCESSION NUMBER: AK059552
  ref <309>: DATABASE ENTRY DATE: 2001-12-06
tagtatggtctcctattgaacttacagtagataacagaagtcagattttagtactattgaactatgctgctggtaagattgctgtagatattaatgaaacggttaaaaacggggatccatcttacctgaggctctcacaattcctcgctgttaaccacattaattgtctagctactcttgaaggcttccaatcttgtgctaatctgctggtgaagtatatggaggagtatccaatgtgtcctcatattcttgttttctcagctcggctacatagaaagtacggttcatgtcctggtctgaaaggatttgatgaattgctcctgggttggcctaaagaggtgcaaggaattcagtatctgtggaaccaatgtgctgagcatgctctggcagataatatcgagctagctgagaagttgctgactcgctggtttgaagaatatggaaaagatggtgatattcaaagtggtggtgctactagaccaatggagatcagcaatgaagagtctgtacggtcatcagtttcctctatacaagaagttggttctggtacatctacatcagaggatcaaatcttttggctattaaacctctcattatacaggacgatagagaacaatctacaggaagcaaaagttgctatggacaaagcattgaagttagcacatggggagagctatgagcactgtataaaggaacatgctgcaattcacacactggagaaaacgtcatcatctacagatgttcaaactcaagcaaccttcagtcttatcagtggttatcttgtagatcaacggaacttgcccgtgagggatctgctgtcaagaaggtttatgaagaatgttaagaagcacaggcttaagcggttgatagatgagactataggcccaacttccgcgaatcctgctctgataaactctgtcctcgaggtgtgctacggtccatctctccttccagaaacgataggtgaagttaagtacctggtcgattttgttgaatcagtgatggaggttcttcctgcaaactaccgtctggccttggcggttggtaaattcatggttaagcattgcacaggtgatgactctatttccatgggcacccgattctgggccagctccattctgatcaacgccattttccgagctgttcctgtcgcaccagaatcagtatggttagaaggtgccagtctccttgagaaacttcaggcagcagagaccgtgaagagattctaccagcaggcaacctcagtctacccgttctccttcaagctatggcactcttacttgaactcctgtaaggccagtgggagcatcacagagagcatcgccgaagctgcgaggcaacggggcatcgagctgagcgtaacgcctccctagcaggggccctcttggtttgatgacgtggcgattcgccaggtggagctgtagttagtgttgtgtttactggaaagtgagagtagatacacccggtggtgatggggcgactggataattttcttcttgtttaggcacaggtttagtgacacataggcggtggataccaaccataccatacatcacagcagctgctgttactgatggtgtgacttatggatcaaaaaaagaggatataggcatacggttttgcatgcccccacagagtggagttttggctgactcgagagtatgatgtttttgtaggcagatttcttgatctgtttcaggtttatgtttgtttaccctgttgcagtgtatggcatgcacaactgttgtttttttgaaacattatgatcgatcaatcatgaatgtgaatgagaattttgtt

SEQ ID NO: 1526 - DNA, 1329 bp, Oryza sativa
  ref <308>: DATABASE ACCESSION NUMBER: AK059553
  ref <309>: DATABASE ENTRY DATE: 2001-12-06
gagagagagagagagagagagagagagagagagagagagagcagtgttgggcgatggctagaccagctccgctgctgcttcttctcgcggcggtgtgcctagtggccgccgcctccgccggcggtgccgatgcggcggagaggaaggcgacgacggtcggcgtctatgagctcaggaagggagatttctccatcagggtcaccaattggggagcggtcatcatgtccgtcgtgcttcctgactccagagggaaattggacgatgttgttcttggatatgacaccattgctgaatatgttaattcttctacttactttggagcgctcgtcggacgggtagccaacagaattgccaaggcgcggttcgtgctcgatggaaaagcttatcatctgtatccaaatgatggcaaaaacacacttcacggtggtcacaggggtttcagcaatgttacatggacagtgaaggagcatgttggtggaggtgacgcaccatacatcacactgtactaccatagctttgacggagaacaaggattcccaggcgccctagacgtgtacgtgacgtaccagctgtccggcccgtacgtgctgagcgtgcacatgaacgcgacggcggcgggcaaggcgacgccggtgaacctggcgcagcactcgtactggaacctcggtggcacgggcagcggcgacatcctgggtaacacggtgcagctgttcgcgtcgcggtacacccccgtggacgccgagctcatcccgacgggccaggtcgcgcccgtcaccggcacgccctacgacctccgcgcgccgacgcccgtgggcgcgcgcgtccacctggtgacgggcggcctcagcaagacgggcgccaccatctacggcttcgacaccaactacgccgtggacggcggtgacgacgtcgacgcgcacgcgcacgcgctgcggcgggtggccgtcgtccgggacggcaagtccgggcggtcgctggagctgtgggcgaaccagcccggggtgcagttctacaccggcaacttcctcacggccgacgtgaaggggaagggcgggaaggcgtacgggcagtacggcgcgctgtgcctggagacgcaggggttccccgacgccgtgaaccaccccaacttcccgtcggtgatcgtgaggcccggacaggtgtacaagcacgagatggtgtacaagttctcgttctagtttaggtgactatacatggatcatatgtggtcattggtcgatcgcttcatctgctgtaagttgtgacattgtcggtgtcggtcggtgcaataatatgatatgcgttgatttgcaataagacgcatgggggaag

SEQ ID NO: 1527 - DNA, 858 bp, Oryza sativa
  ref <308>: DATABASE ACCESSION NUMBER: AK059554
  ref <309>: DATABASE ENTRY DATE: 2001-12-06
agaaccttttctcccatggcgctcctccgagctctccggcgagccctcccgccgctatcctccgcggcggcgggggttctcctccggggcgcgacgcgtcatgctgctcctctcccccttcgtcccccgcctcttcttcggctgctggatccgatcgggctccgcccattctccgccgccgccgccaccgcgtcgcaggcgccgtccatgggggccggcctcttcagcgggctcatggacacccggttcccgaagcggcggcccgggttcaagtcccggcggaagagggccagcctccgccccaaaggtccgtactactgggtgaagtgcaagcctggggagcctatcccggcgaaccagccgaatgaaggcagtgtgcagggaaggaaggaaaagaagaggatcaagcagcgcaaggcctttatcatggctgaaaaaaagaagcgcaaagcacaatattctgctgctgttaagagaaaggaagcagaaaggacagaaaggaagatggctgcagtggccagagagcgggcatggactgaaaggttggctgatcttaaacggattgaagaagagatgaaacctgcgacggcttaagtagctccctcgaaaatggcaagaaatctaacccgcttcttctgctgcgttttgtccctgttattttggatgacatatatgttctgtgctattcatggatgtaaaaatcctttgatgggacattagttgtaccgcttctatcaacagtattctcaaatttttgttccctgtattggagtatctgttctatgttgtatctaaaataaaagatgtgattttcgttttgtgccagaggccaggaatggccaacatggcaacatctgc

SEQ ID NO: 1528 - DNA, 1217 bp, Oryza sativa
  ref <308>: DATABASE ACCESSION NUMBER: AK059555
  ref <309>: DATABASE ENTRY DATE: 2001-12-06
ctcgctctgcccgctccctctccctctccggcgccgccaccgagcgccgccgcctctgccacccctcgcgccgccacctccgcctcccccttacgccgtccccgttgtcgggcgccgccgcaatatctccctctatcgttcgcctccctcttcttgtgttgtggtggtgcggtgcgacttgcgagtgagctgcatataccctacgaatcgaatcgaattcgaagcccgccgccggcgatggccgtcgctggcctgctactccgacctcctccgtgcgtcgccatgtgcactccttccccttcccctttcccttcctcacagaggaggaggaggaggaggctcacgctcgctcagccctactgcacgctcggcctatccttcgtctccggccgccaccaccgcttcctcctccgccgccgccgccgtacggagagcaaaagaacaagtcgtggaacgggtgtttatgcttctttatttggagttggagctcccgaagctctggtcattggagtggttgctctgttagtctttggtcccaaaggactagcagaggtagccaggaatttggggaagactttgcgtgctttccagccaaccattagagagctacaggatgtttcaagggagttcaggagcactcttgaacgagaaattggacttgatgaagttcccccatcaatgaactacaggcccccgaccatgaataatagtcagcaacctgctattgaccaaagctcggatgataagcctgaggctgcaccttacaccagtgaagaactcatcaaagtaactgaagaacaactagctgcgtctgcagctgctgcttggaatactcaagaacctcctccatcacagcaaaaagaagcagcagctgcttctgaaagtaatgacggtgctatatcaagagggagtgatggtgctggtgctgcaatgagtgagcccaatcggaacatttctgagaagacggaaaccgagagatgaagcataacgatgtagagtactactgtattaagactgacgcaagaacacgctgtggaggttggaaagagcggattatgatttttaatttggtgagctgggtatgcctgggtttgggtagggaggagtgatttgaggatctggtcagctgtgatgcatatgtgtagtgttgctttgctgtgtagtagatcgactgtaatagaatggacggacagactgaaaggtgatcgtccctctct

SEQ ID NO: 1529 - DNA, 1295 bp, Oryza sativa
  ref <308>: DATABASE ACCESSION NUMBER: AK059556
  ref <309>: DATABASE ENTRY DATE: 2001-12-06
aaaacaactgaatgaaggacgccacctcaagaagcgccctactgaattccgcgtggaccgtgtgcttcaaccatttgatgctgccaagttcaacttcaccaaagttggccaggaggaggtgctcttccaatttgagaatggtggtggtgatgacagcttctttgtggagagctccccaatcagtgttgctgatcgtgctcctaatgttgttgcaatcaatgtaagcccaattgaatatggccatgttcttctcattccccgtgtactggaccgcctgcctcagaggattgaccaggagagcttcttgcttgcactgcacatggctgctgaagccgcaagcccatacttcaggcttggctataatagtttgggtgcctttgcaaccatcaaccacctccactttcaggcatactacttgacagtgcctttccctgttgagaaggcagctaccaagaggattttccttgctgagggcacaatgaatagtggagtaaaggtgtccaagctgatgaactaccctgtgaggggactggtttttgagggaggcaactcactgagcgatctggccaatgtggtttccagcgcttgtatctggctgcaggacaacaatgtgccttacaatgttcttatctctgactgcggcaaaaagatcttcctcttccctcagtgctatgccgagaagcaggctctgggagaagtgggccaggagctactggacacgcaggttaacccagctgtgtgggagatcagtggccacatcgtgctgaaacgaaggagtgattacgaggaggcatcagaagcttctgcgtggagactcctcgctgaggtttccctgtcggaggaacgcttcgaggaagtgaaggcctacatctttgatgccgctggtctggttcagtccgacgaggaggaagtcagcgaagacgaggacgccacctacacgcctgtctccattgcccctcctgctgtcgcggaaggctgcctcgtccttcagtgagacggtagaacaggttgtcggcctggtaaagcgctgtgccgccttcgtcttctcatcagtcttcttcagtcttcacccgctggtcgcctagcttcgtcatagttatggttgctggtcttttataaggatcaatgtaatcgaactgcctggagtcttgtgtctgaacctgcatgctacttgctcctcccttccctgctgctctgatattcagactctgcaaatattaagcagagaaactgtgaaactgtttgtattgtttgtgctgttgagcactggatctaatgtgatgaacattgttaat

SEQ ID NO: 1530 - DNA, 1013 bp, Oryza sativa
  ref <308>: DATABASE ACCESSION NUMBER: AK059557
  ref <309>: DATABASE ENTRY DATE: 2001-12-06
gcgcacgctccaatggcggccacggctgtgaccctgccgtcctcgccggcccccttccccgtcaccaccaccgcctcctcctcccgtaacgtccgcctcctcctccgctccccgcctcctcgccgagccctccgcgtcgccgcctccgccgcggccgacgcgccacccaagccggcgccgccgccgacctcgccttcgggcatcgtcctcgtcgaccccaccgaggcacagaaggtgcaccgcctcaaggctgtatacgaccagaaggtggtccccctcatcaccgaggagttcggctacaccaatgtccaccaggtgcccaaggttgagaagattgtagtgaattgcgggttgggggctgaagccggtaactccaaggggctcgaatccgccatgaaggacctcgccatgatcaccggccagtggcccgtcaagacgaaggccaagaagtccgtcgccagtttcaagatccgcgaggggaacaccattggtattgccgttacgctccgcggcagggtaatgttcaacttcctggataggctcatcaaccttgggcttcctaggaccatggacttccttggtgtcaaccccaacagctttgatggccatggcaacttcaccataggccttcgtgatcagggcgtgttcccggagatcccgtacgaggtcggtgggaagaagaatggaatggacgtctgcatcgtcaccaccgcgaagaccgacaacgaggctctcaggctgctcaccctccttggcatgccgttcgcggagcacatcaagtcctccgtggtgatccggaagaagaggttgaagcgccaccacttcatgagcaagggcaggggaagacggtgattgcaaaccgctgcctaggcacgttgagctttgcttctcactttgtcaattgtcattgtttttgcaaagtttcgtttagaagtttgatgattttgttatcttgtcacgtgctgtatttactgtcagaagacaaaatgaaaaggctttgctttggtcaggtc

SEQ ID NO: 1531 - DNA, 1012 bp, Oryza sativa
  ref <308>: DATABASE ACCESSION NUMBER: AK059558
  ref <309>: DATABASE ENTRY DATE: 2001-12-06
ctagctcccccactctcgtttagggtttccctccgccgccgccgcctcccgcatccacgcgcctcctcctcctccgccgccgccgccgccaccgcagcatcagccatggccgaagtggagctcccgcagcaggaggtcaagctcttcagccgctggtccttcgaggacgtccaggtgaacgacatctcgctggcggactacctggcggtgaacccgacgaagcacgcgacgtacctgccgcacacggcggggaggtactcggcgaagaggttccggaaggcgcagtgccccatcgtggagcgcctgaccaactcgctcatgatgcacggccgcaacaacgggaagaagatcatggccgtgcgcatcgtcaagcacgccatggagatcatccacctcctcaccgacgccaaccccattcaggtcatcgtcgacgccatcatcaacagtggccctcgtgaggatgcgacccgtattgggtctgcgggtgctgtgaggaggcaggctgtggatatctctcccttgaggagggtcaaccaggcaatctacctcctcaccactggtgccagggagagcgccttcaggaacatcaagaccattgctgagtgccttgctgacgagcttattaatgccgccaagggctcatccaacagctatgccatcaagaagaaggatgagatcgagcgtgttgccaaggccaaccgttgagtggtgatcccatgtcattgtgctaaagctcttgcgctgtttggcaggactatactttttgctagtaatttaagccttttcagacctacctgtggtttaatgtttgaatgaacatcactagtgctgagaaaaatatgtagtgctctattctatctatctatcgacatggttttatattgaacccgcaattcccgttccttcataatctgagttccttgatgcgtgctgaatggctctgctctggttatatgttgtttacttgtttgaattgatgaactgaagatgataattgatagattttgagtgc

SEQ ID NO: 1532 - DNA, 1257 bp, Oryza sativa
  ref <308>: DATABASE ACCESSION NUMBER: AK059559
  ref <309>: DATABASE ENTRY DATE: 2001-12-06
agcggcggcggcggcggcgaggcgaggaagatgctgtgggtggacaagtacaggccgaaaaccctagacaaggtcaccgtccatgaccaggtcgcgcaaaacctcaagaagctggtggcggagcaggattgcccgcacctgctcttctatgggccgtcggggtccgggaagaaaaccctagtcatggccctcatcaagcagatgttcggcgcaggcgcggataaggtgaagatggagaacaagacatggaagatcgatactgggtcgaggaatattgagatagaactggcaatgttgtcgagcgcccaccatgtggagatgaaccccagcgatgctgggtttcaggacaggtatgttgttcaggaagtcattaaagagatggcgaagaataggccaattgatgccaagggcaagagagcatttaaagtccttgtccttaatgaagtcgacaagctctcacgagaagcccagcattcccttcgtaggacaatggagaagtacagtgcatcatgcaggctgatattgtgctgtaatagctcatcaaaggtgacagaggctgtaaggtctcgttgcttgaacgtgcgagtgaatgcacccagtgaagaccagatcgtccaagttctggagttcattgggaagaaagaaaatctgcagcttccatttggatttgctgctaggatagcagcacaatcgaaccgtaacctgagacgagcgatactgttttttgagacctgcaaagtccagcaatacccatttacatcaaatcaagtagcacctcctcttgactgggagcaatatgtgtcagaaatagcagctgatatcatgaaagaacaaagccctaaaaggctatttgctgtgcgccagaagttctacgaattacttgtgaattgtatcccacctgaaagcatcttaaagaagttgttggcggagttactgaagaaattagactctgacttgaaacatgaaatttgtcactgggctgcacactatgaacacaagatgcgtcttgggtccaaggccatttttcacctagaagctttcgtcgccaagttcatgagcatctacaaggaatttcttgtctctacatttggctgagcatctacaaggaagctgctgcatgtccatttccggcaacacaaggatgttgggaaactctccatgctagccatcttggccaatgtaatcggttcgatcaacgcaacgggatcaagtttgtagcaggtttatgtgagtgacattgagctggccttttgtgtt

SEQ ID NO: 1533 - DNA, 1150 bp, Oryza sativa
  ref <308>: DATABASE ACCESSION NUMBER: AK059560
  ref <309>: DATABASE ENTRY DATE: 2001-12-06
atcgttttctcccattctttccccctcctcctcgtgcaaccacccaaccactgcagccagccacgagccgaggaagccgaggccgaggaggaagacgacgaagacaagtagcgcaaggaaccctcgaaccgggaggccgccgcggctccgatctgggagggggaggtcgagatggtgcccagggacagggtgaatgccgctgccgctggtggcggcggcgaggggaggctggtccagagcggtatagtgaacaagaagtgtgataagaaggctccaaagagaatccataaatcagagagggagaaacttaagcgggacaagcagaatgacctctttaatgagctgggaaacttgctagaacctgacaggcagaacaatgggaaggcatgtgtactgggtgaaactacacgaatactaaaagatttactttcacaagtggaatctctccggaaggagaatagttcactgaagaatgaatctcattatgttgcattggagagaaatgaactgcacgacgataacagcatgcttcgtactgaaatcttggagcttcaaaacgagcttaggacgcggatggaaggcaatcctgtttggagtcatgtaaacaccagaccagctctcagggtaccttatccgacaaccggagtgttcccagtacagcacctgccacatttaccagtcaccacgacggcagcatttcctcagcagctaccggttatcatcgagcagcactatgccgccacgccaagagaacttcagctcttccctgagtctgcgaccagcgaagacagcgaaccgtcacaagaacacgggacttctgaccatgtaacacggcctcagccaaggtacccaacaccaacggccactttgccagtaaacctgtttccagtgtttccaggaagacaagatcaacaatgtagcagtggtacttctggcactaacgaggaagaccgtataggtagatcttaggtacactacataacgagaggtccacacaatgatttgagaattcctttagtttcaacgtttaactttgcaagtttagcaaatgtgaaacagagatctgcgactgtgctcatgggtagcacctaatctgtatatctgaatctcagttttaagtggtcaaataggtgacattcagaaaagtttg

SEQ ID NO: 1534 - DNA, 1983 bp, Oryza sativa
  ref <308>: DATABASE ACCESSION NUMBER: AK059561
  ref <309>: DATABASE ENTRY DATE: 2001-12-06
gtgggagtactacactgcactgcatcgcgcaaccaaccaaccacccaccacaacacaaccctcctctcctcatcatcactcgctcgctcgctctcgcgctttgcggcaactggcggtgtctcctagcccttgcctgccatggtgtcgctagccggctcccagatcccgtcgccggggcagagtccgtgcgcggcggcgcggtcgcagcgccgcggcgcggggtactccatgcggaccatccggtcggcgctgctgcagccggactcctgcccgggctcgccgcatgtggcagccgcgtacgacgcggcgggggcggactcggacatggagaacttgacggactccgtgattgatttccatctcagcgagctggcggccaccgcggggcccgcgcaccccgcggcggtggccaagtcgtcgtcggccaacgcggcggccacggagatgctcgagctctcgcgggacttcagtgactactcgagcttcaactcggatatctccggcgagctcgagcggctcgcggcggcggcggcggcggtggtgacgcccagatccgacgcgccgcaggtgggcgccgtggatctgaatgagcttgagtcgatggatctgtccgtcgaggcggcgccgctggagcgcgtggagccgttcgtgctggcgtgcgtgcgggcgctggggcccgacgccgcgccagacgcgcggcgcaccgcggcggcgaggataaggctgctggcgaagcacaggtcggacatccgcgagctgatcggcgtgtccggcgccatcccggcgctggtgccgctgctgcggagcaccgacccggtggcgcaggagagcgcggtgacggcgctgctcaacctctcgctcgaggagcggaaccggtcggccatcacggcggcgggggccatcaagccgctcgtgtacgcgctgcggacgggcaccgcgtcggccaagcagaacgccgcgtgcgcgctgctcagcctctcgggcatcgaggagaaccgcgccaccatcggcgcgtgcggcgccatccctcccctcgtcgcgctgctctccgcgggctccacccgcggcaagaaggacgcgctcaccacgctctaccggctctgctcggcgcgccggaacaaggagcgcgcggtcagcgccggcgccgtcgtgccgctcatccacctcgtcggcgagcgtggcagcgggacgtcggagaaggcaatggtggtcctcgccagcctcgcgggcatcgtcgagggccgcgacgccgtggtggaggccggcgggataccggcgcttgtcgagaccatcgaggacggcccggcgagggagagggagttcgccgtggtggcgctgctgcagctctgctccgagtgcccccgcaaccgcgcgcttcttgtccgtgagggcgccatcccaccgcttgtcgcgctctcgcagtccggctctgcccgtgccaagcacaaggctgaaactttgcttgggtatctccgcgagcaacggcaaggaggtggtggctgcagggttgaacccgtggcagcttcgagcttggccaggtaatgctgtaatcatgtggtcgcagtatgcttcgctcttatttaacctcgtgtgctctgttcttggagaatggagtagctgtgtaaggaggggtagagatgatcatctgtaaataacggttgatggctttggtttggtaatgtgaatacaaatgtggtttgcgagtgacggatggttagttggtataactaacatcaactgagaggaggatccagccatccagggggtggggacagagggtttggattgttggtaactgctaaggtgacgttgaattttagatgtgtacaggatgctagggtggtatgcttgcttggcttggaaaggttataggagaatgatggatcatcaaccatgtcttttttccttctggtttggagtccgaattcccctgttccaatttatctagtgtgacttattttgcaaatatttcattattctctt

SEQ ID NO: 1535 - DNA, 551 bp, Oryza sativa
  ref <308>: DATABASE ACCESSION NUMBER: AK059562
  ref <309>: DATABASE ENTRY DATE: 2001-12-06
aagctgaaaatcattggcccaagagaaaaccttgctaggctagcagggcacagcaagaacaaggccagaaccaatggcggcgacagctacacttgctgccccctccttcttggcacatcagtcgatcttgagccacaagcctctgaggaagcttggtctatccctggaactgccaagaaccagatctgtcaaaattagagctgcaaagctgcctgcaggggttgaggtgccgaggaagcagccaaagctgagtgagcccttcctgggtttcaccaggactgcagagatatggaactccagggcctgcatgattggcctcattggcaccttcatcgtggagctggtgctgaacaagggcattcttcagatgattggtgtggaagtcggcaagggacttgatctccctctttaaatgctagtccatatatattttgtaccatatatactatgagatttatgcagtgaaattattagaacaaagagggattttcacttcttgtttgtactaatatcatcagagagatatatatctgacggtgttttgcctgcct

SEQ ID NO: 1536 - DNA, 621 bp, Oryza sativa
  ref <308>: DATABASE ACCESSION NUMBER: AK059563
  ref <309>: DATABASE ENTRY DATE: 2001-12-06
atgcgggcatcatctctcttcgcggaatcggtgttcactacatctgctgctgctggtcgtcgtcgttgtcctcgtctcgccgccgttcccgttaccctcttcttctccaccggtcgcggctcgccggcgatggccgaggaggcgcagcagccacgcggcgtgaaggtgggcggcatccacgacgcgccggccgggcgcgagaacgacctcaccaccgtcgagctcgcccggttcgccgtcgccgagcacaacagcaaggccaacgcgatgttggagttggagagggtggtgaaggtgaggcagcaggtggtgggcgggttcatgcactacctcaccgtcgaggtgaaggaacccggcggcgccaataagctgtacgaggccaaggtgtgggagagggcgtgggagaacttcaagcagctccaggatttcaagcccctcgacgacgccaccgcctaaacgtacatagatcatcgtccggctgctgaatcatcggcttaaagcagagccatccagtgatccaattatctgctactagaacatgttactggtcttgctggaaggtgtaatatgatgaataaaacctgctgctttgccgggtcataatagacatatcacttctgt

SEQ ID NO: 1537 - DNA, 1514 bp, Oryza sativa
  ref <308>: DATABASE ACCESSION NUMBER: AK059564
  ref <309>: DATABASE ENTRY DATE: 2001-12-06
caccaaatcgtagaccaacacgaggtcaatctagtacaagaaaatcctcccaagatggagcttgggcccggggtccatcaaagactggaacacctagtcgtggtgcaaaacctaatggaagtaaaggaaactctggggcaagatcatccactgcctctagcactggtgggaggaaagggaagtcaagttcaagcaaggctgattcagtgagtagcgatgctgaagaaggcaagtccaagaaggggcaatatgaaggaccagatatggacttggctgccatgcttgaaagggatgtcctggattctaccccaggtgttagatgggatgatgtcgcaggtcttagtgaggccaaaagacttcttgaagaagcagttgtacttcctctctggatgcctgaatatttccagggtattcgccgaccttggaaaggggttctaatgtttggtccacctggtactggaaagactcttttagcgaaggcagtagctacagaatgtggcacaacatttttcaatgtttcttcagcaactctggcttctaaatggcggggagagagtgagcgcatggtccgctgtttatttgatcttgcaaggttctatgctccaagtacaatcttcattgatgaaattgactccctctgcacatctcgtggagcttctggtgagcatgagtcatcaaggagggtgaagtctgaacttctagttcaaatagacggtgtaaataatagttctaccactgaagatggtcaaccaaaaatagttatggttctggcagctaccaactttccatgggatattgatgaagcactgagacggaggctggagaagcgtatttatattccacttccaaattttgaaagcagaaaggcactcatcaatattaaccttaaaactgttgaggttgctaccgatgttgacatagatgaagttgcacggaggacagaaggctatagtggtgacgaccttacaaatgtttgccgtgatgcttcaatgaatggcatgagacgaaagattgcaggcaagacccgcgatgagattaagaacatgtcaaaggatgagatctcaaaagacccagtggccatgtgtgactttgaggaagctctggccaaggttcagaagagtgtatcacccgctgatatagaaaagcacgagaagtggcaggccgagtttgggtccgcttgaaatctccattctgttcccgttcaaatttctcagatcattgtttctccttggttgcttgtgttcgcaagtatttcattcatttgtaccgctgttatgttgtttcaacggccttatgttgatcggttgtattgcctgcgccggtgttgtatcatagagacaaaccagacagtaaactaggaagtgagaggtctctgcccgtggaactgctttgttgatttagtttcagtgtcactggcactgccgaagccaaaggttgcgtcattctgtaaccatttcgaacagttgatatccagcttccatgtttcgcacgggcagttgcgacgtgcgcgtttt

SEQ ID NO: 1538 - DNA, 1061 bp, Oryza sativa
  ref <308>: DATABASE ACCESSION NUMBER: AK059565
  ref <309>: DATABASE ENTRY DATE: 2001-12-06
gtagatagttacacaaaccgagaaggtaagaaggaggtaaaatagactccgttccgttccgttgcctggacacgcctcgcctcctcgtctcctggaacaacgaaacaggcgaacgccgcgtcgccctctccgatctctccccgcctccgccatggccgcgcgatccctccaccacctcctcctcctcctcttcctcgccggcttccactccctctccctctcccccgccgccgcactgcggttcgacctgcagtcgggccacaccaagtgcatctccgacgacatcaaggtgggcgccatggcggtgggcaagtaccacgtcgtggtgcccgaggggggcggctccacctcctcctcctcctcgtcgtcgtcgtcggcgcagccgctgctcccggagtcccaccgcgtctcattgcgggtcacgtcaccttacggcaacagcctgcactactcggagaacgtgcagtcgggcaacttcgccttcacgacgtccgaggccggggactacctcgcctgcttctgggcgcccgaccaccgccccaccgccaccgtcggcttcgagttcgactggcgcagcggcgtctccgccagggactggaccaacgtcgccaagaagggccaggtcgatatgatggaggttgagctcaagaagctggaggatactatcaactctatccatgaagaaatgttttatcttcgcgcaagggaggaggagatgcaggaactgaacaggagaacaaactcaaggatggcttggcttggtttcttctcactagctatctgcctgtcagtggcggggttgcagttgtggcatctgaagaacttctttgagagaaagaagcttctataattctgactcagaacatttaggcataaaattgtgtgatttctctttttatgcttaccaggcgtaaatttcctgcaagggacagatgttagcatagttgaggaacatttcttttcagtttcctagaccaacttaaatagatgtaaaatgcaaagacgacaccaatttttgtttccttgcttgcaaagtatgttgttttcatggttcaaaagac

SEQ ID NO: 1539 - DNA, 605 bp, Oryza sativa
  ref <308>: DATABASE ACCESSION NUMBER: AK059566
  ref <309>: DATABASE ENTRY DATE: 2001-12-06
gatgaggataatgtgttcagaaagagggggtaggctgttcgcaaccgatgatcgatactgtattgacaacggggcaatgattgcatacactggtttactggcatacgcacatggcatgaccactcccctagaggagtccacttttactcaaagattccgaacggacgaagttcatgcaatctggagggagaaggagatgccagtgttaactaacatccgtgcccatgcaatggctgaagtatccaaagatgaagcttccgttccgactccaattgctgtagattcatgaggtaattcttgttcttttccttcctatccaaggaaatagaatacttggaaaggaagccagagtccagagacatgtacttcggttgatgatacgaaagcctttgtggcggcacatgggaagtttcttgtactgctgtgtggggttaacctggtgaaagatttggatcatcggcaacctcgtaacacttatgtatttcatgttgtatctctcaatagatgaaccatgattaaacaaaccacaccgtctatttggtcagttaagccctactcccttttatgtgatccattcatttgatgtaaaagcgattcctgctgct

SEQ ID NO: 1540 - DNA, 487 bp, Oryza sativa
  ref <308>: DATABASE ACCESSION NUMBER: AK059567
  ref <309>: DATABASE ENTRY DATE: 2001-12-06
cacaagacgaagaagcagcagtttgtgaacctgcagtacaagaagctgtggtgggaggaaggcaagcgcttcgtcaagctgcgtctctccaccaaagccctcaagaccatcgagaagcatggcctcgacgccgtcgccaaaaaggccggcatcgacctcaacaagaaataaatcaaatcatcatcatcatgatgcatacatacatgtattctctcatcaattgccgctgtgctgaatagaccagagctgtatgtagtccattattaaatccattcatctcgatgatgcaatttattgtagagtactacagtatgcattcatcggtggtggtggccggcttcgtttccttaaatttccttttatcccgtgttgctgctgcaagtccggctcgaattgtttgctactagtgtttcatttcggtcgagttcctaattaatactgtatgttggttacgaattataagatggatggatgtaacttgagcagc

SEQ ID NO: 1541 - DNA, 1402 bp, Oryza sativa
  ref <308>: DATABASE ACCESSION NUMBER: AK059568
  ref <309>: DATABASE ENTRY DATE: 2001-12-06
atcagtagtcactgttgccaaagaacatggtgcagctaacaagcaaaggcgtcagcatgttaaggctcagagaaatgagggaagtaactacccgaatgagaataaggatcaaatggcagcaccaccagcaccgggcattgattcaaactcatatgaacgtagaaacatgtcaagatctgatgtgaagcacagtggaacagtaccacaacctagatctcattggaaacctaaaaccatccctcagtcccagggaaattcgcatggcaataatgctaaggatgggcatgtggatagtgctactccacaagacagcagcaacaacaaccttgctgaaaacattggttggaacgatgaaaatcatgcacacagtgaagaagttaaaggagaaaagaggcatgtagacgattaccagaagagcgagagccatgaaaatgcagaacagcagcagcagcttagtcatgcgccacgccgacagggccaccacaatggtgggaggtaccacagaggaggtggcacaaacaggggaaggggttatgatgttgggaagcccagccatgtcacaaacgcagaaaggcggaggggtggcactcatctcgaataccagccagttggatcctataacaaaacagcagacttccagcagaacccaggtaccgatgagcgaaccgaaggggctccagtgcacagggagcgcgtccacaacaggggtccacgccctgctggccagttcgtcaagaggaaccctgcctccaccccagctgctaactcttaccgagatgaataaataactttcctccacccccaagatcgctaaaactgcaggctatcttttgttgggtgattcacagcaggtagatgaatggagtatctggatcaaaacctgatgccagtgactggtgtgatgcccgatgtcatctcgaccccgtcgtgtctaacatgttcagagattagcaggtcaaaagctatggctgccgttcgccgtctttgacggcggagagtagtagtaggatgtaatggattttgtctgtgcagggccgtttggccctttacgtgtgattgttaattgttctcaggagcatccctcccttgcttcggtgagatgtgatgtgatgttgatgttggaatgtactaacttggagttgattgagaaccggagttgattgagaaccggggttatattagttagtagtatgtaaacagaaaaaatagttcgttttgggcgatctgttgtggggattctgcaggacagactctgatattatcatatcatgttcatatcgtgtttgtgttatctggggaggtcagaattgagatgcttggttttattctcttaatagacatatggttcatgatcctggcaatttgcccaccagtctctgtggtaatataaactcattctgcc

SEQ ID NO: 1542 - DNA, 1235 bp, Oryza sativa
  ref <308>: DATABASE ACCESSION NUMBER: AK059569
  ref <309>: DATABASE ENTRY DATE: 2001-12-06
acacattattttgggagaacaatacttcatggtggtgcaaagtatcatgctactggtagaggttttgttgttcgtcacataaaatttgccgaaaattatcggctctattctcgaagccactttgtgaaagcgcttgaagttgctctcctcctcattatctacattgcatatggttatacaaggggcggttcatcttcctttattctattaactatcagtagttggttcctcgtcgtgtcctggctcttcgcaccatacattttcaacccttctggtttcgagtggcaaaagactgttgaggactttgatgactggacaaattggttactttataaaggtggagttggtgtaaagggggaaaacagctgggaatcttggtgggatgaggagcaagcccacatccagacattaagaggacgtatcctagagactatcctaagcctcagatttcttattttccaatatggcattgtttataagctcaaaattgcttcacacaatacatctcttgcggtttatggcttctcatggattgtacttctcgttttggtgctcctatttaagctttttactgcaactccgaagaagtcaaccgccttgccaacttttgttcggtttctacagggcctccttgcgattggaatgattgcaggaattgctctacttattgcattgacaaagtttacaattgctgatctatttgcaagtgcgcttgcttttgtagcaactggatggtgtgttctatgtctggctgtcacatggaagcgcctcgtgaaattcgttgggctctgggactcagtccgtgagattgctcggatgtatgatgccggaatgggtgctctcatctttgtgcccattgtgttcttttcatggttccccttcgtatccaccttccagtcacgtttcctgtttaatcaagctttcagccgtggtctggagatctccctcatcttggcaggaaacaaggcaaatcaggaggcatgaaaagcctaaccacctaaccgcctggatatttttgttgtatattcttggaattgattagtggtacttgatttgaacaacacctttgtacataactgcctgccattttaggagcaaattatgtatccaaactaacagtgccatgccagtttagatgtgagtattcatctcttgtttgtagccgtaacgacctgtaatttgaacattccggtaatttggatgcgacaattcagatagcctgattgctgtatttg

SEQ ID NO: 1543 - DNA, 1480 bp, Oryza sativa
  ref <308>: DATABASE ACCESSION NUMBER: AK059570
  ref <309>: DATABASE ENTRY DATE: 2001-12-06
attgttaaccaaacaccagtcaacttcaaatatctgaggattcagagttgtgctcataaattcagaattgcgttttgactctcatgctgaagcaattactttgagttttgaattgtgatattgtttgatgaattgaattctgttggcaacaaacaacttaatatctgaacatttctgcattatctgttcagattctaggagatggcatcagcagcaatgtctactctgaacctgagttcatctcctctgaccaagcagcagctccgatttggagccagcacactcagtgcagaacacgtcagtggcttcagctctgcaaggccagctccatcgttgtgctgctccagctctcactggcgagcggtcaagctgagaccgagacggcggccatggcggcgcgccgggaaccgggtcgtcgcgcaggccggcggctacaaggtcgccatcctcggcgccgccggtgggatcgggcagccgctctcgctcctcgtcaagatgtcgccgctcgtctcggcgctgcacctgtacgacattgcgaacgtcgatggtgtcaccgccgatcttggacactgcaacacgccggcgaaggtcgccgggttcaccggaaaggaggagctcgccggttgtcttgccggcgtggacgtcgtcgtcatccccgccggcgtgccgaggaagccagggatgacgcgggatgacctgttcggcatcaacgccggcatcgtgagggagctcgtcgaggccgtggcggaccacgcgccggcggcgctggtgcacgtcatctccaacccggtgaactccaccgtgccgatcgccgccgaggtgctgaagcggaagggcgtgtacgacccgcggaagctgttcggcgtcacgacgctggacgtcgtgcgcgccaacacgttcgtcgcggagatgaagggcctcccgctcgccgacgtcgacgtcccggtggtcggcggccacgcggcggccaccatcctcccgctgctgtccaaggcgaggcccaagacggcgttcaccgatgaggaggtggaggcgctgacgaggcggatccagaacgccgggaccgaggtggtggaggccaaggcgaaggccggcggcgggtccgcgacgctgtcgatggcgtacgcggcggcgaggttcctggaggcgtcgctgcgcgggctcgacggcgacgccgacgtgtacgagtgctcgtacgtgcagtgccaggcggtgccggagctgccgttcttcgcgtgccgggtgaagctgggcagggacggcgtcgaggaggtggcggcggcgggggcggagctccgggggctcacggagttcgaggcgcgcgcgctggaggcgctcaagccgcagctcaagaagagcatcgacaagggcgtcgcctacgcgcagcagcagccagcgacggtggcgatgggttgaaatttgacatacttttcgcagcattttgcgagtgattaccatttgctgaatgcatttccgtgcc

SEQ ID NO: 1544 - DNA, 1057 bp, Oryza sativa
  ref <308>: DATABASE ACCESSION NUMBER: AK059571
  ref <309>: DATABASE ENTRY DATE: 2001-12-06
tttacatgctagccaacaagtggatggttgatgaaaaggaacttagagtcattcactacacgttgggtccccttaaaccctgggactggtggacagcttggcttgttaaacctgtgggagtgtggcaggatgttaggcaaacacttgaagagtctctcccaggaactggtggggggagaagccctcatgatcagcttgtggtcaaagttttgttcatccttcctgttttactactctcatttggttattatcaatcatgttttcagactaacaaggagctgttaaatataaggtctctatgtgcatttgctagaagagatcgctacaaatacaagtctgaagaggcatttccatcgtactcggttatgggtgtttcatcatctgcattttccaattcaaatcaaagattctccaatgggatgcactcaaagttaccttcttattttggggcactcactgtgctagcctgctttatgtctgctggcgtatcttttgcatttgcttttgctatcatcccaaagcagattatgccatggacaggcttgctgctgatgttcgagtggacctttgtatcattcttcttgttatttgggagttatctccgttttgtctatcgatggggaagtcttgatgcaaatcatgtgggacatagtcgttttgattcatcagaaaaccacatggttacaggccggcaccataatatgtctgactgtgacatagatgcaacattttactggacagggatggcaattatagctattgtcactgtattgttaccgactctcttgggtgtgactgcattatttgcgaagctaggattgatggttgctggtggtgttgtgcttgcatcttttatgacatacgcttcagagcatattgctatctctgccttttacaagggtcagagagatagaaatgtgtccagaagtagaagcatctgcttcttgttttagtcgttaaccctgctcctacgcaattcatttagttcatgtaccatatgtaccatccatgttgtatcctatgtcttttacacaaaaaaaaaaacgaatgatggtat

SEQ ID NO: 1545 - DNA, 745 bp, Oryza sativa
  ref <308>: DATABASE ACCESSION NUMBER: AK059572
  ref <309>: DATABASE ENTRY DATE: 2001-12-06
gtccgcttttctcttcctcgtcttcttctccggcgagctcgacgggccgcgccgccgcatcggccgcagtcgacgggatggacgggcagggggcgtggaggggtggggcttctgcttcctccaggatatcgtacaagaacgccaccgtcgcggtgtgcgcaatcaacctcctcgcgtgcgctctcctcttccgcaactactactcgtcctggccgcgcatcgccggcgaccaccagttcgattctgctcagctacggtttatatgggagtcggaagagttacgtcgtgctatggagcctgtggatttgatcaggagagtgaaggaaatcgaacaagaagcttatggtgagcatggcatgatgacacaagaagatgccaagcaggcagctgctgttgatgcatcaaaaaggttgcaagatttaagggcagggaatgatggtagcagccaaaaagctcttgaggaatggcgcaaacggaagatggagcgtgcgaggcagcgggcgattgaaaagaacgggacctcatcagctgcgaaaacgcgatgaattgggaggtagctattgctgcacatcacctttgggggtgtcctggagctgctgctgtacgtggggtggtctcctggtgtctgtaaaatttcttgtacatcgtgttgttgttgttgtctagatccattttttattcttctgtttctctagtaaaagaccaactgggtagaaaaaaaaattaaagctcatctttttcgacc

SEQ ID NO: 1546 - DNA, 1843 bp, Oryza sativa
  ref <308>: DATABASE ACCESSION NUMBER: AK059573
  ref <309>: DATABASE ENTRY DATE: 2001-12-06
aatttccccctcccccttcccttccctctccgcatcagcaacccacccccacccctcgccgccgccgccgccgccgcagtcgcggctcccgctccccaaccgaggaatccgctgccaccgccgccgctgcgggcgcccgcgcgcgcgacgtcccgctgcctacgacgtcgcccacggctccatgactatgatgactcctccccccatcgagcagcagcagcaggaggacgaggagatgctcgtgccgcaccaggagctccccgccgccgccgctgtcgtcgccgacgccgtgcagccgatggaagttgtggcgcagacagagcctgccaacgcggcagagagccagccgccggaggacccgcagacgtcgcggttcacgtggacgatcgagaacttcaccaggatcaacgggaagaagcactactcggagccgtttgttgttggaggattcaaatggcgtgtgctgattttccctaaggggaacaatgtggaccatttctctatgtatttggatgtcgcggactcggtgaatctcccttatggatggaaccggtatgctcagttcagcttggctgttgtgaaccagatccatccgaagtataccattcggaaagatactcaacatcaatttaatgcacgtgagagtgactggggtttcacatcttttatgcctttgagtgatctgtatgacccaagtaggggctaccttgttaatgacaccgttgttgtggaagctgaggttgctgttcgcagaatggttgattactggacttatgactcgaaaaaggaaacaggatatgttggtctaaagaatcaaggagctacctgttatatgaactctcttctacaaacactgtaccatataccatatttcaggaaggctgtatatcatatgccaactactgagaatgacatgccatctgggagtattcctttagccctgcagagccttttttacaagctccaatacagcgacaatagcgtagctacaaaggagttgaccaaatcttttggatgggacacttatgattctttcatgcagcatgatgttcaagagcttaacagagttctttgtgagaaacttgaagacaaaatgaaggaaactgttgtggaaggaacaattgaacaattatttgaaggccaccacataaactatatcgagtgcattaatgttgattataaatctaacagaaaagaatccttttatgatctacagcttgatgtcaaaggttgtagtgatgtttatgcatcatttgataaatatgtcgaagtggagcgtctagagggtgataacaaatatcatgcagagcagtatggcttacaggatgcaaagaagggagtactcttccttgatttccctcctgtttcgcaacttcaactgaagcgttttgaatatgattacatgcgagatacaatggtcaagattaatgaccggtatgagttcccacttcaacttgatcttgacagagatgatgggaaatatcttgctcctgatgcagatagaagcattagaaacctttacactcttcacagtgttcttgttcatagcggaggagtacatggcggtcactactatgctttcatacggcctacgctatcagaccagtggtataaatttgatgatgaacgagtaacaaaagaagataccaaaaaagcccttgaagagcagtatgggggtgaagaagagttgcctcaaataaaccctggtttcaataacaccccatttaaattcacaaagtattcgaatgcctacatgcttgtctatattcgtgagagcgacaaggataaaataatgtgtaatgttgatgaaaaggacatcgctgagcatttgcggataaggttg

SEQ ID NO: 1547 - DNA, 1584 bp, Oryza sativa
  ref <308>: DATABASE ACCESSION NUMBER: AK059574
  ref <309>: DATABASE ENTRY DATE: 2001-12-06
acgttgagattcctgctggggctggggttgggttgagattccccaggcgcccgcggcggcctcgatctgggcggcgcagatcagaggacagcgcggatcggcgagcttcgcactgggcacgtgtgcctgtgtgtgggagtcaggcctcgcagccgccgctgctgctgctgctgctgctgcacctgtcagctagggcgggcatggcgcgccgcgccgcttcccgcgctgttggctcggagggctcgatccaagggcgagggggccgcgcggggggcaatggcgccgaggacgcacgccacgtgttcgacgaattgcttcggcgtggcaagggcgccacgatctacggcttgaaccgcgccctcgacgacgtcgcgcgtcacagccccgcggccgccgtgtcccgctacaaccgcatggcccgagccggcgccgacgaggtaactcccaacttgtacacctacagcgttctcatcggttgctgctgccgggcgggccgcttggacctcggtttcgcggccttgggcaatgtcattaagaagggatttagagtggaagccatcaccttcactcctctgctcaagggcctctgtgccgacaagaggacgagcgacgcaatggacatagtgctctgcagaatgacccagctcggctgcataccaaatgtcttctcctgcaccattcttctcaagggtctgtgtgatgagaacagaagccaagaagctctcgagctgctccaaatgatgcctgatgatggaggtgactgcccacctgatgtggtgttgtacaacaccgtcatcaatggcttcttcaaagagggggatccggacaaagcttacgctacataccatgaaatgtttgaccaggggattttgccagatgttgtgacttacagctctattatcgctgccttatgcaaggctcaagctatggacaaggccatggaggtacttaacaccatggttaagaatggtgtcatgcctaattgcaggacatataatagtattgtgcacggatattgctcttcagggcagttgacagaggctattggatttcacaaaatgatgtgcagtgatggtgtcgaaccagatgttgttacttgtaacttgctgatggattatctttgcaagaacagaagatgcacggaagctagaaagattttcaattctatgaccaagtgtggcctaaagcctgatattactacctattgtaccctgcttcaggggtatgctaccaaaggagcccttgttgagatgcatgatctcctggatttgatggtatggaacggtatccaacctaatcatcatgtattcaacattctaatatgtgcatacgctaaacaagaaaaagtagatgaggcgatgcttgtattcagcaaaatgaggcagcaaggattgagtccgaatgcagtgaactacagaacagtcatagatgtactctgcaagctaggcagagtatacgatgcagtgcttaccttaaagcagatgatcaatgaaggactaacccctgacatcattgtatatacccccctaattcatggtttttgtacctgtgacaaatgggagaaggctgaggagttaatttttt

SEQ ID NO: 1548 - DNA, 505 bp, Oryza sativa
  ref <308>: DATABASE ACCESSION NUMBER: AK059575
  ref <309>: DATABASE ENTRY DATE: 2001-12-06
gtgtgtgagagagagagagagagagagagagagagagcatctggttcttgtaccaccaccaccactgccccctttgcattgtccctccctggccacttctttctccttctccattttgtgcctagcgtacaaggaggtgccctgcttgctgctgctgctgttcggaagctatggcattgcaagaagaagaggaggatgatgaagatgatgaagaaggggagaaagaagaagaagaagacggtgtcagggtgcgtggggagctctgatttctccttgtcctgaggtgtgctgtccacttgtggatgtagtaagatattggcacaataggctcaatcacttttttcttttcctctcttcttttctcacttctgcttatttttgctgcttgcttgcttcttcgtcttttttattttccttcttcccctcaattcatgatgacacgttcttccttccttgtgtaatttatcaccgttcttggcgttttgcctgatttagaatgcaactg

SEQ ID NO: 1549 - DNA, 601 bp, Oryza sativa
  ref <308>: DATABASE ACCESSION NUMBER: AK059576
  ref <309>: DATABASE ENTRY DATE: 2001-12-06
aaaaccagcggcgccaccacccaccttcccccatggcatcggcggcggcgagatccggcctccgctcgctggcggcgcgcgccaaggcgaccgccgcccccgcggcgaggcgccgcatgtcctcctccgcccacgacgacgcccatgagacggccaagtgggagaagatcacctacgccgggatcgtcacctgcaccctgctggcggcgtacaacctctccaagggccacccccacttcgacgagccgccggcgtacccctatctgcacatccgtaacaaggagttcccatggggacccgatggcctatttgagaacaagcaccattaagtactgaacagcgcaccatcagaagcccagtgaatgcttaagaaaaattctctggttgttccagtgattcttgttttcagtgaaacctatttttcttgcaacaaagaaataagaatgacaaaactcttgtgttgataatcaggatttaactgtgttgttagttgttacctgttttcttcattcacagcagtgatcatatgcatgtgttctgtttcagaaaatgctgtcatcatcacaacaagctttgttattataatcttcctacgccaaag

SEQ ID NO: 1550 - DNA, 1255 bp, Oryza sativa
  ref <308>: DATABASE ACCESSION NUMBER: AK059577
  ref <309>: DATABASE ENTRY DATE: 2001-12-06
agatttactcgctgcagtcgtcgcggaacccgacgccgcggggctccagcttcaaccacgccgagttcttcaacatcgtcggcaacggcaagcacggcgacgaggagaagggcgccgccggtggcgggggccactcgccgcagccggtggtggggaagaggaaggacctgcacatgttcgtgtggagctcaagcgcctcgccggtgtcggagcgcgccgccgccgccgccgctgccggcgcggtgcacgtcttcggcggtggtggcgccgaccacggcgacgccaaaggtgctcaggcctatgatgagtacagcttcgggaacaagaatgagaaggacgggccgacactgtcgaagctggggtccaactcgacggcgcagctccggccaaaggacgacggcgaggggagggcggcagcgatgccgccggcgagcgtgatgacgaggctcatactgatcatggtctggaggaagctgatcaggaacccaaacacttactccagcctcctcggtgtcatctggtccctcgtctcctacaggtggggaattgagatgccggctatcatcgcccggtcgatttcgatcctttcagatgcagggctcggaatggccatgttcagcctaggattgttcatggcattgcagccacggatcattgcctgtgggaactcccttgcttcgtatgccatggccgtcaggttcctcgttggtcctgccgtcatggctgcggcctccatcgccgtcggacttcgcggggtgcttctgcacattgccattgttcaggccgctcttcctcaaggaatcgtgcccttcgtgtttgccaaggagtacaatgttcatcctaacattctgagcacagccgtgatattcgggatgctgatagctctccccatcacattggtctactacatactgctggggctctgaagagctctccaagtctcaactcaactgtgcaagaacttgatgttactgacagtttgattaggatttatggtctgttttagttgctcagattttgtttggatgataggtcagcttagtgatgctaggtggacaattatccgagaacttttgggttcaagtgacggccagccacggtttctgattgaagattaggaacatagacatcacattagtgataacaggcatccaatttgtaagacattgagaaggtctgtttcaaattactgacaatgtagtaagacattgaacagtgcttatttagcattccaataactgatggtaatgcgctt

SEQ ID NO: 1551 - DNA, 1109 bp, Oryza sativa
  ref <308>: DATABASE ACCESSION NUMBER: AK059578
  ref <309>: DATABASE ENTRY DATE: 2001-12-06
tccagctccgcctccgacgcgcgcacgcctctccctcccctcctcctccgcctcgcctcgcagtgtggaagaaaggaaggaaggctaaaaccctagcgagcgcgcgagcgagcgagggctctctgcttccttgcgatgacggcgccggcggacaaggggaagaaggccaagaccgacgccgacggcggcgccgccgaggagaacgagcagatcgacggcgccctcgtcctctccatcgagaagctccaggagatccaggacgagctcgagaaggtcaatgaggaagctagtgacaaggttttggaggtcgagcagaaatacagtgagattcgcagacctgtctatctccgaaggagtgacgttatccaaacaatccccgacttctggctgacagcgtttctgagtcatcctctacttagtgagcttttgaccgaagaggatcaaaagatgttcaagtacctggagtctgtcgacgtggatgattctaaagatgtcaagtcaggctactccataactcttaccttctccgagaacccgtactttgaagacaaagagctcacgaagacatatgccttcgctgatgacggaacaaccacaataaatgctactagcattaagtggaaagaaggaatggaaattgcaaatgggaatgccaagaagaaagggagcaagcgaccattggttgaggaaagtttcttcacctggtttactgatacagagcacaagagtcttgctgatggtgtgcaagatgaggtggctgagatcatcaaggaagacctgtggcccaatccattgaagtatttcaataatgaggctgaagagttaggagaggatgacgacgaagaggggtctgatgctgatgagggtgaagaggatgaggaggaggagaactgagtctaggatgtcagattgcgatggtgccgatcgtctgcattttgtggatgctgtcactctgaagggcgaagttgcgtgaccctcggttgcttctttcttttttctttttgatgacttagctggaacccttaggaactgtttaatgccttatggagtccgtcgtattttcgactcaaaggagacacctctatatcataatctgcgtataaccatgg

SEQ ID NO: 1552 - DNA, 1305 bp, Oryza sativa
  ref <308>: DATABASE ACCESSION NUMBER: AK059579
  ref <309>: DATABASE ENTRY DATE: 2001-12-06
atgttaaccttccaggagttattgttgatctcccgacacttactgagaaggacaaggaggatattcttaaatggggtgtcccaaacaagattgacatgattgctctgtcttttgttcgtaaaggctcagaccttgtagaggtcaggaaggtgcttgggaagcatgcaaagtcaataatgctgatgtcaaaggttgagaatcaagagggagtggctaactttgatgatatcctggcacaatctgatgcttttatggttgcaaggggtgatttgggaatggaaattccgatagagaagatcttttatgcacagaaggtgatgattttcaagtgcaatattcagggcaagccagttgtgactgcaacccagatgttggaatctatgatcaagtctccccgccctactagagcagaagcgactgatgttgccaatgcagttcttgatggcactgactgtgtcatgctcagtggtgagacagctgctggggcttacccggaactggctgtacggaccatggccaagatctgcctgcaagcggagtcatgcgtcgaccatgccgctgttttcaagtccattaccgcatcagctccaattcccatgagcccattggagagccttgcatcatcagctgtgcgtacagcgaactctgccaaggcggcgctcatcttggtcctgactaggggaggaacaactgctaggctggtggccaagtacaggccatccatgccgattctgtccgtcgtggttcctgagctgaaacagaccgactccttcgactggacctgcagcgacgaagctcctgcgcggcacagcctcatcgtcaggggagtgatcccgatgctgagtgcagccactgccaaggccttcgacaacgaagccactgaagaagctctcgggttcgccatcagcaacgccaaggcgatggggctctgcaactccggtgagtccgtcgtcgccctccaccggatcggaactgcatctgtcatcaagctcctgacagcgaactagtggcagacggcagttaatccacaccattttgctcggaggaaaatttttgctgggggattcttacttaccacgcatatctatagcttttgttgccatgatagtggcatttgcattcaggtgcaccttcggtgtttgctgttcatgggttaaccattgaaacagttaaattcgttattgctaccgcagcttatttcgctgcctctgctgctactagtattaaacttgacagccgttacgtaatttgttagttctattctgttctgttttcttggctgaaatgcatttcttgaattcgttt

SEQ ID NO: 1553 - DNA, 1550 bp, Oryza sativa
  ref <308>: DATABASE ACCESSION NUMBER: AK059580
  ref <309>: DATABASE ENTRY DATE: 2001-12-06
cccacaagggggtgaacataacgtaccagatccgggagaaccgcaaggggtacaaggctggtgcactcaaggaggggatgaagcatggctacgtccgcgaatgcgagtacgtggccatcttcgacgccgacttccagccggaccctgatttcctccgccgcaccatccccttcctcgtccacaactccgacatcgccctcgtccaggcccgctggcgtttcgtgaatgcagatgagtgcttgatgacaaggatgcaggagatgtccttggattaccacttcacagtggagcaggaagtgagctcctctgtctgcgcattcttcggcttcaatggaactgctggtgtgtggcgcgtttccgcggtaaacgaggcgggaggatggaaggaccggaccacagtggaggacatggatctggcaatcagggcgagtcttaagggatggaagtttgtctaccttggagatgttcaggtcaaaagtgagctgccaagtactttcaaagcctttcggtttcagcagcacaggtggtcatgtgggccggcaaacctgttcaggaagatgctgatggagattgtgagaaataagaaagtgacaatctggaagaagattcatgtcatctacaacttctttttgatccgcaaaatcatcgcgcacatcgtgacctttgcgttctactgcttgattatcccggcaactatctttgtccctgaggtcaggataccaaagtggggctgtgtgtacattcccacaatcatcacccttctcaattccgttggaactcccaggtcttttcacttgcttttcttctggatcctctttgagaatgtcatgtcactgcatagaacaaaggccactctcatcggcctgttagaagccggtagggcgaacgaatgggtcgtcaccgagaagctcggcaacgctctgaagatgaaatcatcaagcaaatcatcagccaagaaatcgttcatgagggtatgggacaggctaaacgtcacggagctcggcgtggcggcattcctcttctcctgtggatggtatgatcttgcattcgggaaggaccatttcttcatctacctcttcttccaaggcgcggcgttcttcatcgtcggtatcggatacgttggcacaattgttcctcaatcataacagaagagaagcaaatatatatattttcgagatcggccgccttcaaattcaccatgtcttcagcaagagtctagtagttatataaatcagtttgaagtaaagatcatgcagcatttttttactctcatttttctctgtttcttttcttttctttttcttttcttctttgcctttttctctgttatgtgctattgtaaaaaatagtgcagtgtaaggtcactgcaggaagaaaaaactagggcaattggtgtgatctgggcaaggaggaggtgaggaggatatcgtgatgtgtttttgcttgtagcaaagtacgtgagtggtatgcttaaagaggagcaggatgactctgcttccgttgtactgtaataacatacagaaaaaaaaaaggtcagacaagtgctggac

SEQ ID NO: 1554 - DNA, 501 bp, Oryza sativa
  ref <308>: DATABASE ACCESSION NUMBER: AK059581
  ref <309>: DATABASE ENTRY DATE: 2001-12-06
ttgctttcaaggctgaagagaggaaggttgaggtcgataaggacctgcagtctatgcagccactttctaccaagaaaggaaatgatgaaattttcattaagctgggttctgacaaggataagaagaaggaaaatgctgagcgcgatgagcgtgccaagaagtctgtgagcatcaatgagttcctgaagcctgcggaaggagaaaggtactatggcggccgtggtcgtggaagggggcgtggagatcgtggcggtcgtggatatggtggtggttaccaacgtggcccatattctacatctgcaccatccattgaagatcaggctcagttcccaacccttggtgggaagccgcgtgcgtgaacggtctaagagcatcgcagcattgtttttactggtgtcacctttaaattttgcccgcagttgaatcatattgtcacggttaatcggaacaaataatggtgttgcctgtgccttttttccatcgtgtgttggtctactttgt

SEQ ID NO: 1555 - DNA, 620 bp, Oryza sativa
  ref <308>: DATABASE ACCESSION NUMBER: AK059582
  ref <309>: DATABASE ENTRY DATE: 2001-12-06
agcgccgccgccgtcgcagcttcccttctcctctgctcgccccgccgccgccgccgtctccgcgccaccgccgcccccgagatggccccgaagaaggacaaggccccgccgccgtcgtcgaagccggccaagtccggcggtggcaagcagaagaagaagaagtggagcaagggaaagcaaaaggagaaggtgaacaactcggtgctgttcgaccaggccacctacgacaagctgctctccgaggtgcccaagtacaagcagatcaccccctccgttctctctgagagactcaggatcaacgggtccctggctcgtagggccatcaatgatttaatgacacggggcctaatccgcatggtctcggttcactcaagccagcagatctacaccagggcaaccaacacctaagtgtgagggtgacatgcatctttgtttgccctgaatgtgtacggggggcttgcctactctagaacagctgttacctttgtcgagtttgctaatgttatgttaaatgagctacttgtgatggtcagcatctctatatggctgaaacatttcagagattttggttattagttgagtactgttcttgtttgccctatataactttttccgccctc

SEQ ID NO: 1556 - DNA, 1018 bp, Oryza sativa
  ref <308>: DATABASE ACCESSION NUMBER: AK059583
  ref <309>: DATABASE ENTRY DATE: 2001-12-06
caaggaagctgacgagcgggaggccctcacgggccgcaccgctggccgaccctgatcttctgtgaagggttcgagttggagcacgcctgtcgggacccgaaagatggtgaactatgcctgagcggggcgaagccagaggaaactctggtggaggctcgaagcgatactgacgtgcaaatcgttcgtctgacttgggtataggggcgaaagactaatcgaaccatctagtagctggttccctccgaagtttccctcaggatagctggagcccattacgagttctatcgggtaaagccaatgattagaggcatcgggggcgcaacgccctcgacctattctcaaactttaaataggtaggacggcgcggctgctccggtgagccgcgccacggaatcgggagctccaagtgggccatttttggtaagcagaactggcgatgcgggatgaaccggaagcctggttacggtgccgaactgcgcgctaacctagaacccacaaagggtgttggtcgattaagacagcaggacggtggtcatggaagtcgaaatccgctaaggagtgtgtaacaactcacctgccgaatcaactagccccgaaaatggatggcgctgaagcgcgcgacccacaccaggccatctgggcgagcgccatgccccgatgagtaggagggcgcggcggccgccgcaaaacccggggcgcgagcccgggcggagcggccgtcggtgcagatcttggtggtagtagcaaatattcaaatgagaactttgaaggccgaagaggagaaaggttccatgtgaacggcacttgcacatgggtaagccgatcctaagggacggggtaaccccggcagagagcgcgaccacgcgcgtgccccgaaagggaatcgggttaagatttcccgagccgggacgtggcggttgacggcgacgttaggaagtccggagacgccggcgggggcctcgggaagagttatcttttctgcttaacggcccgccaaccctggaaacggttcagccgg

SEQ ID NO: 1557 - DNA, 1201 bp, Oryza sativa
  ref <308>: DATABASE ACCESSION NUMBER: AK059584
  ref <309>: DATABASE ENTRY DATE: 2001-12-06
atcttggtgcaaaatttgggtcttgccaggaggttcagaaacttcgtgtgtacaaaaacaggcatctcatgattcagacatctcagcaaattggtgatgcgccatatggggaccattttactgttgaggggatctgggatgttgaacaagacagcctggatgaaagcagttgctacctcagggtatatattaatgtagccttctcaaagaaaaccatatttagagggaagattgatcaatcaacaaaagatgaatgccgtgatgtttttgggctatgggtcaagctcggtcatgatcttttgaagcaggatagcagctgtcattcgagaggaccttccagctcaactaatgttgatgatccatcagggactactctcagtagtgagaatcctttggaaaacacagatccaggctcgagttctgcacctgatgaacctgttgtgagaagcatcgttccttctattcatgatcaccaacaaagtatagtatgggattccataatatccacatcacaagaactttggcgttcactcttgtcatatatacagtcaagtcagctcgggccggtgttagcactgacactggtagccatcatcgttctattgcaggtaaccatcatagttctactactcagatcccccaaggtgtatatggttaaccaagagacctccccaagcggcttctcctatagcaaagagagcatagagtgggtacagaagagattaaacctattaggcgaggagatgcggatggcggagagtcacctggagatgatgcaacatgagtttgcctggctcaagtctcatctggaaaggctgcagagactgaggagcagcagctcatgagtcatggacccggcaaatagtgagtactttacacaaagctgagggcaaagtacgtaccttagtttggttatttcttgttgttcgttgtatttaatagtacagtgatattgcaagcaatatcgatcctgtgggtgtggatatgttacgatcgagggcacacgtacgatacagtgatagactggtagagtgcaccatcatggtggtgtagtaagtaaatacatgatgaaactacagaacgttgtggaaaaatgtccacttgcaacgacaatgtatgcggtaaacttgcaaaggtatagattcagaatctgtgaaagtggaagatgtacattttacctatcctaggacatttgaccggt

SEQ ID NO: 1558 - DNA, 1209 bp, Oryza sativa
  ref <308>: DATABASE ACCESSION NUMBER: AK059585
  ref <309>: DATABASE ENTRY DATE: 2001-12-06
ccgctcttcccttttcccgtgcttgcactccaaaaacgcaaaaaccgctttcttttgcttccgtccctttccattcgtcctccctccgcctctctcgccatccgccgcggcgccaaccgagtcgatcccccctcccgcccccgccgccatgggcctcctctcgaacaggattgggaaggagaccctgaaggcgggggatcacatctattcgtggagggccgcgtgggtctacgcgcatcacggaatatatgtgggcgatgataaggtgatccattttactagaggaaggggccaggaggtcggaacaggaactttcattgacctcctccttatgagctctggtcctaatacaaacactccatgttcaatatgcaacaatgaaggtgccaccaccaatacggagacaaatggtgtggtatcctcttgcctcaactgcttcctgtcagggggcgccctctaccgtttcgagtatgctgtcaacccagcacttttccttgccaaagcgcgaggagggacgtgcacgcttgccccaactgatccagatgaggttgttgtgcgccgtgccaatcacttgctcagcaatggtttcaggtgctacagcctgttcaagagcaactgtgaggacttcgcgatatactgcaagacaggcctccttgtggcagagcaaggtgtcgtcgggcagagtgggcaggccatctccatcatcggtggacctcttgctgcggtgatttcaaccccattccgcctagtaaccacgaatatctatggaatggcggtgatggcagttggggtgtattgcgccagcaggtacgcagctgacattggcaaccggcgagatgtgctgaaagtggaagtggaggacctgactgctgggctggcgagtggcaggattcgtgccgtggagaacatcagtcagttggttgctccggcagaagcccaaggtctggccgtaaccgcacctgttgctgcttaaagtgcaccactgagatctatacattactccagaccttctgctgctaaatttatggatgtttcgttgtcaaatatcagctgaaattgtgtaccagagtgagcctcccattcagcaatagctgtacaaacaatgaaaaaacttatacgcccgtttctgccatcaactgttatgtgtggcttatctactgttgtataaattatgaacatggaagtgtggtgcttgtcgatttgcaactc

SEQ ID NO: 1559 - DNA, 1590 bp, Oryza sativa
  ref <308>: DATABASE ACCESSION NUMBER: AK104087
  ref <309>: DATABASE ENTRY DATE: 2002-08-28
agcagctcaaaaccccgcaacaacccaaccctcgtgaccaacccatctccccaccaaccccggccgccgccatgaccggcgccgtctccaagctcgccgccccgaggccggcggccgccgcgccgctcccgccggcgtccgtccgctccgcgttcctcgcctccgccccctccccgcgccgcttctccgtctccatcgccgccggccgcgccaggagccccatcattgcgatggcttctgccaaggaaggaaatggtgccccaacgaagaggacaacccttcatgatctctatgatctccagggtcagtccccgtggtacgacaacctctgccgtcctgtcaccgatttgctgccccttattggcagcggcgtccgtggagtcaccagcaacccatcaatttcccagaaagccatctcgacttccaatgcatacgatgaccagttcaagcagcttatattagctggaaaggacgcagagagcgcttattgggaacttgtcatcaaggatatccaagatgcgtgcaaactttttgagcctatctacgaccagaccgatggggcagatgggtatgtttctgtggaggtctcccctaggctggcaaatgatacccagggaactgttgaagctgcaaaatggttgcacaaagtggtcgacaggcccaatgtctacataaagatccctgctaccgcagaatgtgttccttctatcaaggaagttattgctaatggcattagtgtcaacgtcacacttatcttctcgattgcaagatacgaggctgtgattgatgcttacattgatggacttgaggcctctggtttgagtgacctatcccgagtgaccagtgtagcgtccttctttgtcagccgagttgacacacttattgacaaaatgctcgagaagatcggaacacctgaggcacttgccctcagaggaaaggctgctgtagcacaggcaaagctagccaaccagctttaccagaagaaattctctggcccgaggtgggaggctttggtcaagaaaggtgccaagaagcagaggttgttgtgggcatctaccagtgtgaagaaccctgcatacccagacactctcgtggatcctctcatcggacctgacaccgtttctaccatgcccgaccaagctctgctggcattcatcgaccacggcacagtttcgaggacaatcgacgcaaacgtttcggatgctgaaggtgtatacagtgccctggagaagctgggtatagattgggatgaggttggcaagcagctagagctggaaggtgtggactccttcaagaaggccttcgacagcctgcttgggagcttggaggagaagggcaattccctcaagaagaccgtgagcctgtaggtgcaaagatagctgaaatgttttgaacgctggcaatggcaagtgaacgattactaaataaatgctctaccttgctggctctctccctctctcaaactctcttgtgatgtgctgctctcgaatttctgggtcagcttttgtattctaggcgctcttggctgctatttgtgtaactgaggttgcgaactgctatgcattttctgataaattgttgggcaagttg

SEQ ID NO: 1560 - DNA, 1029 bp, Oryza sativa
  ref <308>: DATABASE ACCESSION NUMBER: AK059586
  ref <309>: DATABASE ENTRY DATE: 2001-12-06
agccgaagattcaactccaagaaagtgtctcctaagatgccgtctggtagttataacatagctcaggtgacatatgagcttaatgttcttggcaccaggggccctaggcggatgcactgtgtcgtgcactccatacctgcctcctcagtcgagcctggtggcattgtccctggccagcccgagcagattgttccccgagctttcgaggagtcatttcgcagcaccacctccttttctaagtcatccatcatggatcggtccatggatttcagtagttcccgtgatttcagcagtgctcgcttttcagacattgctggaggcaccataaatggtgatgaagaggggcaaaataaggagaggccactagtgcttcgcaacaaggcccctaggtggcatgagcagctccaatgctggtgccttaatttccgtgggcgtgtaaccattgcgtcggtaaagaatttccagttgattgctgcaccagcacagcctcccgcaggggctccaactccgtcacaacctgctccaccagagcaggacaagattattctacagtttggtaaggtagcaaaagatatgttcacaatggattaccgctatccgctctcagctttccaggcatttgcaatatgtttaagtagcttcgacacaaaactggcctgcgaatgagggaaacagtgagctctaatggaggcagaactggaaatgcaacagggagcaacttgagaaatgtaatgcccaagggctctagatcatgtttgcattttgttgtgtcgtcttggctgtatttctgcttgtagcctggaactggatttctcagcctgtatgtttcacctggtagcaccatgataggtttcctttgggacagcggttcatgcattgcatttttccatttgtgtggtgtacatgcggttccggatttaagctgaaaggatccgttcatgtctttgttaagctttgcatggatgccgtgttctggtaaagaaaagggaaagattcagtgcttcacttattttgtgcccgggtgggttc

SEQ ID NO: 1561 - DNA, 413 bp, Oryza sativa
  ref <308>: DATABASE ACCESSION NUMBER: AK059587
  ref <309>: DATABASE ENTRY DATE: 2001-12-06
attgtgctcatcatctcaaagcccttcatctccttgtcatcttgagttgcttgagcttatagatttcgacaagatgtcttgcagctgtggatcaagctgtggctgcggctcgaactgcacgtgcggaaagatgtaccctgacctggaagagaagagcagcagcgcccaggccaccgtcgtgctcggcgtcgcgccggagaaggcgcacttcgaggcggccgccgagtccggcgagaccgcccacggctgcggctgcggctccagctgcaagtgcaacccttgcaactgctaagaagccatttatttggctattatcatctgtgtgatcgtgtgtccgtgcgtgtgatgaatgaataataaaggagccatatctgctctggcatatgcatagtgcatatgcagtttgtgtgatc

SEQ ID NO: 1562 - DNA, 1786 bp, Oryza sativa
  ref <308>: DATABASE ACCESSION NUMBER: AK059588
  ref <309>: DATABASE ENTRY DATE: 2001-12-06
ctcacctccttctcgccttcctcctcacttgctctcctgctcgtcgccgcagcggttacgtcacgtcacgtcacagccaggccacgggcgtacgcgcgcgcgcgcgaggcctgagaagcaaggtattgggctgggagcgagggggtggtggcatcgcggtggtggggggtggagatgatctcgcagttcttcgtgctgtcgcagcgcggcgaccacatcgtcttccgcgactatcgcggggaggtgcccaagggcagcgccgagatcttcttccggaaggtgaagttctggaacgacgacgaggccgaggaggcgccgccggtcttcaatgttgatggcgttaattatatccatgtgaaagtcgcaggactattttttgtggtaactacaatggttaatgtctctccgtccctcctcttggaactcttgcaaaggattgcacgtgttacaaaagattaccttggcgttctaaatgaagattcattgcggaagaatttcattttagtgtatgaattgctcgatgaagtcattgactttggatatccacaaaccacctctaccgaggttctgaagtcatacatattcaatgagccaataatggttgatgctggtcggctgcctccacttggtcctgctgctatgttcatgcaaggcactaagcgtatgcctggtacagctgttacaaaatctgttgttgctaccgaacctggtgggaagaagagggaggaaatttttgttgatatcattgagagaataagtgtgacatttagttcaagtggttacatacttacatctgagattgatggaaccatccaaatgaaaagttaccttactggaaatccagaaatccgtctagctctaaatgaggatttgagcataggaagaactggctcttcttcgtatgattacagaagttcttctggaggaggagctgtcattcttgatgattgcaatttccacgagtcagtacatctggatagttttgacattgacagaactctacatttaataccaccggatggggaattcgctgtaatgaactaccggattactcaagaatttaagccacctttccgtgtgaccgcactaattgaagaagccgggccatctagggctgaagttctattaaaaatacgggcagacttctctgcaaatgtcactgcaaacacaatagtagtacagatgccagtgccatcttacacaatgagggcaagttttgaattggaagctggagcagttggacagacaactgattttaaagaaggatccaggagaattgagtggaatctaaagaagatcgttggtggttctgagcacacccttcgggcaaagctcacattttcccaggagtcacatggaaatctcacaaaggaagctggaccagtaaacatgaatttcactataccgatgtacaatacttcaaagttgcaggttagatatcttcagatagcaaagaaatccaagacatacaacccctataggtgggtgagatacgtaacgcaggctaactcatatgtggctcgtctatgagatagcgatgctttgtatacatctccctctggtcatttccccttttccttgcgctattatcttcgagggacttcaagcaagcttggacagagtgtcatgcattgcattgtaattttatagagcaatcccaaacttaaactcttctcctgcagttaatatctacctagggcaatttatttttccttgtgtaatatgcaggagatacatgatcatatttttgtatgctgtgaaaatgaatgaagttattgttcatcac

SEQ ID NO: 1563 - DNA, 306 bp, Oryza sativa
  ref <308>: DATABASE ACCESSION NUMBER: AK059589
  ref <309>: DATABASE ENTRY DATE: 2001-12-06
atcgacgtgaagaggatccaagaaataatcgattccatggaggctgccgaggaggcaccagcggcagaggctgagtcgagctcgatgcaggaggaggacaagggcacggacgccgcgcccatggacatctaggcccaagatacatcttatctcctcccttacaccgtgtctgagtttccaaaagactactgttttagaaagctgtgactgttgtgtaccctttcttcagtactacaactttgcgacggtctctttgatcaacatcgattgtgttttggaccgattatttacatgtgatgcggacag

SEQ ID NO: 1564 - DNA, 506 bp, Oryza sativa
  ref <308>: DATABASE ACCESSION NUMBER: AK059590
  ref <309>: DATABASE ENTRY DATE: 2001-12-06
ggtagacaactttctctaccctatatctgcattcaggtctcatttttcccaatcaatcaattggtctggtatcaggtaccacctgaaagatgggaaaataagcaagatcgagagagagaacaaattgaagtatactgatcttggtgggaagcatctgtatggcaagaggacatacccttccaaaacatcattgcttggttacttgtctagaactgtagcgcaatggcaccagcccaagaagtatgatgtctaggaaggcaaaccagaaatttaggcctcaatttaggccttgttgtacactcctttttggtctccatcttcttttttcttttcttctgattgtctattgattgctaggctctcattcatattgaatttggtgttcaagcagtgtcatatcaaaggtttgcacctcatagttcttgtaacagtatagatatgtaacatctgatcgaagaagtgaaatgcttcatacttgttccgttctcggttctgcttttatgatc

SEQ ID NO: 1565 - DNA, 605 bp, Oryza sativa
  ref <308>: DATABASE ACCESSION NUMBER: AK059591
  ref <309>: DATABASE ENTRY DATE: 2001-12-06
attctcaatcataactgtgatgtcatttttccttttggcccctgttgccttcctaacagaaggcatcaaaatcactcctacagttttgcaatctgctggtctgaatgtaaaacaggtgcttacaaggtctttacttgctgcactttgtttccacgcgtaccaacaggtgtcctacatgatcctcgcgagggtgtctcctgtcactcactccgtgggcaactgtgttaagcgtgtcgtggtcatcgtaacatcggttttgttcttcaggactcctgtttctcctatcaactccctcggcactgccatcgcacttgccggagttttcctgtactcacaactgaagagactgaagcccaagcccaaggctgcgtaactgaagcatgcagttgccatcttattgtagcagtctttccaagatgaattgtcgtagcacacgtttggaaatttatagtgcatttagtgtagagggaagctgaacatgttcacgttgaagctaagtgtagtaggatcatgtatgtggtctaactcttacagttaaagcagggttttgaagtacatgagcagatttccgtgcgtgttgttgcaataaagtttcggcttcaatt

SEQ ID NO: 1566 - DNA, 1115 bp, Oryza sativa
  ref <308>: DATABASE ACCESSION NUMBER: AK059592
  ref <309>: DATABASE ENTRY DATE: 2001-12-06
tccgggtcgattgctttcggtgcatataatgcacacagctctagtttctggttgggctggctcgatggctttatacgaattagcggtttttgatccctctgatcctgttctggatccaatgtggagacaaggtatgttcgtcattcctttcatgactcgtttaggaataaccaattcgtggggtggttggagtatttcaggaggaactgtaacgaatccgggtatttggagttatgaaggcgtggcaggggcgcatattgtgttttctggcttgtgtttcttggcagctatctggcattgggtatattgggacctcgaaatattctgtgatgagcggacgggaaaaccttctttggatttgcccaagatctttggaattcatttatttcttgcaggggtggcttgctttggctttggcgcatttcatgtaacgggtttgtatggtcctgggatatgggtgtctgatccttatggactaactggaaaagtacaagctgtaaatccggcgtggggtgcagaaggttttgatccttttgttccggggggaatagcttctcatcatattgctgcgggtacattgggcatattagcgggcctattccatcttagtgtccgtccacctcaacgtctatacaaaggattacgtatgggcaatattgaaactgtactttccagtagtatcgctgctgttttttttgcagctttcgtagttgccggaactatgtggtatgggtcagcaactaccccaattgaattgtttgggcctactcgttatcagtgggatcagggatactttcagcaagaaatatatcgaagagttagtgatgggttagccgaaaatctcagtttatcagaagcttggtctaaaattcccgaaaaattagccttttatgattatattggtaataatccggcaaaggggggattattcagagcaggctcaatggacaatggggatggaatagctgttggatggttaggacatcctatctttagagataaagaagggcgcgaactttttgtacgccgtatgcctactttttttgaaacatttccggttgttttggtagatgaagagggaattgtgagagcgggcgttccttttagaagagcag

SEQ ID NO: 1567 - DNA, 1598 bp, Oryza sativa
  ref <308>: DATABASE ACCESSION NUMBER: AK059593
  ref <309>: DATABASE ENTRY DATE: 2001-12-06
agaatggtattctctattatatgaggctcatttggctgggtgcaaactctgaattgcaacttaaaattctgtctgctttccattgctctgccgtgggtgggcattctggtatacaagttacttacagcagagtgcggcgcttgtttgcatggccgggtttgaagcaggccgttcgccagtttgtgtccaactgttcgatctgtaagcaagcaaaagctgaacgtgtgcgttaccccggtcttttgcaacctctacctgtgccggagcatgcctgggtaactgtttcacttgattttattgaagggttgccttcttcagcaggttttgactgcatactggtggtcgttgataaattcagtaagtatgcccatttcctggctttagtgcacccattcaccgcttttgatgttgctttggcttatctgaacaatgtttataaactttatggattgccacatcatatcatttcggacagagtccgtatttttaccagcgccttgtggacagagttatttcagttgacggatactcgtctgaagttaagtactgcttatcacctacagacggatgggcaaacggagcgtgtcaaccagtgtttggagacatttctccgctgttttgtgcatgcctgtccaaagaagtggttccgttggtgggctttagcagaattttggtataacactgcttatcattcagcgcttgagaggtctccatttgaggtactttatgggcatcctcctcgtcattttggggtgtcgagtacagctgaatgtgcagttccagatcttgacaagtggctgaaggaacgggcagtaatctccagtttgttgcgtcagcatcttttacgagctcagcaacgaatgaaatttcaggtcgacaagaagcgttctgaccgcgagttcgctacgggagattgggttttttgaaggctcaaccttatgcacagagttctcttaccgggcataccaatcacaaacttgcttttcgctatttcggaccttttcaggtactgaataaggtgggagcagtggcttatcgactacgattgccggatgattgctcgattcatcccgttgttcatgtctcccaacttcgacaagctgtggcaccaaccactgcgactgatgttcgtgctcttcctaccatggcaccagaggaggtggttcctgttcaagttctcgcccggcgagtttcgaagaaaggagctggagctgtggaacaagtcttggttcgttggacaggtcaatcatcaagtgaggctacctgggaagatgctgcggctttgcgtcttcgatttccggatgcgccggcttgggggcaagccgctttcgaagggggaaggaatgttacgggtgctgctactgtatctgaaccggtaagggagaataatcctgtgaagtctgggaaacgacctcaaagggagagaaggccgaatgtccgagtctctgggccggagtggtcttaggccagctgtatgccgtgcatgtatataagcacaggtagagagaggaaaggatatcaaatatttgagctgtaaacttgaaaccaaactctgtctctactgctctttcctctgctcaagtatttctctctcgttc

SEQ ID NO: 1568 - DNA, 1373 bp, Oryza sativa
  ref <308>: DATABASE ACCESSION NUMBER: AK104088
  ref <309>: DATABASE ENTRY DATE: 2002-08-28
gaatgtagattgtgaagttctcctttcctgcgtacggccatatacacttttatcatggcaccgcgcaacaggtcttcagctagaaggcctctctggattgtcatcttgattgcttttgtctgtgcagtaggcattggagcctatctttatacaccccagcattacacaccttgttacttggtgtcatcaaattcctgtagttctcggcctcctccagaacctgctagggtttacactgatgatgagattgctgctcgtattgtcataagagatatcattttggcacagccagttcagtcaaagaatccaaaaattgctttcatgttcttgacacccagttcattgccattcgagaagctttgggaaaagttcttcatggggcatgaagacagatataccatatatgtacatgcatcaagagaaaggcctgttcacgctagtccgatatttaatggcagagatattcgaagtgaaaaggtagtctggggcacaatttcaatgattgatgcagagaggaggcttttggctaatgcactgcaagatcctgataaccagcattttgtcttgctctctgagagctgtgtaccacttcataactttgattatgtatatagctatcttatggaaacaaatatcagctttgttgactgttttgacgatcctggtccacatggagcaggcagatattctgatcatatgctacctgaaattgttaagagagattggagaaaaggtgcacagtggttcacagtgaaacgtcagcatgcagttcttattctttccgatttcctttactatgcaaagttcaagcggtactgtaagccgggaaacgaatggcataactgctattctgatgaacactatttgccaaccctctttaatatggttgatccaactggaattgcaaattggtcagtgacacatgttgattggtctgaaggaaaatggcatcctaaagcttacagggctgttgacacaagctttgaactgcttaagaatatttcgtccattgatgagagtattcatgttacaagcaatgcaaagcaccaagtgatgagaagaccgtgcctatggaatggcatgaagaggccttgctacctatttgcacggaaattctatcccgaggcactcgacaatctgatgaacattttctcaaacttcactatcatctaagggaaggatgaatcaaaaacctagtttgcatgtaacactacagtataggccttggaaaatcagaaacccagagagactcgctgaattgttttttgtgatctctcttggaacatcaaatgattttcctttttcgcgaagatgttgcatggtttgcagttgaaagagcagtcaaatttgttcctcactgcgctgttctgagc

SEQ ID NO: 1569 - DNA, 1442 bp, Oryza sativa
  ref <308>: DATABASE ACCESSION NUMBER: AK059594
  ref <309>: DATABASE ENTRY DATE: 2001-12-06
actccgctcgatagaattctctctgcttcgcccttcgcggtttatccgctacaccgaaaaaaaaatacccacaaaaccccgtgaggccgtgacaacgcgccatggccgccgcggcgcccgcgctgccggcgttcgcctcgcttctcctcccctcatccagctcgcctccccgccgcatcccgtggccccgccctctgccttctcgccggggcgctctccgccccgtcaagctgctccccgccatctcagctgtggagaagggcaagggcgccgccgccgaagccaaggaggtggagctggaagggatgccgccggagtactacgacgaggaatggcaagctcgtcagcgggaaaagactaaggaatggaatgcatatcggaagaaagaggaagctgaggaagaaaggctaacaaatgaataccgtgaaataggcatgcgtttgaaagcttacccacaggaagaagttcgcaaagctcggattttggtttcaagttttataagagctggtgaagatattgaagaggaaattgagaaggctgctgaaagaggagagcttactgaacttgttcttatggtcatatggaatcgacttgatgttgctcgccgcgatgatgagagggatgccatcagaagccttgatctcttatacagaagggtagagacggaaattttaaggagtgaagcaactcctgctatgagattgctcaatgaccttctgaatcttcatgatggatctgatgatgacaagtggttaaagaaatgtaaaaaacatatgcttgaagtttttcccagagaagacccgttcaccatggtctttcctgctggtttcaacatggaggaacatcaaggacagatcaagctgccacctcaggatgatgatgttcttctaagagttgatttcatcagggaagttgatgagctcttgaaggaagttcaagctgcacatgaaaacaataaggtcccaactggtaatgacccggaagctgttgcgaccaagttgaagtatcaagagaagctgcggaccatacgtcaagtggaatctctcctggaactggcatcctccctgaaatggtgaggattgagtttgcagaggaccatgaaattctgcgcacataggactagaagttaccggctgagtacttgatagctgcaattagggtgcagccttttgagctgattctcaggtttctgctagttagaaactcctagcatttgaatacaaaggttagctgatatctgcttgggcgtcaatgcattttcgtagaatattttctgcacctgggtgtccaactcctattagatttgtactgctctagtcattcagagttcaactgtaactcaagcagtgaggctttgctctggattaatgtatcatcatgagaatggtgtgagggtatctcacacgctcaagctctagcatgaggcagatgagtttcaagcc

SEQ ID NO: 1570 - DNA, 1812 bp, Oryza sativa
  ref <308>: DATABASE ACCESSION NUMBER: AK059595
  ref <309>: DATABASE ENTRY DATE: 2001-12-06
actcatctgcttggctctcctcacaccacccttggattcttgcacttgggagcaagctatagctttgctttgccttcctctcttcaaccctcactctcagcattgttaagctcaggatttggccacctttctcctatagggatcacacaaacaccggtagaaaaaagctcttcttggagctctctgcttggcctctctctctttagtttagccgcaaacaatttcctctcattttttctttgatggccgcgttgcatgggcatggcttcgcggtcaccgtgctactggtggtgttgttggtgcaatgtgacgcggcggaggcgacgacgtgcgccggtgcggtgccggcgaggccacggccggagacggtgtccatcgccgagttcggcggcgtgggcgacggccggacggtgaacacgtgggcgttccacaaggcagtgtaccgcatccagcaccagcgccgccgcggcggcaccacgctgctcgtgccggccggaacgtggctcaccggcagcttcaacctcaccagccacatgaccctcttcctcgccaggggcgccgtcctcaaggccacacaggagacgaggagctggccgctggcggagccgctgccgtcgtacggaagggggagggagctgccgggggcgaggtacaccagcttcatccacggcgacggcctccgcgacatcgtgattacaggtgacaagggaatcatcgatggacaaggtgatgtatggtggaacatgtggaggcaaaggacacttcagcataccaggcccaaccttctggaattcatgcattccagtggcattcacatctccaacattgttctcaagaattcacccttctggaacatccatcctgtttattgcgacaatgtggtcataaccaacatgatgatcatcgcaccacatgactcgcccaacaccgatggagttgatccagattctagcaccaacgtatgcatcgaggactcctacatctcaaccggcgacgatctcgtggccatcaagagcggctgggacgagtacggcatcgcctacgggcggccgagctcgggcatcaccatcaggcgcgtcaggggctcgtcccccttcagcggcatcgccatcggcagcgaggcatcgggaggcgtcagcaacgtgctggtggaggactgcagcatcttcaacagcggctacggcatccacatcaagaccaacattgggaggggcggcttcatcaggaacatcaccgttgacaacgtccgcatgaacagcgtccgcaacgggctgcgcatcgccggcgatgtcggtgaccacccagatgagcacttcagccagctcgcgctgcccaccgtggatgctgtcagcatcaagaacgtgtggggtgtcaatgtgcagcagcccgggtcgatcgaggggatcaggaactcgccgttcacgaggatatgcctcgccaacgtgaagctgtttgggtggaggaataatgcagcttggaagtgcagggacgtccatggcgcggcgctgggtgtgcagccggggccgtgtgcagagctcacgaccagcctttcttcagggttctgcagctattagtgtgatccagttgtataatgttttttgattagaaaggttgtgcttgcttttttttaggtttgactgctccctaattgtggttgggattgatcaatatgttaggcttgtgctaatcagttaaggagttttaggtgtctttttgttagagaaaggtttggcttctaagttgtcagtctgagtgcaaatatgttctaatctgaataataaatcccagcttgtgtgagattaatactccgtc

SEQ ID NO: 1571 - DNA, 1522 bp, Oryza sativa
  ref <308>: DATABASE ACCESSION NUMBER: AK059596
  ref <309>: DATABASE ENTRY DATE: 2001-12-06
ccccttccaccatcctctcctcctcctcccctttcccatccatctctctctctctcctcctcctcgccgccgaccgccgccgccgccgcgagtcgccttcgccgtccgggtagcagcaggaagagggaggaagggggggcatggcgctacggaggctgctccaggggagcgtcctgccgcggatggcgggcagagccgccgcggcgccgttttcgacggcgtccggggagaccgtccgcgccacgctcttcccaggcgacggcatcgggccggagatcgccgagtcggtcaagcaggtattcaatgttgcaggggtaccaatagaatgggaagaacactatgttggtacagaagttgatcccagaacagagagttttctgacttgggaaagcttggagtcggtgcggagaaacaaagttggcttgaaaggtcctatggctacgcctattggaaaaggccaccgttcattgaatcttacactaaggaaagagcttggtctttatgcaaatgttagaccttgcaacagcctcccaggatacaagactcgatatgatgatgtgaaccttgtgactattcgtgaaaataccgagggagaatatagtggccttgagcatcaggttgtgaggggtgttgtggaaagcttaaaaattatcactcgccaagcaagtttaagagtggcagagtatgctttccactatgccaagaccaatggccgggaaagggtctctgcgatacacaaggccaatatcatgaggaagaccgatggtcttttcctcaagtgctgtcgtgaagtggctgagaagtaccctgaaattgtatacgaggaggtcatcattgacaattgttgtatgacgcttgtgaagaatcctggtctttttgatgtactggtgatgccaaatctttatggtgatattattagtgatctttgtgctggtctgattggaggcttgggcttgacacccagctgcaacattggtgagggtggcatttgtctggcagaagctgttcacggttctgctcctgatattgctggcaagaaccttgcaaacccgaccgctcttatgctgagtgctgttatgatgttgcgccacttgcaattcaataaccaagcagaccggatccacaacgccatcctccagaccatctccgaggggaaattcaggactgctgatctcggcggaaaggcgtcgacttcagacttcacgaaggcagtctgtgatcatatctgatcgtccgatgtgattccgtccacttgattgttttccttccccctaatttttgttgcatacgcggagagaagctttagctttaagaggttaactggcggcacctcaatttctttgggcttcagcatgggttaagaccacctaataatcctgtcgcattcttgctcttggaaaagtttcttccaacattgcagtccagtcagagaatggcctgtaataattagtgacaaaattatagcagtagatagaatctgttcattcaagttcttcaaattactgggccaagcttcaatgtc

SEQ ID NO: 1572 - DNA, 1047 bp, Oryza sativa
  ref <308>: DATABASE ACCESSION NUMBER: AK104089
  ref <309>: DATABASE ENTRY DATE: 2002-08-28
gcattccatcacagacagttcgcagaatcgcagcagcttagcttaattacttttttcaccaactcaactttcagttaatttccggttaatcctcgattcctcatcatgcctggactcaccctcggcgacgtcgtccccgacctggagctcgacaccacccacggcaagatccgcctccacgacttcgtcggcgacgcctacgtcatcatcttctcccaccccgctgacttcacgccggtctgcacgacggagctgtcggagatggcgggctacgccggcgagttcgacaagaggggcgtcaagctcctcggcttctcctgcgacgacgtcgagtcgcacaaggactggatcaaggacatcgaggcctacaagcctggccgccgcgtcggcttcccgatcgtcgccgacccggacagggaggcgatcaggcagctcaacatgatcgacgccgacgagaaggacaccgccggcggcgagctccccaaccgggcgctccacatcgtcgggccggacaagaaggtgaagctgagcttcctgttcccggcgtgcacggggcggaacatggcggaggtgctgcgcgcgacggacgcgctgctgacggcggcgaggcaccgggtggcgacgccggtgaactggaagcccggcgagcgcgtcgtcatcccccccggcgtctccgacgaggaggccaaggcgaggttcccggccgggttcgagaccgcccagctgccctccaacaagtgctacctccgcttcacccaggtggactgagagactgatggtgagggagggagggagagatctgggccgtcggtttcgtgtgtaataaaccaacgcacgacgtagatgcttccacgtgtgtgtttcccgtgctgcttcgattgatcgatcgatcattcggtaagtactctagttatgtgtaatctgctgtttgggtgtagtggtgcatttgctgttctgttgcctgaaagtgacgaacggattatgtttgtcatttgtatgtaaaatgtaaccgtatgttttttatttatcccttccgaaattactgtg

SEQ ID NO: 1573 - DNA, 1507 bp, Oryza sativa
  ref <308>: DATABASE ACCESSION NUMBER: AK059597
  ref <309>: DATABASE ENTRY DATE: 2001-12-06
atctcttctactcttcccgcgtctcctcgcgcctcttcccgccaatcgccaacacattttcccccacctcacctcgctcaatgccctcgtcaattccatttcatccccaaacttccttctgctcttgctagggttccttccttcattccttcatctccctcccattccgtccctctcttccagattactagcgagctcgatcctgcggcaggggcaagtcgagcgatggcgccgctctcgtggcgccaccacacgctgctgcaggcgctgctctcccgcgggcccctctcggagcgcgacttccacgccctcttctccgccatctccggcggcaagaaccccgccactcatcggcagctgttcgatgatacactcctcaagatcaacaaggagctcacgtacttgcagtttgagttaagagcaggcataaaccagtatgatggtactgtgtattatggagtggtcaataacattgctgatgaagagtcaaagcttggatcaaagttttctgtgccacagattgcattctacaagggattgttggaagcaatagttcatgaagctggaaatgatgggagcataacaaatatcgatgctcttaacacacggattgagaaccaggttgtaattgcaggcgcttcacagggcagtcaatcccgtctgcctacttccattaccaacttctcattgtcccaaaaggagaaaactcttaatgaactcatacaggatcgttggctgtcatacactcccacaggaaagattggtcttggcataagatcatttcttgatctccgaagttggttacgtagtaatgatatcccatcatgtgaggtctgcaatgaagcttgtataaaggcatcatgttgtcctaatgaggaatgcaatgtaaggattcatgggtactgtttgaagaagaaattttcgcagagaaaggcctcgagagcttgtggttgtggtactgaatggcctcggttggagggtgaagatgacggtgctgaggatgaggatgttaacgaacctgaggaagatcaggtcccatcagccaaccagcattcgaggactagacgcagaggtgtcaaatctgaactggtggaagaaaatgaaagagcaggcccatcagcgaggatgacaaggagggctttgagaagctctaaagctgaagcagttgaggctgctcaagaggtgccatctgcagcaggaccttcgcagtcaaccagggcatctaagagaagaaagaactgatgagattgatctgtgcttgctagtgagatctccaggttccttttgtcatgtacatacagtagcagtagccagtaggtaatccttttgaagtggcaggcaaagttgcaacttctagttggagaggaatatatatagctttcggatgctcttgttactaactcttagaacgtattagaagcctaatgctttcatttggcaaagcaagcctgcttgtggcagcacagttaattgtttgaatggctctcttgctcgttgatgctagttt

SEQ ID NO: 1574 - DNA, 1235 bp, Oryza sativa
  ref <308>: DATABASE ACCESSION NUMBER: AK059598
  ref <309>: DATABASE ENTRY DATE: 2001-12-06
cttatggagaaataaagcagaatatgccatttcagtgcactatgatcgtacttgtgtctcggaggaagtgcttcaaaacaagcgactgaacaagtacaaccacactgctattgatgagcaattttacttttaccaatctgatggtcttgtgaagttcaatgaatctggcagagagcctgttcttccaagttgttcgtatcattaccttatgatctgataaattacccagtatgaatatttcttcagtattgatcttttacatcacaattgtgcagatgtgcctgaaggatctttcattgtacgtgcccatacaccaatgtctaatctgttttcatgcctttggtttaatgaggttaaccggttcacctcacgagatcagttgagttttgcatatacttacctgaagctaaggagaatgaacactggaaaaccttttcacctcaatatgtttaaggattgtgaacgaagagcgataactaaactgttccatcaccgagctaacgagactgcagatccacctccagctaatccttgatttaagattcacttaccaatatcagggaaatgccttcatttgggtgttacttctgctactcaagccgctgctgctactaccactagtagtgcatcgctctctactagtagggcattgctcaggagttcttcatttgttcagtatgtcctatcccaagctgctggtccttcattgccaggtgaagggagtattcttgatcagggttccctactgctggccagactggtttacccaatctaccacttcagctcacgcagagcatgtcggcttcttctttctcgtttagcttgcaggggcatcgtgggctctcttctttagagtcatatttgtgggggctttatggatttgatagtgcacgtctgggcattgccgacgatgcagcaatttggtggggagctcccaaatcaacagcagcagacagatggctcttaccagcagcctcttcctcgagctctcagaagataatgctctctcttttttttggaggaagttaaggcatagaccatgtgtcgtttgtttttgcttctgtcgatctctggtctgtaattgctaagctgaaacgacttcatagttcttacatatactccattttctagtactagttctaaacctgggcaccatgcatgcctttttccttatgcggagtttaaagcacaatttaaagttgttcaaccgagttgagcacaatttgttccgcccg

SEQ ID NO: 1575 - DNA, 791 bp, Oryza sativa
  ref <308>: DATABASE ACCESSION NUMBER: AK059599
  ref <309>: DATABASE ENTRY DATE: 2001-12-06
atcgcctccaccgcctcaacccggacgcagcagccgcagcggaagagggaagcgaagcaagcgaagctcgaggggagatggcgcgcggcgtggcggcggcggcggggggcaagggcggcgccgggaagaagaagggctccgtcaccttcgtcatcgactgcgccaagcccgtcgacgacaagatcatggagatcgcgtcgctcgagaagttcctgcaggagcgcatcaaggtcgccggaggcaaggccggcaacctcggcgagtccgtcaccgtctcccgcgacaagaccaaggtcaccgtcacctccgacgggcccttctccaagaggtacctgaagtacttgaccaagaagtacctgaagaagcacaatgtgcgtgactggctacgggtgattgcatccaacaaggaccgcaacgtgtacgagctccggtacttcaacatcgccgagaacgagggcgaggaggaggattagatgcactgcctttttctatgtcttgtgaacttttgaacttgctggaacactatgctgtagtcactgaagagaagaattttgatgtttcatttatcaatgtttccctgtgtgcttaaaacctatgcttaggtaagcaagttgaagaattattggttctcacctttgcagttgagcagtgtgcatttttaaagttttaactggaacctgatggagctgttagtgctgttggttcatcagctgatactgaatcgagcacatcagcttttactatggccaatatcactcggaataaatccgattcattattgtgttatgttg

SEQ ID NO: 1576 - DNA, 1970 bp, Oryza sativa
  ref <308>: DATABASE ACCESSION NUMBER: AK059600
  ref <309>: DATABASE ENTRY DATE: 2001-12-06
cacgactctcggcaacggatatctcggctctcgcatcgatgaagaacgtagcgaaatgcgatacctggtgtgaattgcagaatcccgtgaaccatcgagtctttgaacgcaagttgcgcccgaggccatccggccgagggcacgcctgcctgggcgtcacgccatggaaggacaccggatatattgtttcgacgtgcgatgaatgcttgcagcgtgcttgatagattgcccacatagtctgggaggtttccggtgaaataatttgagtcgatttcaaggacagaaagcttcctacagttagaaagagcagacaagaatttaagatccccctgtaagctattttcgaaaataacaaagtatgtcaaagagttcatgctgccaactgttgatgggacagatccatccaacaggtttgtgctcaaatccaggcgtgataatgcagataagttgccgagagaagcagggatgggtccccttagttgattccttgcaataagcaaatctgaaagttttccaagctttccaatatctgctggaatggttcctgttaggttgcacgtgctgagctctagggaagccagcatggtaatgttgcttaacgcatcagggattgaaccaccatcgaagtgattctcacccaagttgagcttgacgagattcgtcaacttgcccagccatgatggcaaagcaccctcgaataagttctgaatgagggaaaaaacttggagttgctggcacgccgcaaacccctgtggaattggaccggtgaaattgttggcatcaatggagaaaaaccagagactcgggagtctgaagctttcgttgcctgggatagggccagttaagccgttcaaggcaagagcaataactcctagcatagacatgttgaagacgcctggtggtactggtccggcaagttgattaacctgcaagtcaaggaattgaagcatgggcaatgagccgatgcaggctggtattgatccagaaaggctgttgttggcaatgttgaggtaagataacaaaggtgtgttgttgaacagactgtttgggatcgacccagtgaggccattgttctgaatgttgatgctgcgaaggctgtgcaggccctgcagatcggctgggatttgtccagagagctggttaaccgcgagacgaagaacgccaagcctcgtgaggttccctatggaggctgggatgacccctgagagggcattattgccaagatcaaggagctcgaggcgatgcagccttccgatatcgtctgggattgaacccgtgaggtttgtgatggtgaggtcaaggacggagaggaaagataggttaccgatgtgagggctcagctttccttggaggggaactccgggcagctccactccggtgacacgctgccactgccgccggctgcaagtgatccccatccaccggcagaacggcgtgccggcagtccagttggtggcaagaatgttgtagggatcggagagctcacctttgaaagccagcagcgcagcgagatcgctgtcgctgccattgctcttgctcgtccctggaggagaagcagcagcagcagcaaccacaggggacaaagtgatcaacagcagagcggacatgatgatgcatactggagatccgagcgccatgacgacgctgaagtgatgcttttgtggcaattaactttgcaacaagctaagaactaacaaagcattatatgtatttccctcctcctgattggctgactgacggtaatcaatgagcccttggatgttgttttctctccacatgtgggattgtggggcatgaaacttgtttctttcacactattgacgaatcaagaccttgacagatacaaggtacatatagctatctttgccgaatgagtcgaatatattgactgttgaccaatcatgcacgcaccggttttgattggaaccttgtttgagctttcttttttaaagctggatcaaaatatcgtc

SEQ ID NO: 1577 - DNA, 1277 bp, Oryza sativa
  ref <308>: DATABASE ACCESSION NUMBER: AK059601
  ref <309>: DATABASE ENTRY DATE: 2001-12-06
attccaccgctcgccgtcgctgtctcccatcccatcccatgcatcactagcggatttgtggagtggttgcgccccctgcgagcgagctctgttcgtaccgcgcgctccggtgcggagtggttgctggccggcgaggcgggcggacggacgcgtcgatgcgcgtggcagtagctgcgtgcgggtgacgaagcaggggcacttgctatatccgtcgcctcttggcggatgtgcgggattctgcgcgcagtacgcggcggccatggacgcgtcctcgcccttcagcttccacgagctcaggcggcaggcctcgtcctacctcaccgacaagatccgctccgcgcggctcgcgctcaccgatgttaccccgacgcagctgatgacggaggaggcgacgagcggggacgcatcgccgccgaacgtgaagacgatgagcctcatcgcgcggcaggcgttcgagatcgacgagtacgtcaggatctccgacatcctccacaagaggttcgcgaggttcgacaggcggcagtggcgtgaggcgtacaaggccctcctcctcctcgagcacctcctgacgcacggcccccgtagcgtcgcgttggagttccagagggatcgggaggtcatcgagcagatggtctccttccagcacatcgacgagaaaggtttcaactgggggatgacggtgaagagcaagtcggagcgcgtgctgaggctgctggagcggggccccttcctggaggatgagcgtgagcgtgcgcgcaagatagcgcacgagatcaagggattcggcagcttcaacctcagcagcgcgcatgcgtcggggtcggcggcggcagccctccgcgcgggggcgatggagcaccagtgctacggccggagcaactcgcggtacgagggcaggtggaggagggaggcctgcgtggacgacggcgacaaggagaacctgctggtggtgtcgatggccgaggcgaaggccgaggcggcggcggaggagccgcaccactaccaccacccgttctacggcttcgggcagcagcggccggaggcgatgctgctcctgagccagtagtgatcgtttgggtggatggttcttcgtcgatcgcatcgttcgttggtttgtgatgcgtgagaaaaaatcctgtaaagtcagtggcttgctggcatcctctttgtaatgacccttttgtaatcgtcgtccttaatttcagttctgatttctgaaactctaaaaatgcctgattccctgagctcataaacacacgaagaaaggaaattttgag

SEQ ID NO: 1578 - DNA, 953 bp, Oryza sativa
  ref <308>: DATABASE ACCESSION NUMBER: AK059602
  ref <309>: DATABASE ENTRY DATE: 2001-12-06
gaaggccttgttccactagagatgactcgtcatgtttcgatgatttcaattaccttatctcccagagatctggacaagaactctcctgggtaccaaaccccagtttatgttgaacaaccccggcaacagccgcgcctccagcaggcgccaccaccaccacagcgccaagttcgtcaaccaccacctgattatgaagactcctatgtccggggtcgtggcagaggaagggggcgtggacgtggaaggggttggggtagaggaggttatggtggttatggtggatatggaaacaatcaaggtgggtacaaccaaggtggtgggtactatgataaccaaggtgggtatggtggctgtgataatcagggaggatatggtggctatgataatcaagggggatatggtggtggtggatatggctacaaccaaggcagatatggaaactaccaagaaaatggtggatataaccgaggacggggtggcatgcgcgggaggggcaattggaattaccgtggcgggtacgaacgaggcagaggtggcggttttcctggtggaaggggatatggcggccgcgggcggggaagaatgggtggccgtggtggacgaggaaactgaagatccaagcagtgagcagatgggtgaggagaatccatgggctactggtgatatttaagtgcatgctttatttaaatatcagggaaaaaagttatctatttatgtgttgggagccctcatgtttggtttgttgttttccctgagcgcgaggtttggttgtgagcataatgcctttttcccaaaggtatcctgtagtctttcgatgatgttcgggtatcatcctgtagtcaatctttcagtgttggttatcagctgctggcgagttttgcttgtttctcaatggtcgatgaatgctgagcatgcctctatgttcatgcccgtcgtatttacctgatgttatt

SEQ ID NO: 1579 - DNA, 1358 bp, Oryza sativa
  ref <308>: DATABASE ACCESSION NUMBER: AK059603
  ref <309>: DATABASE ENTRY DATE: 2001-12-06
acacgttgcgctcgccgccgcttcgacggagatgggcggcgccgccgccgccgccgccgtggccctgctcgcggccactcgccggcgccccgctgcgggcccgctggcgttcctcctccctcgcgcggcccgcgcggggctccacgaggctgctgctccggcggcggaggaggagaaggggaggacccggaggaggcggaggaggaggagcagcagcagccgccttctcgggccggacatccccgacacctgggactcgcccccgcgcgccgcggcgcggccgtctcccccgagcggcgccggagttgattatgactccactgcgaccattattgatggcaagtctgtcgcggaagacataaggtttcagatcgctgaagaagttcgtcaaatgaaaaatgcagtggggcatgtgcctggcctagctgttgtattggtcggcgatagaagggactctgagtcatacgtgcgatacaaaattaagggctgtgaggaggttggaataaagtccttgttggcggagttgcctgggaactgtacggaagacgtagtggtggattctgtgtcaagattcaatgaagatccatctgttcatggcattcttgtgcaactacctctaccacagcatatggatgaagaaaggattctgagcgctattagcctagagaaggatgttgatggtttccatccattgaatgttggtaatcttgccctcagaagccggaagcctttatttgtgccctgtgctgcaaaggcttgccttgagttattgctccagtctgggattgaactcatggggaaacatgtcactgtgattgggagaagcaaagttgttgggttgcccacttctttacttttacagagacaccatgccactgttagtattatccatgctttcacaacaaatccagaagagattacccgtcaatctgatattgtgatctcagctgctggagtggccaatcttgtaagaggaagctggttgaagaaaggtgcagttgtgatcgatgttggaacaaacccaattgaggatccaaccagtgattacggctatcgattaactggagatgtctgcttcgaagaagctgtgaagttggcctctgctataactccagttcctggtggtgtgggaccggtgaccattgcgatgcttcttgcgaatacacttgactcagcgaaactagcttacggcttagctactgaatcccctgaattgtaatcttgcttcactttgcctttgtaaattacttttttttcccctttttatcgctcgttgctctcacttttggctgtttgagagctgggatgtaagtgtaacatacattttgctgaataaatattgtatgattagcatgtcc

SEQ ID NO: 1580 - DNA, 1986 bp, Oryza sativa
  ref <308>: DATABASE ACCESSION NUMBER: AK059604
  ref <309>: DATABASE ENTRY DATE: 2001-12-06
ttttgattttcatgaactggatgaagtgctgcgctactaccctcagggctaccacggtgtcgaccgggagggccgcccagtgtacatcgagaggctcggcaaggtcgacccgaacaagctcatgcagatcacctcggtggaccgctacatcaagtaccatgttcaggagtttgagagggccttcagggagaggtttcctgcctgcacattggcggcaaagaggcacattgattccaccaccaccatcttggatgttcagggagtgggatttaagaatttctcaaagactgcgagggagcttatcaaccgaatgcagaagatagacagtgactattaccctgagacattacatcaaatgtttgtcgtgaacgccggcagcgggttcaagttgatctggaatagcgtgaagggctttctggacccaaaaacttcatccaagattcatgttcttggttcgaattaccagagtagacttcttgaagtaattgattccagtgagttaccggacttcctcggtgggtcatgctcatgcagtgacaagggtggttgtcttgggtcgaataaaggcccatggaatgatcctttcattttgaagctgatacacaatttggaggctggttgcgtcagagagatcaagccagtgtctgacggtgaagaaagaagcagctcatcccttcggttggagcagccgaagtggcagggcatgattagcgacatatcaaatgctgagtcagggtcagacgttgatgattttggttctttctttcagaaaggtgttgactatggttacctcactccagtccatgaggaagtaaggggaacagattctttgacttactatagctgtgatgaccagactcgtcgagatatagctcctgaatcttgtaagggagtgcaagctactggaatggtgcagaatcagctacctgataacaggcaaccctccacaaatcggaacccacatgactcaggaaacaatggtcacttggatggtgcatttgctcgaaggagtttgcaaaattatattcaagttgttgtcacaacctttatcaagctactctccttcctccgtctcttcatctccagaccagtgaggaggctcgagaatgtccattcttgtaccgtacctgtcccatctgaagaaaagccagagcctcgatctatacgtgatgatgatatgaccatgtgcttacaacgtcttgacagtctcgaatctttgtgtaaccatctagccagcaggccaccagagatacccagagagaaagagcatatgctactgaactcttttgagcggatcaaatgcattgaggctgacctggagaggaccaaaagagtgctgcacgcaacggtggtgaagcagaaagcgcttgtggagactctggaagctgtacaggagtcatcaagagctaggaagagattgttttgttcatagaatataccgcaccaagtcaagaaccatgtcgacatttaaccgcgacgcatgaagctctgccagtgccatttttgaccttccccaacttcatcccgggccagggaaaaaacctgaaagagaagagaagatagcatttggtgatatagcctgctaagctgcttcctttcagcatctcaccatctttttttttttgtagttgtctgtactagtaaagcccttctcttgtgcctggtgaatgttgtgccgtgcttagtgcagctatgttttttcttttttggccagcaagtgatctcgtcacggtcttttgcattcagggggcaagaagaaaagatggccgaactgcatgttgatgagtctgaaagtttttttacagctgacctccatttagttgacaaaagggcacaattggtgatagcttactggtgaaaatgtcccatgtaaatgctgcttttagtactagtttattacagtgctacctcctatgaatgattatcggataatacagttctagttagattataatcacaatgggatagtagtacaattgtgtgctt

SEQ ID NO: 1581 - DNA, 995 bp, Oryza sativa
  ref <308>: DATABASE ACCESSION NUMBER: AK059605
  ref <309>: DATABASE ENTRY DATE: 2001-12-06
tctgacacaggtcctccttcaaaagaaggggttaactctaaaccctatcacaagcctatattatatagccccttgcagtttcatcttcctgtttgttccttggtttttacttgaaaagccagaaatggatgtttctcaaattcagttcaactactggatatttttctttaatgcagttgctgcatttgcattgaacatatccatctttctagttattggaagaacaggagcagtcaccatccgagtcgcaggagttctgaaggactggatactcattgccctctcaaccattatctttcctgaatctattattacaagcctcaatataattggatatgctgttgctctctctggcgttgtcatgtacaattatttgaagatgaaagatgtcagagcgaaccaacttccagctgatatcgctcctgacagagctacgaaggataagaagatttcaaacatatacaagcctgacaatttcatggattctaatgatgaaaccactgttggaagtctggcgccagaaggtgcaggggttgatgaagaagcccctttgattccttcttcacgcctctcctatgttacccggacacaaactggcagcttcaatagcagatgaccatcattttctgaagttttgagttagttgagggagcaaactttgccccagattaaccagctttcctcctggggagtctgaaagaggtattaggatgataaactatagccatattagaagctctggtgaatagtcctgcattcaccttggtatattttgctagttggaactgaatgtgtattggccagacacctggagatgaagtagagaaaagtgcagggatagggtcaaatgtttgaccagtacttgggatcaatttggtagttgcgttagatatatattgcttattaacccagcatattgaaaatgtttagcagaccatagacgatgtaaagcattttatagatgctaatttgtattgcagttttgtttccgtttc

SEQ ID NO: 1582 - DNA, 502 bp, Oryza sativa
  ref <308>: DATABASE ACCESSION NUMBER: AK059606
  ref <309>: DATABASE ENTRY DATE: 2001-12-06
gtgctcctccgcctcttcctgccattaagcaccagatcctaatccgccattaatgcccttaactccaagctcgatatcagaggaggaagaagaggcgtaggagtagtacggctccgccgcctccctcccctgccattataagctcacgcgcggcgctcgcccgggcggctctgccacctgtgaccttgctgttgctgtcaccggagaggcggaggggatgctcacgtgcatcgcgtgctcgaagcagcccggcggcggcggcggggagccgctgcacgagccgccggaggacgaggacgccgtcgatggcggcggcggcggcggcggggcgacgcccagcacgcggctggccatcaaggcgctcactgcgcaggtggggttctcggtacttcactctcgagagtcgagactgtcactgtgtgtgcttgaagctcttcttttcttatcctgttgattaattcaatgaaaaagaaaagaaaagagaagatgatggttttggttc

SEQ ID NO: 1583 - DNA, 852 bp, Oryza sativa
  ref <308>: DATABASE ACCESSION NUMBER: AK059607
  ref <309>: DATABASE ENTRY DATE: 2001-12-06
accaagaccaccagacatgaagcttcacgtcgtggcagccatcctgctggccgtggccgcgtcgtcgtcgccgccgcccgccgccgccgtcacctacgaggtgagcaacgaggcggcgagcaccgccggcggccagcggttcgaccgggagtacggcgccgggtacgccaagcaggtgctcgccgccgcctcctccttcacctggagcatcttcagccagccgagcgccgccgaccggaggcccgtcgacgccgtcgtcctcgccgtccgcgacgtcgacggcatcgcctccaccagcggcaacaccatcacgctcggcgccggctacgtcgccggcgtcaccggcaacgacttcaagacgcaggtgaccggagtgttgtaccatgaggtggtgcacgtgtggcagtgggggctgcaggattacggggcgcattcgtgggtgtacgaggggatcgccgactttgtgcggctgcgcgccggctacccagcggctggttgggtgcagccggggcaagggaacagctgggaggacagctactccgtgacggcgaggttcttcgactactgcgacagcgtcaagccagggttcgttgccgacctgaacgctaagctgaagaatgggtacaacgtcgactacttcgtgcagatcaccgggaagaccgtgcagcagctgtggcaggattacaaggccaagtatggaaactgatgatcgatcgacgcagagaatgaataagacaagagattaccatcattgattgatatagattgttgtaactcatagctatggagtttacacaattattgtattgcttacggatgatagaataaagggacgctgtctagttttcaatc

SEQ ID NO: 1584 - DNA, 1290 bp, Oryza sativa
  ref <308>: DATABASE ACCESSION NUMBER: AK059608
  ref <309>: DATABASE ENTRY DATE: 2001-12-06
gagctgaccaccaccggagatggcactcgcagcgcctctgctccgcctccggctgctgcctctcgccgccttcgtctccgtcgtctccctcaccgcggcgcctcggcgtgcggaggcgtggggcaagcagggccacatcatcgtctgcaagatcgccgagaagtacctgtcggagaaggcggcggcggcggtggaggagctgctgccggagtcggccggcggggagctgtcgacggtgtgcccgtgggccgacgaggtgcgattccactactactggtctcgtcctctccactacgccaacaccccccaagtctgcaacttcaagtactcacgggactgccataattctcgtcaccagcaagggatgtgcgttgtcggggctatcaacaactacaccgatcagctctacagctatggcgattcaaagagttcatacaacctgacggagagcctgatgttcctggcccacttcgtcggcgacgtgcaccagccgctgcacgtcggcttcgaggaagacgaagggggcaacaccatcaaagtgcactggtaccggaggaaggaaaaccttcaccatgtgtgggacaacagcatcatagagacggccatgaaggacttctataacagaagcttggataccatggtggaggctctcaagatgaacctcacagatggatggtctgaagatatcagtcactgggaaaattgtggcaacaaaaaggaaacctgtgcaaatgactatgcaattgagagcatacatctgtcctgcaattatgcctacaaagatgttgagcaagacattactctaggagatgactatttctactctcggtacccaatcgtggagaagaggctagcacaggccggcatcagattggcgttgatactgaaccggatatttggtgaggataaaccagatggtaatgtcataccattacaagttcagtaagggttatgatcaccagaaatattcaggagaaatgttatttgttgctgccactctaattagtggttgtgcacatattttataaaaagcacacatacctatagtatagaattcaaaaatgtaattgttgtaattgcttattggaaagcacatttatttgtaagaagcacataggcctagtacagcattcaaaactgtaaatgctgtcattcatgtacaattgaaagtagtctgtgacaagaaacacataagcctagtatagcattcataaatgtaattgttgtaattcctctatgtttgaacagtgtaccacttgaataagtgtgtttcaaatcgattcatttccc

SEQ ID NO: 1585 - DNA, 623 bp, Oryza sativa
  ref <308>: DATABASE ACCESSION NUMBER: AK059609
  ref <309>: DATABASE ENTRY DATE: 2001-12-06
aggtcatcgtgcagtacatcgacgaggtctggccgggcggcgccgggggacgcccgtccgtgatgccctctgacccctacgagcgcgcggtggcgcgcttctgggccgcctacgtcgacgacaaggtccggccggcgtggctggccatcctgttcgggagcaagacggaggaggagagggcggcggcggtggcgcaggccgtggcggcgctggagacgctagagggcgcgttcggggagtgctccaaggggaagccgttcttcggcggcgacggcgtcgggttcgtcgacgtcgtgctcggcggctacctcgggtggttcacggcgatcgacaagctgatcggtcgcaggctgattgacccggcgaggacgccggcgctggccgcgtgggaggagcggttccgcgccaccgacgcggccaagggagtcgtgccggatgacgccgacaagctgctcgagttcaggcagaccctgcttcgctggagcgcatccaaagcaaagtgagatgacatgacacgactgttttcgccatggtgatgctgaatctaagtatgctgtacgtgtgtttgtataataacaaggagaaatgctgctgcacgattgagtttccttgatcgattcctc

SEQ ID NO: 1586 - DNA, 1456 bp, Oryza sativa
  ref <308>: DATABASE ACCESSION NUMBER: AK059610
  ref <309>: DATABASE ENTRY DATE: 2001-12-06
ttcaaaagcggtgaaaagacatccacaaacgagtggcgccatttccttgatatcaagggaagagtcaggctcagtgcttttcaagaatttcttgaacaacttcctaaatccaggagccgtgctataatggtaactgagttgcgttggaaggagggctctcttgagagtgggcgccagcatctcttgcggaccattgactcatatattgcagacgagagagtaggactagtgaagcctgcagatggagtggagctttacctctgcccttctcaagggaaggcagcacagatacttgcagagcacctacccaaggagcagtcgagcagcttaaccgtgacaggaacatcagctattggagtcgtcgtgtggcggaggccccatgtttcacctaggatacccgccaggaacgatggctccagaaaccaatccatctcgaggaagcagcatgccgtgattgccagtgcagtgcccttgtcttccaagcctaccaatgagcgtcagcaccacggtcaggatgttgtaactgatgatgttcctccgggctttggccctggtgttgttagggaagacgatgacctacctgaatacgattttgttaccgtcccaaacgcagctgccaacgtagtaccatcacgacaagcacacaggagccagcagcagcattctcaggccgcgtcccgccgcccggtagaccatgtgagggagatggttcgcaagtatggtagcagatccgctgccgcagcccaaccctgggaggatgatgacgatgatgacataccagaatgggatccaaaccaaagcaatctgaatctccagcaaacacggcatgctattccacagccaccgttgcctccacccggacctgttcatcagcaaatgcacgcgtatcatcagcagcatcagcaacagcagcagcattaccaatccattcagcagtatcacgcaacacaggaatcgcagaacaccttgtcccaggcttactacgtccagtcccactcacagcagcattccgtgcccgtgcagcagctgactcatttgcagcctggctggcagaccaccgcccagtggctggccgccggcgccgcgcattccggcttgccggcgaacaacgtcgtgcagcagtactgcacttccgcgacgcctgacggtagtggccaaggctacgctactgggaaccaaggctccatgccttggaacctacagtagctacgttacctttgtgcgagtcagcaagcatccgatgtttttggccccctattctccctttgtgtctaccatgcagtacatgtaattatatatcatgcgaactgcaccacccagataaaaatacaagtgttactactagccgcttaggtagttgctggttgtatgcaaatggtgtagcagtagacatgtagtagcaagaacttgatgccatgagcatatgcctgctaggctgctactttggttttttggc

SEQ ID NO: 1587 - DNA, 832 bp, Oryza sativa
  ref <308>: DATABASE ACCESSION NUMBER: AK059611
  ref <309>: DATABASE ENTRY DATE: 2001-12-06
acacaggcacggaggtggcacactcctctcgcctcgcttttcccttctagatctcgccgctctctctccgtctcttgcggtctcgccgtcgtcagtcgccctcttccctcccctccgacctcctgtcctctccagtctcccctttccctcccatctccccacggtagcgcgcaggacgacgcacgggcggcacgcggggaggcgcacaggcgggcgtggcgagggatgcggcacggcgcataggcgcgacggctggcaaggggacaggcgcggcgagcgggcgacacaggtgacaggcgaggtgaaacacaccgagagggtttagcgtcggatccagtctccaccggagcgcggggcggcggattccaaggcggcgatggagttctgcccggggtgcgggatgctgctgcagatccagccggccaccggcgggaaccgcctgcgcttctactgccccacctgcccctacgtctgccccgtcaaaaacaagatcgtgaagaaggcgagactagtgaagaaggaggtggagcccatcttcagcgacagcgacgccatgaagaatgcccctaagaccaccactacatgcccaaggtgccaaaatggagaagcatactacaggcagatgcagattcgatcagctgatgagccaatgtctacattttacaagtgttgcagagaagaatgccaatttgattggagggaggactgactttagtaatatttcttgtttaatgtgtgtggatatttttcctgctaaaactatgtaatcatatgaaaccttttgtaatcagctcatgccgcagcaaagagccaaagaaaacttacacatggg

SEQ ID NO: 1588 - DNA, 1359 bp, Oryza sativa
  ref <308>: DATABASE ACCESSION NUMBER: AK059612
  ref <309>: DATABASE ENTRY DATE: 2001-12-06
ccgtcgtccactcctcctcgccttcctcgccttcctcgcttttatcgccgccgccgccgccgccgcctccgccgccgccgaggagtaggagtagtaggaggaggaagccggtagccggaggaggagcggggagatggcggacgcgaagcagcagcagcagcagcagacggcggcggccgccacgggggtctggaagacggtgaagcccttcgtcaacggcggggcctccgggatgctcgccacctgcgtcatccagcccatcgacatggtcaaggtgaagatccagctgggagagggatctgcagctcaggtcacaaagaacatgcttgctaatgagggtattggttccttttacaagggtttgtcagctggtttactaaggcaggcgacatatactactgctcgtcttggatccttcagggttctgacaaacaaagcaattgaaaagaatgatggaaagccattgcctttagttcagaaagcttttattggccttactgctggagctattggagcatgtgttggtagccctgctgatttggcactcattaggatgcaagctgattcgaccttgccaattgcacaacgccgtaactacaagaatgctttccatgcgctctaccgtattattgctgatgaaggtgtccttgccctttggaagggagcaggacctactgtggttagagctatggccctgaacatgggtatgcttgcttcctatgatcagagtgttgagctattcagagacaaacttggtgctggagaagtttcgactgtacttggagccagtgctgtttctgggttctttgcatcggcctgcagtctgccttttgactatgtgaagacacaaatccagaagatgcaacctgatgccagtgggaagtacccgtacaccggttctttggactgtgccatgaagaccttcaagagcggtggcccattcaagttctacactggcttccctgtgtactgtgtcaggattgctccccatgtgatgatgacatggatattcttgaatcaaatccagaagttcgagaagcagattggaatataaggtcttcagttggaggttaatatgcggagttatcatttgctcgagtggagataataacgttccagctgcttacactatcggtagttggttttggtagacaaaagtttaaaccaagttatcctagcttaaatgttgccgtggtggtactattgtgtcttttacaataatcgaatcatttgttgtaactggggcgatttttttggggtggacatactttatttttgttggctgggactcagccatgaggggggatacttcctgcttgcgccattgaattaaatgggaccatattttatacagatttc

SEQ ID NO: 1589 - DNA, 762 bp, Oryza sativa
  ref <308>: DATABASE ACCESSION NUMBER: AK059613
  ref <309>: DATABASE ENTRY DATE: 2001-12-06
gttgcagatgatgttcttgagaggacacaatcccatgtgactgggaaacaacatattggctatggtttggtcagagattttctagctgaacacaaggctgcaaaagagaaggcaagagacgaagagaggattgcaagggagaagaaagcagaagaacgtaggaaacagagggaaaaagagtatgatgttggaggcagggacggtggttctagaagagagaagtctggggatcgtgactatgaccgtgatcgttactatgaccgcaatcgtggaagagaaaggtctcatgatcacagagatagaggatcagaatatagaagcagttcctacagaaatggtagggattctgaaagagacagacaccgatataggagtgatgacatgagaaaggacaggagtagagtgaggagcaggtctcgttctccaagcaggcatggcccagatcagtgaacatatagatagttttattccgagttaaaactcatgaggtagaccattatgtccctttcgccatttaacctgttgtacaaatgagttttgcgatgtgttgcgcttgttgaatctctgttctgctgtaacagctctgttgggaccctacagtcttccttttagaggggaaaaaatatcaggtaggtattgtttacctttcctagtattttgagttacctatattaacatacagtgaggttttgtttcaacatttgaaactgaaaattagtctaataaagctgaaagcgtacaacaacgctagtattggactgc

SEQ ID NO: 1590 - DNA, 901 bp, Oryza sativa
  ref <308>: DATABASE ACCESSION NUMBER: AK059614
  ref <309>: DATABASE ENTRY DATE: 2001-12-06
ctgcttccgccttgttcaataatcaatatactcttctcctcgatctcttctcttgtccatctccaataattctccatgtacgccgccatgtacccggagaccttcggcttctctgcttacccccagcagcagcagccgccgcccgacgccgcctcctgcatctacaccaccgccttgccgctcatcgccgacccgcctgacatcctcggaaacatggcacaaccatcctttctatcagagtatgaccttggaggggaaggggacctgttcaaagctcctgaacccatcattgaagaaccagtgcttagccttgatccagttgcagcagccatttcgatgatgtctggcagtgagaacgtaatggatgaaactatagaggttgcagatatcagcgacattcagaatgactctcttttaagcgaagtattatacgagtgcgagaaggaactcatggagaagtccgcaatcgaagagactatttctgaactgctggacgtcaagattcctatgctgcaagtggaagagttccctagggaaacccaagtacaactaccggccatggagaaggagaagccatcagttcctgaatgttgttcactccagaaaagtgtcagttctgggtgcctcaactcagctgattggatcaatggaccagccaggccaaacttcctggacttccaaggattggactttgagacagcgtttgggttgaggagggcatacagcgaaggagacattcaggtttgatcatttttctcttgcggttatgttatgtacttactactgtatataggtaaggtagtgatagataaggaatcgttgtgagcaagcaacggctgtgtattgtaaagtgtgtttccgaaacacaggtgtcgagaaaagaaatcacctttgcccttgt

SEQ ID NO: 1591 - DNA, 1790 bp, Oryza sativa
  ref <308>: DATABASE ACCESSION NUMBER: AK059615
  ref <309>: DATABASE ENTRY DATE: 2001-12-06
actcctatttcttcaaatatttcaagttctccagtcacatcctcttctgctttctcaagcatagcaacattttcatcttctatggttgcagcttcaaatgatggaattgcctcaactacttctgcctcaacagcaccttttacattttcgagctcaggaaacaacacttttgggttcaattccccagctcaacctgctggtttcagtacatctgttgatggcagtaccacccaaccatctgccaccagcacgatctttggtagcaaactgccacagtcagagggcacaatgtcgcagccatcgaagagttcacctgttcagtttagttcaccgtttcaaactgtgaccactaccacaggagcttcctcgtctgggtctggatctgtagctttcggagtaggaacagcctcaactggttctgggatcacatcttttggaaccggagcatcctcatcttggcctagcacagtgtctttcggattaggagcttcctcatctggaactggtgctctgttatttggagcgggggcttcctcatctggaactggggctctgcctttcggagcgggagcttcctcatctggaactggggctttatctcttggagcaggagcaggaacctcctcatctgggcctggaactgtgtcttttggagctggaacctcgtctgggcctggaactgtgtcttttggagtgacaacttcctcatccgggtctttgtttggtaattcaccatttggatcaggaactactttctctggccctggaagtggattcgcattttcatctcctagctcttctgctgggtcatctttaactatggccagcacaagtatgttcagcaccagttctacggcttcatcatcccctgctttcagtaacccattcggttcaagttcatcacctcccagcatgtttacatttggccaatcggcttcttcaggaggaggtttttcatttggagcacagtcatctccagctttctcctcacaagctccagttttttcatttacctcagcaagcatgaattcatctactccgcagcctgcttttgggatgacaaatgccaacacatccttcggcatgggatctcctggaaatgatcagatgaatgtcgaagacagcatggcagatgacactaaccaagcagcaccagcaccagcaccgatatttggttcctcaccatttgggcagcctgctagttcacccgctgctccagtatttggtgctccagcagtcccgtccgccggagttttccagttcgggggccaacaaggttccatgcagcagaatgcggcattcccgcctgccggtggtagcctagagtttcagggtgggaacttctctttgggaagtggtggcggaggcggcgacaaatctagcagaagggtgatcaaggtcaaaaggaacccaaagaaaagataagacgctctgttcaaatgtgcatttcatggtgccattttggatctgcctggcaacatgtcgtgatcatcagagcgggactacgaccatggttcgtatggtcatacaaattttccagcgtcagcacagttttcgcagcatcacccggctggcttgtaaaccccaaggtcagtagtgtattaccactcaattattcctttcattggcaaagccggattgcatgttgttgtatgcctgtgctattggagtgtaaaatagaacaaaaaagaagtgtatcccgaggtgtaattttgttctcttttccctgcgcatctgctgtcttatttgcctccgatatatttggctcggagtgtaatgtacactgttgt

SEQ ID NO: 1592 - DNA, 1258 bp, Oryza sativa
  ref <308>: DATABASE ACCESSION NUMBER: AK059616
  ref <309>: DATABASE ENTRY DATE: 2001-12-06
gagtagatgctttctggcactgttccggtgaaattgttcgacataagatctaaggactgtaaattgcgtaatgtggagaagttgacattgccaagatctcctgaaaagttgttgcccccgaggttcatgttcttaagatttctgcaatttcctacagttgatggcaactccccggacatgctgttgtatgccaaatggagcttctccagtctcttaagctgacctatcgaatttgggatacttccactaagcctgttttgtccaagatcaatggtcactagatttttaagcttggtgatgcctttgattgatccttctaactggtttctaagaaaacagaggtgcttcaaagaggtcagatcaaatagctcgtctggaagagtcccggtgaggttgttgtagctagcgctcagaagtgtcagcttggagcaattgctgagccccgcagggattcttccactgaattggttatagctgagttcaagcacagcaaaagatggcgcgctggcacagaacgaggttggcatctgcccagtaaatctgttgttgctggcattaagcacaaccagattgttcatcctctcccatgtggttgatggaaaattccctgtaaacaagttgctcgagatgttcaatacctgcagcggccggtcaggggttgaagatggcagctcactcagtcctcctgtcaagtagttaaaactgacatcaaggaccacaatgctgctggatgacaccagttccagcggtaagccaccggacaacgagttgcgggacaagttcagcctcagtaaaccggtgaggtcgccgagggatggtgagatgctcccttcaaggcctcttgatgccagagagatcacctcgaccaccgctccgtttccgctgcaggtgatgccttcccaggtgcagcagtctgtgccgttttgccatgacacaccaaggccgccatcgttcgatagcccggagaggaactggaggagagattccctctcctgctcggtgcatgaaccggcatgacagacgaagcaaagcaggagtagcagcagagcttggccgaagggaggcatgcagaatctgctattatctcggttgctgcttgaagagagctgtcttggcattggcttcattattgctatttttcttgaaaactatcactggtttgtgggtttgattttgcaggataggcaggttagtgtgcaagtgcaaaacagcaaaagaataaagttcttgagcaaatatattgccgaatctttcagtc

SEQ ID NO: 1593 - DNA, 471 bp, Oryza sativa
  ref <308>: DATABASE ACCESSION NUMBER: AK059617
  ref <309>: DATABASE ENTRY DATE: 2001-12-06
atcgatcattaacttttggatggttcctttgtctgctcgtgttgccttcatgtcctcttgtgccattttttggaacttctacctgtcaaccactatgagcaagtgaaacctctagtataccttcagggcatgtacaagcctcatttgtcatgatacatgtggttccgtagcaaatgttttgcttgggttattgtgggactaaatgaactgctacggatgagggtttgaaggagctaatttttgctctggtggtagagtacatggtagagtcacctcacctcctgtggacaattctgtcgcctgcctcgtcattgacggaattctggtagtggtctcgaggacaaagtcgatggagaaagaaattgtgtttctctaaacatgtgtgagccatctaccatctacctctaatttgataggaaagatgcttgtaattttgatcatttgttcaataagctaaacttgtatgcaagt

SEQ ID NO: 1594 - DNA, 1125 bp, Oryza sativa
  ref <308>: DATABASE ACCESSION NUMBER: AK059618
  ref <309>: DATABASE ENTRY DATE: 2001-12-06
acaagctaaagccatcctcctctactgaaatctctagctactactactgctactccagtagcaacaagaggctgaattgagagcaattggcgccatccatggcggcattaggccagctgctacttacagtcttcttggccgctgcattgctcccactggccatggcggcgacgacgacgacgtatcccatcggcagcttctgctgggagccggggatgaactacggcgatctcaacggcagcgatgccgtcgtcaggcggcggagcatcaacttcgtcgtctccgaccttgtcgccaaggcgcgcaccggcggcggattcgccacctccaaggccggcagggggtacgacgccttctacggcctcgcgcagtgccgcggcgacgtctccggcggcgactgcgacgcctgcctcgcccaagccgccaagcagatggtctcctactgcaactatacatcagactccaggctatggtatgagtattgcttcatgcggtacgacaactataactttcttggggaggtggacacgagggaggatgcaagcgtgacaatgagacaatggccggacatggacaaccccaaggctttccagaaagcagcggggaaggcaatgggaaaagcaacagcgcaagccgttgcggtgggcagcagcgggctaggtagggcgaaggagcaatacaccccattcgtgagtgtctacgcattggcgcagtgcacacgagacttatcgccgccgtcgtgcgcgcaatgcctgtcggcagcagtgtccaagtttgataaggcctgtggtagcggaccagggtgccagatcgactatagcagctgctgggcgcgttacgagatctaccccttctacttcccccttgctgctgccggtcgcgccaccatcgatatgaccaaatacactaaggtcaccgtgcattgataagaatataagatcattgtgagacctcctcaaataagtacttgtgttgacgtttaatttcagtaatatgataaatttgtaccgatccttagcatgctagcttcagctagcttggaataaataaacaaataaagatgtgtactgagggcacgttgtatgagcaagtgaattgaatagtattgaaatcctttgttactat

SEQ ID NO: 1595 - DNA, 1128 bp, Oryza sativa
  ref <308>: DATABASE ACCESSION NUMBER: AK059619
  ref <309>: DATABASE ENTRY DATE: 2001-12-06
gacgacgaggtcagtgtcgcagcgacgaacgccgacgagctagctctctctctcgatcggtggccatggcggcggagagcatcgacgcggagctgcgcctcgggctgcccggcagcggcggcggtgacggcgtggcggcgaagaagcggcggtcggcgtcgtcgacggtgaagagcgaggcctccggcacggcctgctgcggcggcgccggcgcccgggacgtcgaagacggcgcctcgccggcgtccaaagtgcaggtggtggggtggccgccggtggggtcgtacaggaggagcacgttccagtcttcgtcgtcgtcgacggcggcggcggcgaaggggaagggcggcggcgagacggatcaagggaggaagaataagggaggagggctgtacgtgaaggtgagcatggacggggcgccatacctccgcaaggtcgacctccggatgtacggcggctacagggagctcagggacgctctcgacgcgctcttcggctgcttctccgccgacgcctccgcctccgccgcccacttcgccgtcgcctatgaggacaaggacggcgacctcatgctcgccggcgacgtgccctgggacatgttcatctcttcttgcaagaagctgcggataatgcgaggatctgaggcgagatgatatatatcgaaatcgaaaggcgtcgagctgaagaaaaaattttcgccgatgcatgcatggagtagacatctcacagaaaaaaggcttcatgcatgagagagatgagatctatccgtggacatcgtcatgcatggcgatcggacggctggccaagaaggacacttacacgtagatgcatcttgtttttgttctacgtagatgtgtagatgagatatccaaggatctgaattctaaaaaagttcaggattcagttggatcggagttggtgaggaggaggatatgatcgatcgagcagagctgcagtactcctatgtacagaataatctagctgagattttggttgttggaaatggcaactgctagttctgcagatttgtgtacacatgccttttttttaaagctttttttttctagcttctgttgtgtcactgaagaaatctgagagctgaagaaagagaaacttggaagtttggtc

SEQ ID NO: 1596 - DNA, 1498 bp, Oryza sativa
  ref <308>: DATABASE ACCESSION NUMBER: AK059620
  ref <309>: DATABASE ENTRY DATE: 2001-12-06
attgctgctctctcttctcctcttctcttctccctcttcctcttctccaccctcctatccgttctagcgagggaccaaatttctcaccagatttcctgccgattttcccctcatgagccagccgaatccctcttccagcgtgatttccagaatccctttgtcttgttgagagatttttgcaggtttcgtttgcatttgcggggcgggcatatatggctgcagtgtggagcggctgcagcacgagcttcagccaagaacttcccccacacccgcgtggaagaaggggcggtgatggggcaagaatccatccatggagcggaggagcgggcagagacgccaccacccgccatgcggaagctgcaaggaccgtggttgtcttcgccagagggcgcgtgcgcgtgtgcagggcggcggctccatgcgttcttgaacccgacgtcgccggcaaggaggaggtcggtgtggcggtttggggcatggacgatgagccgccggtcgctgatggtcaccggaggcacgggctgcggcggcgcccggtgaggccggctgctgtggaggaaggccccgtcgccgcagcaagaagcgcggcgtcggcgtcggcgtcagccgcggggagcaaatctgaggtcgggggatcgaggctgcacttcttggaggagagggatgaggagatgctgtccaggaggttgatcaagctcagccagtccaacaaggtcaggagtgccaccgagctgttcgattcaatgcgtgcctcaggcttgcagccgagcgcgcatgcctgtaactcccttctggcttgttttgtgcgaaggggttctttcgccgatgcgatgaaggtattcgagttcatgaaggggaaaggaatggcaaccgggcattcgtacaccttgatactcaaggctgttgccactactgagggctactttgcagccctgaaaatgtttgatgaaattgaagagagcgataagaagaatgtcgatgtgatcgtttacaacacggtgatatctgtgtgcggaagagcaaaagactggaggcaggtggagagactttggagaaggctaggggagaattctttgagtggaaccttgatgacttatgatttgttagttagcacatttgtccagtgtgggcagtctgagttagcagttgatgcttatcaggaaatgttcaaaagtggtattgatccaagtgaagatatactgaaggccatcattgcatcatgtacaaaagaagggaaatgggagtttgcgcttaccacattcaggagaatgttgagtgctggaatgaaacctagtatcattgtgttcaattccataatcaactcacttggtaaggccggtgaagatgaacttgcctttaggatgtatcatctgctaacatcttcaggccttaagcctgatcaatatacatggagtgctttactgtcagcgttatataggtctggtcgttgttgggatgtcctagatctttttcaaggaattaagaccaagcattcagc

SEQ ID NO: 1597 - DNA, 1729 bp, Oryza sativa
  ref <308>: DATABASE ACCESSION NUMBER: AK059621
  ref <309>: DATABASE ENTRY DATE: 2001-12-06
cctttccgcagggaccaggaggttggatctagccataagaggaatgcttggtataaataagccacttcttggtcttcgactccctaagtcactacgagcgccctcgatcagtgcaatgggatgtggctatttatctatctcttgactcgaaatgggagcagagcaggtttgaaaaaggatcttagagtgtctagggttgggccaggagggtctcttaacgccttcctttttctgcccatcggagttatttcccaaggacttgccatggtaagggggagaaggggaagaagcacacttgaagagcgcagtacaacggagagttgtatgctgcgttcgggaaggatgaatcgctcccgaaaaggagtctattgattctctcccaattggttggatcgtaggggcgatgatttacttcacgggcgaggtctctggttcaagtccaggatggcccagctgcgccagggaaaagaatagaagaagcatctgactctttcatgcatactccacttggctcggggggatatagctcagttggtagagctccgctcttgcaattgggtcgttgcgattacgggttggctgtctaattgtccaggcggtaatggtagtatcttgtacctgaaccggtggctcactttttctaagtaatggggaagaggactgaaacatgccactgaaagactctactgagacaaaaagatgggctgtcaaaaaggtagaggaggtaggatgggcagttggtcagatctagtatggatcgtacatggacgatagttggagtcggcggctctcctaggcttccctcatctgggatccctggggaagaggatcaagttggcccttgcgaatagcttgatgcactatctcccttcaaccctttgagcgaaatgtggcaaaaggaaggaaaatccatggaccgaccccattatctccaccccgtaggaactacgagatcaccccaaggacgccttcggcgtccaggggtcacggaccgaccatagaccctgttcaataagtggaacacattagccgtccgctctccggttgggcagtaagggtcggagaagggcaatcactcgttcttaaaaccagcattcttaagtttaagatcaaagagtcgggcggaaaaaggggagagctccccgttcctggttctcctgtagctggattccccggaaccacaagaatccttagaatgggattccaactcagcaccttttgttttgagattttgagaagagttgctctttggagagcacagtacgatgaaagttgtaagctgtgttcgggggggagttattgtctatcgttggcctctatggtagaacccgtcggggaggcctgagaggcggtggtttaccctgtggcggatgtcagcggttcgagtccgcttatctccagcccgtgaacttagcggatactatgatagcaccgaattttgccaattcggcagttcgatctatgatttcgcattcatggacgttgataagatccttccatttagtagcaccttaggatggcatagccttaacgttaatggcgaggttcaaaagaggaaaggcttgcggtggatacctaggtacccagagacgaggaagggcgtagcaagcgacgaaatgcttcggggagttgaaaataagcatagatccggagattcccaaataggtcaaccttttgaactgcctgctgaatccatgagcaggcaagagacaacctggcgaactgaaac

SEQ ID NO: 1598 - DNA, 884 bp, Oryza sativa
  ref <308>: DATABASE ACCESSION NUMBER: AK059622
  ref <309>: DATABASE ENTRY DATE: 2001-12-06
agccagccagtagttacacacgcgctctgctcctctcgcctacccacgattccaaggagaagagcgcctcccgcacagcggagcgcggcaaccgctgaccgcaccgcgcgccagcaatggagtcgtcgcgggggaagcccggcctgaacggcagcggcggcggcgccgccgccttcgactacagcagccgccggggctactacacgggcgccggcgcggcgctgccgccgttggccgctggttccggggcgccgccggtggacccgtgctgcgtggttctgcgggtgttcgtcctgctggggacgctggcgtccgctgtggtgatggccgccgaccggcagagcaccaccgtccagatcgccgccggggaggagctcgcgccgccgctgcgggtgcccgtcacggccaagtggacctactcctccgccttcgtgtacttcgtggtggcgaacgcgatggtgttcgcgttcagcgcggcggcgctggcggcggtgcggaggcggagcgcggtggtgccggtgatggtgggggacctggtggcgatggcgctgctcttctcggcggtgggggcggcggcgcagttcggcctcctcggcgagcgcggcaacgcgcacgtgaggtgggccaaggtgtgcgacgtgtacgggcccttctgcgagcgcgccatggccgccgtcgtcgtcgccctcatcgccgccttcgccgacctcgtcctcctcatgctcaccatcctcaccatccacaaggcctcctcctactactagccatactctattttgctttgcatgggtcttcgatatggatgtcatgtgtgattaactgatttgatgattatattgcgattattagtcaattagaggcaacagtggtcgtttacctctgtc

SEQ ID NO: 1599 - DNA, 1222 bp, Oryza sativa
  ref <308>: DATABASE ACCESSION NUMBER: AK059623
  ref <309>: DATABASE ENTRY DATE: 2001-12-06
tttacccaatatgggctggacaagatttgcacaatttggttgcaaaaaacttcattggtgttgcaaaatccttggaagtattgtatgcttgataccgtttttggctgttcattctaggttgcgttgatggatatttgaaatgcatggagtatgaaaggattccttcgaaaatacttgtatatcaagcatctgatgatcctctatatagtggctatagggcagcagttgaggcatcagcacaagaggaaactctgttgggttttgctatatgggagccaccccatggcgcttacaaaatgatgaagtacccctggaggaatttcaccaaagttggtggggcattgaggcattgctcctttgcagtcatggcattgcatggctgtattctttccgaaattcaggcaccaccagaaagcagaaaggtttttagtgcagaaattcagagagttggtatagaaggtgcaaaagtgttgcgcgagcttggagacaaagtcaagacaatgaccaaattgagctcttcagatattctagcagaagtccacttggctgctgaacagttgcaaaaaaggattgatgagaagtcgtaccttcttgtgaatactgaaagatgggacactagcaagcaagccgaaggtatcaaagaagttctgaatggcactggcattatgggaaaggaaaacaagatcgaagtgaaggagcctacaattgttgaacaaactacagcgcatcactcaaaaagctttgctgttaattcatttctgagcagacatgattcatcatcaactgtagatttcaagttactgtcttggcctgctcgaagatcattccatccaaatctgccacttgaagacgaggaaacaaaaacatatgaaagtgcaagtgctctgtccttggccacatttgcctcccttctaatcgagtttgttgcccgactgcagaacgttgttaatgcatttcaagagttgagtgataaggctaacttcaaagagcctgtgcaggagcctgttgcagttagtactagtgatggcggctttctccataaaatatgcaaattcgtcggaatcaagagttaacatcgcaaatgaccctactagtttcatctgaaaccttgttattctttttttttttcaatacagttttgtttaagaattacgaaccacgaaatgtgtataaattctacacttgtgtatatgcaatgagaatattgcgagctttatttttg

SEQ ID NO: 1600 - DNA, 683 bp, Oryza sativa
  ref <308>: DATABASE ACCESSION NUMBER: AK059624
  ref <309>: DATABASE ENTRY DATE: 2001-12-06
ctagctggagcccgaacccgagcccaaagcgaccgatccaaccacccgcatccacacaccgcaccaccaaccatcgaccgcctcgccggagaggagagagaaaggaagagcgcgagatggaggcggcggcggcggccggcgtgcagctgggcacctcgaagccgcagatcgcgacccaggcggagatgtcggaggcgcgcctcccactgccctaccgcgaccagtgcgcccacctcctcatccccctcaacaagtgccgcgtcgccgagtactacctcccctggaagtgcgagcccgagcgccacgcctacgagaagtgccagtacgagctcgtcatggagcggatgatccagatgcagaagatccgcgaggcgcaggaggccaagtccaagggcgccgccaccattggcgtccccctcatcccttccaccgccaagctctcctgatccccgctccgcttcgatctgctctattcagggctggttatgacagcacgaaggacattgtgcaaggatcgtggatgctagttctatgaaccaaacatctgtttgaatttagcataaagttaactgttgtcttcttctctccgcctttactccgttggtgagcatcttcgagtttcaatatgaaataaggaactacctgtttatactcaatgactgaaatgacgccttaaagttttg

SEQ ID NO: 1601 - DNA, 988 bp, Oryza sativa
  ref <308>: DATABASE ACCESSION NUMBER: AK059625
  ref <309>: DATABASE ENTRY DATE: 2001-12-06
gagctgacccgtcgtcgctggatgcttttgcagggaatccacgcccctggagctccccctcgccaagtacggcctcgacggggagaaggcctccggcgagctcgtgaacttctccgattctagtggcgatccgcaggtgtccttttttgtcctaccagactataagcctcctgttgcagcatgtgctatgaatgagattttagcattggtttcttcggaagctccatccactcagccaaccctcattgtcccatttatgacaagatcgccaaactattatcatggagcaaaaacaggacagttagctacactccatggtgctgaaataggagcaacaactgagtttactcagatgttagttgacggaactactaaacttcctcaatctttacaagtgcgaagtgagccaatactctgtttgctggaaatggtacgtgtgttgaatataccgacagttattctttttgcatccggtgggcagcaccaaggaaaaagctctacagatgtggaccttgaggtgctgcagtgtgtaggtgatcacttggctaagcacatcaacttggaattcagcaaagaaaccgttcttcagagggggatcgaaaaatcacccgtctttcaggaaccatggcgcgaactgtaccagtgacagaattctggcatgccagcaccctctgaatttagttttgtaggccttacatgttggactagtacggtgtaccggaatgctggatttattctgtcaaagggtgtgtaatatgacgctctgtttgcttctgtttacttccatcttgatcaactgcttctcattccttgctgccactctagagcaaagctcctataaaattatagaagaaaccgctggactggtcaatctggtcttctggcaatcctaattttcccaagggttggttgtttgacttgagcgtgtaatgactggaattagtactacagaagtttgtcatcacttgtttggttgatgattcggtgc

SEQ ID NO: 1602 - DNA, 595 bp, Oryza sativa
  ref <308>: DATABASE ACCESSION NUMBER: AK059626
  ref <309>: DATABASE ENTRY DATE: 2001-12-06
ctcatccatggcacaaggttttccaaaaaaggcttccacctgaagcagtggaccttgtaagcaggtttctgcaatactcaccaaatcttcggtgcaccgctatggaagcctgcatgcaccctttctttgatgagttgagagatccaaacactcgtccacctaatgggcgtcctcttcctcctctcttcaacttcagaacacaagagctaaatggcatccctccagaagccatcgaacgtctggttcccgagcatgcgagaaggcagagtttgttcatggcgctgcgcacctagttctctagctcttcttttttcgcagtttttcttcctgagggaagctctgtaaaggtgtagtggcttctatgtgcccatctcagtgtggataaggtctttggctagagttgttgttgttgttgttcatggcaggatgtgatgtgagtgaggttggagaagaagaggcttgtgctttggtgtgcttgtgcagttggtttgaggttggaatctatgcttcagggttccaggctgtgtaactcctccagttctctttggactttggtttgaagattgtgtgcagtaacagtgcttggttcaacttc

SEQ ID NO: 1603 - DNA, 899 bp, Oryza sativa
  ref <308>: DATABASE ACCESSION NUMBER: AK059627
  ref <309>: DATABASE ENTRY DATE: 2001-12-06
aaaaagatccagggtctctcaggcctacaagcccacgattaagcccccatcccgtaatcccccacgctccatcgatcgtcgccgcagccgattccttccaaatctcttcacccgattgaggatacatctaatctgagctctctagtctgcagatatggcaagcaaaaggattcagaaggaactcatggatttgcggaaggatccaccaacatcatgcagtgctgggcctgcaggagaggatttattccattggcaggccacaatcatgggccctagcgacagcccctacgctggtggggtgttctttgttaacatccatttcccccctgactacccttttaagcctccaaaagtgaacttccaaacaaaggtgtatcacccaaacatcaactccaatggaagcatttgccttgacatcctcaaggagcagtggagcccagcattgaccatatcaaaggtcctcctatccatcagctctcttctcactgaccccaacccagatgatccccttgtcccagagatcgcccacgtctacaagagccagaggccacgttatgaggagacggcgagggcctggacccagaaatacgcaatgggttagcagctatcattcttgacaacgttgcaccttgcaagaaatcgagtctagttggttgactgtcatgttaagatccaagatggttatgtctctctgaactaattgcccgtttctgtacagtactgtcaaaattgcatcatctgtaaatcccatgttgattcacactttggtttataccctgaagagcgtgcgtgatcatgtcatttgtgattattgtaaccttgtcaagaagccagtcagacttgtatgcatcaacacatatttttcataattttgtggtggtttggtccatttctatctg

SEQ ID NO: 1604 - DNA, 1815 bp, Oryza sativa
  ref <308>: DATABASE ACCESSION NUMBER: AK059628
  ref <309>: DATABASE ENTRY DATE: 2001-12-06
aaaaggaaagcagaggaaaaccccaagccgcaagcccccccgccgcgagtcgtcttctcatctctcctccgccgccgccgcctgctgctgcatctctcgtcgtcgccggtgagggaagggaggggaggggggagggcgtgatggcggcggtgagggaggtggggtcgaaggcggagctggaggcggcggcgggaggggcgcgggccgccgcggtgcacttctgggcggcgtggtgcgaggcgtccaagcagatggacgaggtcttcgcgcacctcgccgtcgacttctcccacgccgtcttcctccgggttgaagctgaggaacaacccgaaatttcagaggcatatggagttacagcagtgccatattttgttttcttgaaggaaggtaaaactgttgatactctggagggtgcaaatccagccagcttggccaataaggttgcaaagttagctgggcctgccagcgttgctgagtctgctgtgcctgctagcctgggtgtggctgctgggcctgctgtacttgaaaaggttcaagagatggcacagcaaaatggagcttctgccactagtagtgcagaagatgcattgaacaagagattggagcagcttgtcaattcccatcccgtcttcttatttatgaagggaacccctgagcaaccaaggtgtggtttcagtcgaaaagtagttgacgttttgaagcaggaaggagttgaatttgggagctttgacatcctaacagataacgatgtacgtgaaggaatgaaaaagttctcaaactggccgacttttcctcagctctactgcaaaggtgagctgcttggtggatgtgatattgtgattgctatgcatgaaagcggtgaactgaaggatgtttttaaggagcacaacattccgctgcagccacagggaagcaaaaacgaggaggcagtgaaagccaagcctgatactgagaagagtggtgcagtttctgaaccagctttgcttactgcagctcagaaggaacgcttggaaagccttgttaatttcagcacagtgatggcatttataaaaggtacacctgaggagcccaagtgtggattcagtggaaaactagtgcatattcttaagcaagagaagatccctttctcaagttttgacattcttacggatgatgaggttaggcagggtctaaaacttctctcaaactggcctagttaccctcaactgtacataaacggtgaactggttggcggatcagacattgttatggagatgcataagagtggggagcttaagaaggttctatctgagaaagggatcgttgcgaaagaaagtctagaagaccgcctgaaggccctgatttcctctgccccagtgatgctcttcatgaagggcaccccagatgccccccgctgcggcttcagttcgaaggttgtgaatgcactgaagcaagcaggagtcagcttcggagcgttcgacatcctatccgacgaggaggttaggcaaggcttgaagacgtactccaactggcccacgttccctcagctgtactacaaatcagaactgattggaggctgtgacatcgttcttgagctggagaagagtggagagctgaagtccacgctttcggagtgaggaaaatttaccgtcgtatccgcatcttcctcttcctggtgtttctaccatccgtcgaccatcgagtttgctctattgatggcattttcttgtattcatagatccgtatttcaaacttagatatatgcctgtgccacatcgcttttaactgtgacatctgcagaagaataactaagacgacctgttcagtacggctaat

SEQ ID NO: 1605 - DNA, 1180 bp, Oryza sativa
  ref <308>: DATABASE ACCESSION NUMBER: AK059629
  ref <309>: DATABASE ENTRY DATE: 2001-12-06
ctctatatgcattgctgaaaaaatttagtaaagggccacaaaaagttagaacacagatttgcattgcaatggctgctcttgcggtgcatgtacctgtagaggactggggaggtggtgggattgtgaattggctaagtgatgaaatgaactctcaacaagactttatcccaagcttccttgagctgctaactgttttgccacaggaatgttctagtcataaaatagcagctcgtcctgaaaggcgccgacagtttgagaatgaccttcgttcatcagccgaagttgcacttagtctattgactgcttgcttgggtattgatcaactgaaagaacaggttctggagggttttgcttcttggcttcgtttttgtcatggaatctccgcatctaatcttgcttcgcttcctttggtctatacggcactttcttcgttgaactctgaccaatttttggaggcagctgtaaatgttacttccgaattgatacattttacggtatctcgagaatctaatggcatcaccgaacagcttccactgattcaagttctcattccttatgttatgggtcttaaggagcaactcaaagattcatcgaaggatgaagaagatgtaaaagctattgcccgtttgttggcagacatgggtgattcttatgttgagttgattgcagcaggttctgatgatgccatgcagatagtgaatgcattactggaagttacttctcattcagaatttgacatttcctccatgacatttaatttctggcatcatcttatgcgtaacctgaccgataggggttcgtacgcatcatatggatctgaggtctcaatcaacactgagaggaatagaagattgcagctatttcgtcaaccttttgaaattcttgtttctctggtaagtttccgagttgaatatcctgagctctaccacaccttttcggaggaagaccaaagggatttcagacattccagatatgcggttagtgatgtattacttgacgcaactgatgttcttggaggtgatccgacgctgaaaatacttttcacgaagctgattcaggcatgtggaaatggacagaaccaaaaatggcagcctgtcgaggctgcgctgttctgtatacaagccattgctaagtcagtctcagttgaagagaatgaaatactaccacaggtcatgtcact

SEQ ID NO: 1606 - DNA, 1735 bp, Oryza sativa
  ref <308>: DATABASE ACCESSION NUMBER: AK059630
  ref <309>: DATABASE ENTRY DATE: 2001-12-06
ccctaacaacaaggcaaggcggcgccgattgctccctccggctaccaagcagcagcgagctcagtgaacccctaccgctgccgcaccctaccaccaatggcggcgcctccggccacggcctccgcgccctccctgcgcccgtccgcggccagcccacgcgccgccgccgctcggtcggtcgccgtcccctcagggcctcgcaccgtcggcccgaggcgagacgggggccgcttcctcggcgtccgtgctgccaaggctgtcagtggcgtgcagagtggtaccgtggtggatgatggagtgcaaagaccatggaagctcagcgatgctcggctcgttcttgaggatggttcagtttggaaggccaagtcttttggtgcttcaggaacacaagttggtgaagtggtatttaatacatctttgacagggtatcaagagattttgactgatccaagctatgctggtcaatttgtcctcatgaccaacccacatattggaaacactggtgttaatcctgatgatgaagaatcgaaccgatgtttccttgctggtctgatcataaggaatctaagcatatgtacatccaactggcgatgcacagaaacacttgaagagtatctgatgaagagaaacattatgggaatatatgatgtggacacacgcgccataacacggagattacgagaagatggtagtctaattggtgtcttaagtactgatcaatctcggaccgatgatgagttgttggaaatggcaaaaaattggaaaattgttggtgttgatttgattagtggtgtcacatgcgatgctccatatgaatggtcagacaagactgattcagagtgggaattcaagaagggtcaatcgactgaaagttttcatgtggtcgcatacgattttggaatcaagcacaatattttgagacgtttgacgtcatatggatgcaagataactgttgttccagccaattggcctgcttctgaggtacttaacttgaagcctgatggtgtgttttttagcaatggtcctggagatccagctgcagttccatatgctgtgaagacagtacaagaaataatagggaaggttcctgtgtttggcatctgtatgggccaccaattgattgggcaagctcttggtgggaagacatttaaaatgaagtttggtcatcatggaggaaatcatcctgtttgtgaccttcgaagtggacgtgtcgacataagtgcacaagctttccgtattactggtgttgggagaggtgctggacttctcgctgtgacacttcctgatgaaaacttggagcttctgagaaaccataattatgctgttgacccagagtcacttccagaaggggtgaaagtaacacatatcaatctcaacgataagctgtgccggccttcagtaccctaagatgaaacttttgtctcttcagtaccatccagagtcctcacccgggccgcatgattctgacttggcttttggtgaatttatagagatgatgaagaacaacagattgtgaggcgcaaatataagatacaagggtttggttcttgaaccgggaggtgagaggttctatttcagatttctgatgagagccacaagagtcaaaataatctgttgtacctgtagcttttctttccttattataagctccgacaagcttgaatgcgagggtcaaggactcgagaataagttgctttgtgactgaatcagcctatgcaaaaatattttactcctc

SEQ ID NO: 1607 - DNA, 1096 bp, Oryza sativa
  ref <308>: DATABASE ACCESSION NUMBER: AK059631
  ref <309>: DATABASE ENTRY DATE: 2001-12-06
ctctcgccgtcgtcgcgcctcgacggcttttgctcccctctcccccaccgcctcctccggccgccgccgccgccgctgccgccgcccgacgacgtagtcaggggggctcgtcaggagtaaggagggagatggggctgagggagaagaagcggaaccagaggcgcgtgctcgcccggcgctcggccgctccccgctccggggagggcaaggacttcctgccgctggaagaaaggcctgggaagaagagggcccgggaggagcagcccgaggagccggagaacacgtccaccgtcctctacatcgggcacatcccccatgggttctatgaggaacagatgcaaggtttctttcagcaatttggaactgttaaaaggttgaggattgcccgaaaccgcaagacaggaaagtccaagcattatgggttcattgagtttgagaaccctgaggtagcaaagattgtggcggatgagatgaacaactacctgctgtttgagcacactttgcaaattgcgattgttccacctgagaaaattcatccaaaattgtggaaaggtgtgcgacgggggtttataccaattgatcgggtagcaattgaacggaggaggctgaacaaggataaaacaatagaagagcacaaaaagttggttgacaaaatcgtaaaacgggatgagaagcgtcgcaaaagaatcaaagctgctgggattgattacgagtgtccaccccttatcggcagcgttcagccttcagctaagaagatcaagtttgaggattagtgccttttgaccagtagtgacaggacagtcgagtaaaatgactggtttgtttttagtgacgaagacgtgtcaacatcattttgttgcgtgtttaatcgatgttgtatcagtgtgaccaaaattgcacaacgaagcaggaaatttctgagattacgactggtatatctttgagaaaatagaaatcatactgtgttttcccgccgctcaagcccaggtatcctctcccaagcgtatgtgggaattatacaaagttgaatctgcatccagtttgttggattttgtctctagtttgccaattttttttttgaaggaaatagtttgcc

SEQ ID NO: 1608 - DNA, 1299 bp, Oryza sativa
  ref <308>: DATABASE ACCESSION NUMBER: AK059632
  ref <309>: DATABASE ENTRY DATE: 2001-12-06
agcactgtttgaacttgaagaaaccaataagcgcaatcgaatggagctccagcatcttgatgatgcaattgcaagacaacaggtgaaagataaggattcggctgttctgcaagcattaacatcacggagacaagttattcttgacaacatacgcgacaatgatgaagctggtgctggctacagaaaggatattgaactgaatgagagtcgcaaacgtcaactccaagatatgatcgaggaagccaccagtaacaatggcaacagaacctacctccacattctcagtcagtacagacttcttgggatgactaatgccgagcttcaaattgagatggctatgagggatcaagtaatatataaccagagggaatctctaaggagtctgtggaacattatttatggaacagggctaaaccagaaacagatttctaaactagctgcgaagcaaggcttaactatagaaggctgtcctttgcctgtgtcaagtcctgatgttactaccccaccttccttttcaccccatggaaggctatcaccattcatgtcatttcctagcccgcaatcacagccttattccccgtctgcttgctttgtccaacatggtttcagcaccatgtcttatctcagaaatcaacatgagacgcctacagtatgtaggcaggagcacctcagttcttactacatgatgtctgagtgctcgccttttgatggtgatggaaaacagaagacaaatggaaggtcaatgccatacttttctaccccgggaaaaccaaaagaaatgtataacttttctcctggaactgaaagcgagagaactccctgcagtaaggaataccccacctcatattctcgcaatggagattcgcttgtacaaataaaggattcctggtatacagaagaaaggcagtgaggaaggaaggacatcatcagcactcttccattgcacattatcaggccggacgtttgccactggagcccgttcctacatcttctgccaacaggcccaacaccaatgttaccctgagttcatgaaaatgcttcagtttagatgttaggatatcagccaaagctgcggccatgaggccacggccattttgatcttgatgcctctatgatgaaccccaagatggctcactccaccctgtacagtagctgttagtctccagtctttcttgagtttcttctcctttgtacagtagcttttctgtaggatgaatccgatttttcagaatgctgtaagcatgtaaatctgctgtgattgtaacccctttgcacccatcaaatcaacagaattattcc

SEQ ID NO: 1609 - DNA, 1230 bp, Oryza sativa
  ref <308>: DATABASE ACCESSION NUMBER: AK059633
  ref <309>: DATABASE ENTRY DATE: 2001-12-06
ttcacgcatctagggtttcgccgccgcctcttcgtccccgccgcgacgatggtacgctcctcgatctcgcgcccttctctcgtggaatccatgccggccggccgacgtttcgctgattgcgatggtcctcgcggatgctgacgcaatgtgatttctgcccagtgctctgaatgtcaaagtgaagaaattcaaccaagcgcgggtaaacggcgggagtaactatgactctcttaaggtagccaaatgcctcgtcatctaattagtgacgcgcatgaatggattaacgagattcccactgtccctgtctactatccagcgaaaccacagccaagggaacgggcttggcggaatcagcggggaaagaagaccctgttgagcttgactctagtccgactttgtgaaatgacttgagaggtgtaggataagtgggagccctcgggcgcaagtgaaataccactacttttaacgttattttacttattccgtgagtcggaagcggggcctggcccctccttttggctctaaggcccgagtccctcgggccgatccgggcggaagacattgtcaggtggggagtttggctggggcggcacatctgttaaaagataacgcaggtgtcctaagatgagctcaacgagaacagaaatctcgtgtggaacaaaagggtaaaagctcgtttgattctgatttccagtacgaatacgaaccgtgaaagcgtggcctatcgatcctttagaccttcggagtttgaagctagaggtgtcagaaaagttaccacagggataactggcttgtggcagccaagcgttcatagcgacgttgctttttgatccttcgatgttgtgatcgcttgcttgtttcgtttcgccgcagccgccccacaagaccttccgcatcaagaagaagctggcgaagaagatgcgccagaaccgccccatcccctactggatccgcatgcggaccgacaacaccatcaggtataacgcgaagcgcaggcactggcgccgcaccaagcttgggttctgagcaggaggtggcaccggctgctgcctgcggattttgttttatggatgtttcagtgtttatgcaagcttaggatgtgattccatgatgctttttattaaggttttctgaaatgttaagggtagtagtactctggtttactgaggataccatgctatgctgtgctgagtaaaagaaccattctaatatatctgccttgttgaagtt

SEQ ID NO: 1610 - DNA, 743 bp, Oryza sativa
  ref <308>: DATABASE ACCESSION NUMBER: AK059634
  ref <309>: DATABASE ENTRY DATE: 2001-12-06
tcaacattcggaacaatcattagttctggttggtcattcaattggtgcctacatatgcctggaaatcttcaaaagacttcagaagaaggtgaaactttgtgtaggactctatccatttttaacactcaacaagaagtccatgaagcaatcagctattggatatattgcaaggtcatctctcctaagtaaaggggttagctcatttgtttcttttatcggatcactccaagcttcagtaactaggggcatcatgagaaggttacttggaccttcatggtctgtaacggctgtcgaagctacatgcggccatctcttatggtaccatacgatgcgtaatgttctcttcatggcaatgacagagttcacgaagctctctgaagaaccggactggaatttcatcagtgcaaaacaggaccagattgcatttctgtttgatgtggacgatcactggggtccgcttgcacacttggaagagatctcaaagcgtgctcctggggttgccttgtctgtcgaaactgaaggccatacacacggctattgctgcacggaagctggatcgttttgggctgcagactgtggctaatttgattaaaactaaattctgattggaaattcaagatgaaaattgtaccgtagtcagactcagtatttttatcctccaaagggagatagtaagaataatgaaataaaccggttggatcaacctcatcaatcacaaattcacaatcgtcgtttggcctggc

SEQ ID NO: 1611 - DNA, 876 bp, Oryza sativa
  ref <308>: DATABASE ACCESSION NUMBER: AK059635
  ref <309>: DATABASE ENTRY DATE: 2001-12-06
agaacaaggacccttcagcatggggagcgatagaacctccaatgtgcgacgtcagagtgaccgacagtccagtatcctcgcagctttcacctatcgtctgccaagttgtggacgatgccaagttgcccgtgtcggagcagctgaaatcatgcaatgctttggaggcagctgatgagaacaaggagaacaatgcttctggacaagacggcctgcttgaagtctacatcaaatgggagtccggccatctgataaaaggtctgaaattgctgagcaactcgtgtctttctgacctgagaaagctcttggaggatcacttcgaagaagcagggagcaagcagcagcagcagttcaccttcctccttctcggggatccttctggcgcaccggtgtccagagagaaggaagcaggggtgccgataagcaagctgccaagctgcaacaaccagccgaacagctacctagcctgcttgcgcgctgtcaagaagcagccggcgacggagcagatgccgttcagcccactggagagcaagctcaattcggcactgaacgacgtgcacctcgccgccctctcgccgaaggtcaacccaatgagccctaactacatccgtgagctcagagcttgagctcttccaacctgaagaagatcggttagatctttcgtaggtttgtcgccggtggcatttcaacggtggcaacgatgtatcatcatttatctatagtctggctctgttctgtctgtaaatttgctagctataggctggttctgcaaacctaaactctgaagtgtaaccatgttacacgagtggctgtggctagacactgcgggtcatgcgtctgtggccaacaaggtgaatatgaatatgattcgattcgttt

SEQ ID NO: 1612 - DNA, 377 bp, Oryza sativa
  ref <308>: DATABASE ACCESSION NUMBER: AK059636
  ref <309>: DATABASE ENTRY DATE: 2001-12-06
agctacttagatacagtggagtatatatctaaataatcatgatggatcatgatgtggatctatcttaattatgtgcggcaggcatgggcacggcaccattcccgtacacgttctgcgatcaattaatgtatggaccatacatgtatattaattgctgtatacctatccacttatttaaaacacgtcgacacgttcacgaaaaatggttactcccctggtatacatatataggtccatagatgatgcattgcaaatttaattagctacctagaaatttatttaggatgctaaatttaagatggtagatttagtttaaatgtatacgactcttgatctatttttgttggatttcactccacccgtggttgggaactatt

SEQ ID NO: 1613 - DNA, 1619 bp, Oryza sativa
  ref <308>: DATABASE ACCESSION NUMBER: AK059637
  ref <309>: DATABASE ENTRY DATE: 2001-12-06
gaagcgcggacgaggcgagaactccttggagctctgaactctctatcgcgtgaggaggtcgacggcgagagagatgcgcggcggcggcggcggggatgcgggcaccagctcgaggggcggcggttccggcggggcccccgcgcgtccgcggcggttccctgaggcggcgcagccggagatcatgcgggcggcggagaaggacgacggctacgccgcgcacgtcaccgaggcctgccgcgacgccttccgccacctcttcggtaccagggtcgccgttgcttatcagaacgagataaaattgcttggtcagtctctttattacttgctaacaactggttcaggccagcaaacacttggagaagaatactgtgatatatctcaggttgcaacctcgcacggacttccgcctacacctgctagacggattctattcattttgtaccaaactaccgttccctatcttgctgaacgcatcagctctagaattgttgcacgtggtattgccctcgaggactctcagcttgatgaccattctgaaagtgatagttctagtataggcactgcagcacaaccatccccaattaggaacagtccttcaagaagcttgagtttttctcatttgtcaaggttgagaggcagagtccataccttgtgggaatgggttcttcggaaatggccttcgatgctaccatttgctcaagattttatacagttaactatccggacaaaccttatgttcttctattttgaaggattgtattatcatttaccaaagcgagcagctggcattcgttatgtattcattgggaagccattgaatcagaggcccaggtatcaaatcttgggtatttttctgttaattcagttatgtattcttggtgctgaaagacttcgaagaagtaatttatcaacaatagctagttcgattaaccaaatctcatctggaggctatccttcatcaagaggtcgaggtgtccctgttctaaatgaagatggaaatataatcagcgacatccgccatgggaaaactgcagatttggctactagttcagaggcatccagtggtaagagcaaatgcaccctttgtctcagtacccgtcagaatcccactgccacaacctgtggccatgtcttctgctggagttgcattatggagtggtgtaatgagaagcctgaatgccccctatgcagaactccgattacacattcgagtttgatttgtatatatcattcagatttctagcaaatgattactagcaaggggtcatatcattctccagtggattcattaaaatgatactgaatccccacattttggcgagaactcttcttctgaagtgttttagtgtaccaaaagaggagagtagaaaccatccaatgaggctgaagatcaatgctgccattcaactgtattgtagagctcaaataacaaaacaatcaaacagaacaaaattttcattagagctcaaacggatacccatgtatatgtacattgtagacacaacttgattttgtagggtagaacagtggctgactggaatcattagagcaaaatgtatcgacctgaaattctgccgggaaatttaactatttgccaatattagattcgacaattattc

SEQ ID NO: 1614 - DNA, 1378 bp, Oryza sativa
  ref <308>: DATABASE ACCESSION NUMBER: AK059638
  ref <309>: DATABASE ENTRY DATE: 2001-12-06
aactcacccaagaacacactcgagctgagcacgtctagctagctatatctctcaacatcttccgagctactactagtagctagctagctagaggaagcagcagcaatggcgaaatcttgcaccttggtactactacttgtcgcactggtcgggctctcacttcttgtgagccccattgcttgctcccgcaagctcagcaagccgaaacccaagccgaagccgagcatgaagaagccggtggtccgggctcacaacaactacaccggtagcccgtcggtgacggtcaccaccggctgggccgccgccggcgccacgtactacggcgcccccaacggcgacggcagcgacggcggcgcttgcggctaccagaccgccgtcgggcagcggccgttctcgtcgatgatcgccgccgggagcccgtcgctgtacaagggaggcaaggggtgcggcgcgtgctatgaggttaaatgcacgaccaacgcagcttgctccggccagccagccaccgtcgtcatcaccgacgagtgccccgggggcatctgcctcgccggcgccgcgcacttcgacatgagcggcacttccatgggcgccatggccaagcccggcatggccgacaagctccgcgccgccggtatcctccaggtccagtacagaagggtgccatgcaagtacagcggcgtgaacatcgcgttcagggttgaccagggggcaaacccgttctacttcgaggtgctcatcgagttcgaggacggcgacggcgacctcaacgccgtcgacctgatggaggccggctgcggctggacgccgatggtgcagaactggggcgcgctctggcggtacaactccaacaccggcaaggccctgaaggcgccattctcgctccgcctcacctccgactccggcaaggtgctcgtcgcaaacaacgtcatcccggcgagctggaagcccggcgtgacgtaccgctccctggtgaactactcctaaattaattacagctctctccacatctcctgcaagaagctgcagtgcagagttgcggtaaattggtaattacagatttataattagcctcgggttaattgtatggcgggaaatgtgcgtccgggtgttgcgagaggcggtgtcagaagaggaggaaaggaggtttaagaatcgtgttcttccctccacggtctctgcattcccctagtgatgtgactgtgtcgtcgtcgatttgtctgtaaaattttatttttcttagttatatcttcctctgttattgtcatgttgagggagaagcttaagctgcaactaatgttgcatgccgatgtatcaagtttgtgtgtgtgtgttttttttgtaccacgcaaatctttcagataaatggattagtactgtc

SEQ ID NO: 1615 - DNA, 1569 bp, Oryza sativa
  ref <308>: DATABASE ACCESSION NUMBER: AK059639
  ref <309>: DATABASE ENTRY DATE: 2001-12-06
atgcaagtcgaacgggaagtggtgtttccagtggcgaacgggtgagtaacgcgcaagaacctgcccttgggaggggaacaacaactggaaacggttgctaataccccgtaggctgaggagcaaaaggagaaatccgcccaaggaggggctcgcgtctgattagctagttggtgaggcaatagcttaccaaggcgatgatcagtagctggtccgagaggatgatcagccacactgggactgagacacggcccagactcctacgggaggcagcagtggggaattttccgcaatgggcgaaagcctgacggagcaatgccgcgtggaggtggaaggcccacgggtcgtcaacttcttttctcggagaagaaacaatgacggtatctgaggaataagcatcggctaactctgtgccagcagccgcggtaagacagaggatgcaagcgttatccggaatgattgggcgtaaagcgtctgtaggtggcttttcaagtccgccgtcaaatcccagggctcaaccctggacaggcggtggaaactaccaagctggagtacggtaggggcagagggaatttccggtggagcggtgaaatgcattgagatcggaaagaacaccaacggcgaaagcactctgctgggccgacactgacactgagagacgaaagctaggggagcaaatgggattagagaccccagtagtcctagccgtaaacgatggatactaggtgctgtgcgactaaccgccgccgccgccgtctcctcctcctcatccaagcagctcgcgcctccgacccctcgcctcgagctccagctctccccaaccccttcaacaatggcggatgtcgaggtcgaggcggaggtggccgcggccggagcgccgaagaagaggacgttccgcaagtacagctaccgcggtgtggacctcgacgcgctcctcgacatgtccaccgacgacctcgtccagctcttccccgcgcgcgcccgcagaaggttccagaggggcctgaagaggaagcccatggcgctcatcaagaagctccgcaaggcgaaaaaggatgcacctgctggtgagaagccagagcctgtgaggacccacctcaggaacatgatcattgtgcctgagatgatcggaagcatcgtcggtgtctacaacggcaagaccttcaaccaggttgagatcaagcctgagatgattggccactacctcgcagagttctccatctcgtacaagccagtcaagcacggtaggcctggtattggtgctacccactcctcacggtttatccctctcaagtgagagatcatctgcagctgtttgcgcttccagtatgtagcttgagctgtcgaacaaggaactccaaagtactttattaatagcgtgtccaccgagcagccactttttgaaccttggttaatctgatgttatttccccagatattttgaagttatatccaaacatgttatttctattgcaattatcatccgttgaactgaaccagtgttctgtcatccctgatgatgaggtgttaacctacctatggcatgaaccaatgattctggtggatagaattt

SEQ ID NO: 1616 - DNA, 1179 bp, Oryza sativa
  ref <308>: DATABASE ACCESSION NUMBER: AK104090
  ref <309>: DATABASE ENTRY DATE: 2002-08-28
gtccgcgaatcgtggtttcccactagcaagcgcaagcgcaggcgcaaacgcaaacgccgccgccggtatgccggagcacgggtcgaagcccgacatctccttcgccagccgcttcaccgcaagcgccatcgctgcatgcttcgctgaggtgtgcacgatccccctggatacggccaaggtgaggcttcagctgcagaagaacgtggccgccgatgccgcccccaagtaccgcggcctcctcggcaccgccgccaccatcgcgcgcgaggaaggcgccgccgctctctggaagggcatcgtcccgggactccaccgccagtgcatctacggcggcctccgcatcggcctctacgagcccgtgaaatccttctacgttggcaaagaccatgtcggggatgtgcctctcaccaagaagatcgctgccggcttcaccactggtgccattgcgatcagtatcgccaaccccactgaccttgtcaaggttaggcttcaggcggagggcaagctggcgcccggcgccccgcgccgatatgctggggccatggatgcctatgccaagattgttaggcaggaagggtttgctgctttgtggactggcattggacccaatgttgcgcgcaatgccatcatcaatgctgccgagttggccagctatgatcaagtcaagcagactattttgaagcttcctgggttcaaagatgatgtggtcactcacctcttatctggtctgggcgcgggcttcttcgctgtctgtgttggttctccagtggatgtggtcaagtcaagaatgatgggtgactcggcctacacaagtactattgattgtttcgtgaagacgctgaagaatgatggacctctggcattttacaaaggcttcctcccaaactttgctagactgggatcatggaatgtgataatgttcttgacactggagcaggtccagaagctgtttgtgaggaaacctggtagttgaagattataacacatggtttttgccatcgtggaaaaagaggatgcgtacattttttttttcttaatcttctcttacacaagaagcaacggttaacatcctccctgagaattggggaacaaggaagaaacttgaatgctcaattgtgagaacgctgttgagtaataaatcttagcgggcctttgcatgacccctgacagaattggtgt

SEQ ID NO: 1617 - DNA, 1198 bp, Oryza sativa
  ref <308>: DATABASE ACCESSION NUMBER: AK059640
  ref <309>: DATABASE ENTRY DATE: 2001-12-06
atatacccagttcaaacatactaatggattcatgcaaaaggcatctagaaaccatgaggcgttgtcgaactgatgcttctaatgcttggagaacagctgcctgggtgagggttccctatccattccagtggggccctcctacatttcatttcaaaacgagcatcattatggtaatagtttcactggttgcatcagttgattcgctttcctcgtatcatgctacgtcattgctggtcaatttaagtccgccaacacgtggagttgttagcagagggattggctttgaagggatttccactcttatcgctggagtatggggtacaggaactggctcgacaactctaacagagaacatacatacccttgagaataccaaaatggccagcagaagagccttgcagtttggcgcagtcctgttggtcattttttcattctttggaaaaattggagccctccttgcctccattcctgttgctttggctgcctctgttctgtgcttcacctgggcactaatcgtcgcgcttggcttgtccacattgcgatacacccaagccgcaagctcgagaaacatgataatcgtcgggtttacgctgttcatctccatgtctgtcccagcttatttccagcaatatgaacccagcaccaatcttattctaccaagctatctccttccatacgccgcagcttcaagcggaccggttcgcagtggcagcaacgggctaaactttgcggtgaacgcgctcctatccataaacgtggtggtggctctcctcgtcgccttgatcctcgacaacacggtgccaggcagcaggcaggagcgcggggtgtacatctggtcagatccaaactcgctggagatggaccctgcgtcgctggagccgtaccggttgcctgagaagatctcatgctggttcagatgggcaaagtgtgtcggcatctaacaacaaaaacaacaacagaaggaatgaccccccaactgcacattgcgtgccggaggtgaaagattctatttattctattgcaccctgctgtgtagggatcatatggaagagagagttaatatatacggatgctatttagataggaccatgttgattctgctagctccgaggatgtctgagcatactaccacttataagttgtaaatgtagtcgttttgttaggaatgattacctatgtattgacaggtctctacgtg

SEQ ID NO: 1618 - DNA, 681 bp, Oryza sativa
  ref <308>: DATABASE ACCESSION NUMBER: AK059641
  ref <309>: DATABASE ENTRY DATE: 2001-12-06
aaaaaaaaacaccattgctcatcacctctccatctttagtttgaagtatctcagttttgcgattctcctcgctgttcaccgcgaataatcaagcatcgattgacgacgacgatggacgaaccatcgcagggcggtgaccagaagctgtcggccatggagcatgtcaagaaacgccatgaagagaagggcttcctctatgcctgcttgttcatgctgtgctgctgcttctgctgctacgaaacctgcgagcactgcctcgagtgcttctgctgctgctgcaagaaggacaactgatagagatcaagatcgatttcctggatttgttagcgaattgttcgtcgaaataataaaaggctagcttggtgtgattcttctcggttttaatttgtgtgttaactatgcgttaaccgtggtgagctagctaatagttatgtactccatgctgtgactatgagtgagcgagtgaattgcaggtggattgtggttgtaagtttgtaagctggatttctgatttttcatgtcagttcattgttgtagtacaaattcttgtgtaaacataagtgtaggtgattcatgttgcagttatccagttatttcttctgcttgcataaactgatacacagaagttcagattagacgggaagatatgcagaactaaataactgtagagttcagtggatc

SEQ ID NO: 1619 - DNA, 1518 bp, Oryza sativa
  ref <308>: DATABASE ACCESSION NUMBER: AK059642
  ref <309>: DATABASE ENTRY DATE: 2001-12-06
ttattcagtctaaagaggcatccccatatgtgatacctcaggatgacacactaaggttttcacattgtgtccctcgtcatacgatgattggaaccgaaaaagaagggattccagaaggggctattgaacttgatcctgcggcgcttcctctgaactttggagtggcttttgcttctgttgttccagaaagctgctgttcagtgaaagtgcagggttctggtgctgaacacataggttcatccagtggaaataactgtcacaagggatcggtggatgttggggagagccaacatgctacatgcgcaaatacagggttcgctacaaggacaacaaaggcagagatcaatgagcacaacgctcgatctgcagtagaaggtacagatgatgacgaggaacctgatgattttgcccaagcagaagtactatatcctgaatcagaattctttgaattttcagaaataagatcgatccacaaatttcaacctgggcagatctgggctctctatagtgatgtagataagttccccaattactatgcctgcataaaaactgttgatgtcaagaataatgaactgcaagtaagatggcttgatgcttgcccacagagtgaagaggagagaagattggtaagagaagatctaacagttgcgtgcggaacctttaagatttccagtttccatggtattcaaacttacaatggtacagagtacttgtctcatcctgtacaggccaaacctggtagaagaaatgaatatgaaatagttccttgccaaggtgatatttgggctgttttcaagaactggaggactggatggaccgcaaaagattataagaaatgtgactatgaattggtggagatatttggccacactgattcatccatacaagttcagcttttaagaaaggtggatggttatagggcagtatttatgccagacagaagagagggagctgtgaagacaataaggaaagatgagtacccaaagttctctcaccagattccttgcttccatctgacaaatgaaagaggaggcaagcttcgaggttttttggagctcgatcctttgtcagtgccagagatgtttcttttcaccgaatcaatctgagataagccttatcccaagttaatctgctagagcatttcttgtgatgctaccggaactaaaggttttccagaagttgggtagtccacaattcaatattttgcttagtgacagaagctgctggattttcagaatttgtatgtagcagtaatgttatgggccgcagcttttgcctattctccaatcctcactatgaaggcgttgtcaggcaatcgggaccgttttgcaagattagctgcagtctgaactgattaattttcctgcagctgctttacctagttaccgatagttgtatctagttctctagctggactatcaatcgtcctttctcttgtcgtactttgcattgttggaccatgtaaaattgaactgtgcgaggccagtctgattaattcggaaatctctgttggcctcc

SEQ ID NO: 1620 - DNA, 370 bp, Oryza sativa
  ref <308>: DATABASE ACCESSION NUMBER: AK059643
  ref <309>: DATABASE ENTRY DATE: 2001-12-06
gagttctgtgggaagtttgccgtgaagaggaaagcagttggaatctggggatgcaaggactgtgggaaggtgaaggccggtggtgcttacaccatgaacactgctagtgcggtcactgtcaggagcacaatccgtcgtctgagggagcagactgaagcctgattgcactacgtttgtgccgtaaggagtcctgtgattctgtatcgagtcaagacctatattggctgttgagccaaagcacatcgtttagcatttttgttctctactttaggatctcctaagcatgttgctaaaacctgtactttgaagccattgtgaacttaaaatcagttacctgcgatccaaatattgaatgagcgctttgcaatgc

SEQ ID NO: 1621 - DNA, 1175 bp, Oryza sativa
  ref <308>: DATABASE ACCESSION NUMBER: AK059644
  ref <309>: DATABASE ENTRY DATE: 2001-12-06
aggttctcgactctcctctcgtctcgagagcagcaacagcagcagaagaagagaagagcaagaggaggaggaggagatgttccccggcctgatccaccaccaccgcctcctcgacgccgatgtcggcggcggcggcggggggagcagcgccggcctggtactgacggccgaccccaagccccgcctgcggtggacggccgacctccacgaccgcttcgtcgacgccgtcgcccagctcggcgggcccgacaaagcaacacccaaaactatcatgaggacaatgggtgtgaagggtctcaccctttttcacttgaaaagccaccttcagaaatacagattaggaaagcaatctggcaaagagatggcagagcaatcaaaagacgcttcttatattttgggagctcaaagtggaacaaatctatctcctacagttccaactccagatttgaaagagagtcaagaactaaaagaagcactcagagcacagatggaagtgcaacgaaaattgcatgaacaagtggaggtccagaggcatgtacagatccgaatggaagcgtaccagaactacatcgacacgctactggagaaggcatgcaacatagtatctgagcaactgaatggcttcagcatatctgaccatgatctaacctctgctggtgtcatgttgagctcttcagacaccttgagcccccccatcttccaccagctctctgtcagctcgatcagcctgcacagtcccggaggcaaatcctccccttttgcagctgatgctgacctgttctttcagaaggcgcctgaaaaacgcaagtcatattgagatacagataggtgaagatccatgacctgcttccttctggaaaagccagggggaattctgatgatatcttgcaggacgcccagcaattgtcctgtttctagtagctagactagcactgaacaaggctctcttaccttgatctatttcagttaatctagactgacctttgttaatatcctgtggctagtagtcgtagactgatcaagaacctttatcgatgcgtaagtatcttgtaattcagagtcctagctcccaaattaacacacttcggttatttgtatgcttttaaccctatataattgggaatactgaaagtgcaactcatattacatggatgtctcacatgattatcttatct

SEQ ID NO: 1622 - DNA, 1605 bp, Oryza sativa
  ref <308>: DATABASE ACCESSION NUMBER: AK059645
  ref <309>: DATABASE ENTRY DATE: 2001-12-06
ttgatgcagaggcgccgaaagtggcactgcctcagggcacgatggcaccggtgaattcgttcaacacattgttccacacgccagctttctggggtctcatgatgccagtgtcagtgagctcaatggcatcagatgtgatccgtggctactgggcgcaacggatcttgtgggagattggtgggtatgtggctttctatccgccgactatttaccggaaggatcatattcaggcatacccgttcgctgaggagaaggatctgcatgttaatgtgggtcggttgatcaagtttctgaatgagtggaggtcaaacaagagaactctattcgagaggattcttgatttgagctatgccatggctgaggaagggttctggacagagcaagatgtgagattaacggctgcctggctgcaggaccttcttgcagtgggttaccggcagcctcggctcatgtcattggaaactgacaggcagcgggcaaccattggagagggtgacatgaaggaatttgtacccaagaagctgccatctgtgcacttgggagttgatgagattggtacagtgaactatgagattggaaacctgattaagtggagaaagaactttggaaatgttgtgttgatcatgcatgttagtgggcctgtggatcgcacggcactcgagtggaggctgctatatggaaggattttcaagacggttatcatactagctgaacagagcaacacagagcttgctgttgagcgctgcgcgttgtcacatgcatacaagtttctgcccaaggtgtttgcgagatacggtggtgctgatggatttctcttcctgcaagatcacatgattcttaactactggaacctgctgcaggctgacaaggaaaaactttggataaccaacaagattgcacattcttgggttactgttccattggagaacaacaaagaggaatggtttgtaaagcaagggtcaatggttaagcaggtcattggcagttccccagttcatttccagacaaactataaagaaagcatgggcgaagataagattgcattctgtggcagtgagcttttttacataccacgtcaatttgttgaggattttggtgaccttgtgggacttgtcggcgatttggaattgcaccacaaagttgctgtcccgatgttcttcctggcgatggactcgcctaaaaattttgactctgatgctctggctggaacagtgttcaggagcaacttggtgggcaacgagactttctcaagtatttatacagctcacgcacctgctgttttcccagtgaaagtacagaacgagattgattttataaagcttattcgggttatgtccacgggagaccctcttctaatggagttggtataaatacatattctgtagttggaacgaaacttcatccttgtgacagtgtggacagagtagacagccttagatttctgttttcagggggttctccattgttgtaatttcatttattctgtttattttgtagctgttttttttcctctgctgttgtatactgttgtatcaatagtgacattgttactgaggatcatcttggtccagctgccctagtgaaggaaaggacagctaagagttt

SEQ ID NO: 1623 - DNA, 700 bp, Oryza sativa
  ref <308>: DATABASE ACCESSION NUMBER: AK059646
  ref <309>: DATABASE ENTRY DATE: 2001-12-06
aggtatctcctccaccctagccgccgtcgctccgcctgctgctaccccgatccgggcgagagtacgccggcgccggaaaacgtatagctgctgtgagacgaactgtatcaatgatgagctcacgaggcactagtgctatgctttcaagagctgctcggatgaggcaaaagctacagtctgctttggaggccagtgcgctagatattgaagatgtttcttaccaacatgctgggcatgcagctgtcaaggacaatgcaaatgagacacattttaacatcagggtaatttcgcctaagtttgagggccagagccttgtgaagcgtcacaggatggtgtatgacctcttgactgatgagttgaactcaggacttcatgctatctcaattgttgcaaaaactcccaaggagtcaggatcctaaatgtcaaaaatgtaaggacttatatgcttgattacttgtcttgaaataagttgattgcagcaatattgtgtaaccataagtcaattttttcaaaacaatgttatggacgcttatgttttcactaaaatgcagtgcacaacttctgttgtcagtgaacatctgtgctcatgaaaatttgtggaaaacatagtgagtatcgaattgatatatctgtttactattcgatcagatgagatttttctatctggtatattttgtaagcatatatgaaccttttgtct

SEQ ID NO: 1624 - DNA, 1171 bp, Oryza sativa
  ref <308>: DATABASE ACCESSION NUMBER: AK059647
  ref <309>: DATABASE ENTRY DATE: 2001-12-06
acctcttctcccacctgcgccgccgccactcactcccaaaccctaaccccggaggagagggaggagcagccatggccgtgggcaagaacaagaggatctccaagggcaggaagggcagcaagaagaagaccgtcgatcccttttccaagaaggattggtacgacatcaaggcgccgaccgtgttctccgtccgcaacatcggcaagaccctcgtctccaggacccaggggaccaagattgcatctgagggtctcaagcatcgtgtctttgaagtctccttggcggatcttcagaatgacgaggatcaggcttacaggaaggttagacttcgtgctgaggatgttcaggggaggaatgtcctcacgaatttctggggcatgagttttaccacggacaaacttaggtccttggtcaagaaatggcaaacattgattgaagcccatgtggatgttaagaccacagataactacatgctccgcctgttttgcattggtttcaccaagcgccgcccaaatcaggtgaagcgtacctgttacgctcaggctagccagatccggcagatcctccggaagatggttgagatcatggccaaccaggcatcaacatgtgacttgaaagaactggtttcaaaattcatccctgaagtcattggaaaggagatcgagaagtcaacttcaagtatattccctctccaaaatgtgttcatccgcaaggtgaagatcttgaaggcaccgaagtttgatcttgggaagttgatggaggtacacggtgactacaaggaagatgtcggtatgaagctggacaggcctgctgagactgacgaggcggtggcaggggaggttgcagcagctgagtagagatggtgttgctagttgctttaccttttaggagatttgggctgttactaaattatggatgatcaaaacttaatgtcagttccgatacccttttttgtctgccgagttggtttctctgattaaaaccatggaaaattgtgagactgatttcatggccagctcattttgaatgcagttgaatgattagtactatatgatagtataatactactggttagatcattgctatgcatttgatcatgatctgctcagcttgcgcattggcaatggtatacacctggtgaattacattctggaatgcggtggtttggacc

SEQ ID NO: 1625 - DNA, 1305 bp, Oryza sativa
  ref <308>: DATABASE ACCESSION NUMBER: AK059648
  ref <309>: DATABASE ENTRY DATE: 2001-12-06
acattcgaatctcaccaaaaaccagcggaggcggagcagaaaacagcagccaaggaatcatccatccatggccaacgggctccccaaccccctcctcaccgccgacgccgcccgatccctcgtcgactccgtcgacgcctttctcttcgactgcgacggggtgatttggaagggggatcagctaatcgaaggggtccctgagactttggacctcctgcggaaaatgggcaagaaattagtttttgtaacgaacaactctagaaagtcgagaagacagtatgcgaagaagttcagagcacttggacttgaagttacagaggaagagatctttacatcatcatttgcagcagccatgttcttgaagttaaataatttctctccagaaaagaaggtttatgttgtcggtgaggatggtattttggaagagctcagattagccggttttgaatgtttaggtggcccggaggatggcaagaaaaacatattgctggaggcaaacttctactttgaacatgacaaaagtgttggagctgtcattgttggacttgatcagtacttcaactactacaaaatgcagtatgcgagcttgtgtattcgtgagaatccaggctgtcttttcattgcgaccaaccgtgatcctactggtcatatgacatccgttcaagaatggccaggagcgggaactatggttgctgctgttagttgctctgtgcagaaagagcccattgttgttggaaaaccttcaagctttttaatggacttcctcttgaaaagcttcaatttggagacatcaagaatgtgcatggtcggtgacagactagacactgacatactatttggccagaacactggttgcaaaacactacttgttctgtctggcgtgactaccttaccagaacttcaggacgcttcaaatactatccatccagatctttatacaaacagcgtatatgatctggtgggattattgcaacagtaatctttgatttgccattgaagatacagttctatcagttctgcctgcccccaccagaactctaggatgcttcgagtaccacctatctaaaaaataacaccatatatgaatatatgatgcagttgggttaattgagctgccttctattctttgggttagctgattgatagcaaccctgacctctatactacttacaacaaatttaagtgctaccatttcgaagtcaatttcacagccccatacatgtagattgccattggcactgaggtacagttgtcagtcttgaaacttatatggaaaataaagatgcatggagtccattatggttt

SEQ ID NO: 1626 - DNA, 1335 bp, Oryza sativa
  ref <308>: DATABASE ACCESSION NUMBER: AK059649
  ref <309>: DATABASE ENTRY DATE: 2001-12-06
aactctatcgtatatccctggacatccattccacttctggcttactgtaccttgcctgccatatgcttgctcactgggaagtttatcactccagagctcaccaatgttgctagtctatggttcatgtcgcttttcatctgtatttttgtcactggcatccttgaaatgagatggagtggtgtggccatcgatgactggtggaggaatgagcagttttgggtcattggaggtgtttcttcacatctcttcgctgtattccaaggacttctgaaagtccttgctggtgttgataccagcttcactgtgacatcaaaggccggagatgatgaagagttctcagagctatacacgttcaaatggaccaccttgttgatacctccaactacactgctgctgttgaacttcattggggttgtagctggagtttctaatgctatcaacaatggatatgaatcatggggacctctgttcgggaagctcttctttgcattctgggtgattgtccatctatatccgttcctcaagggtttggttggaaggcaaaacaggacaccaacgattgttatcgtctggtccattctactggcttcaatcttctcacttctatgggtccggatcgatcctttccttgcgaagaataatggccctcttctggaggaatgtggtctggattgtaactaagcagcctacactccatatatgcggcgatacgagcttgaagaaattattttgcaggcggcgaatcaagcccaagtttttaaattctttcctgtagatagaaatacagatctccggcatttcttttgttccacagtggtagggcagcttcatctgtgtgtattagggcaaaccagaagctatgtcaattcttgtgcagtgctaccagagaagtcaaatctactcctgtggttgatccaagattatttatttatttggaggggatttccatcatcgctgagcttacttggtggaagctgcagcatgtgtaagctaagttacaaaggcgttgccttgccatttggacagaaggaaggaagatgccaattgtttattttagtaaattaaaattgaattgaattatgcacattccggagttcatttgttccactcaataccatacacagctggctggtggtacatttagcatgaacagatttgtaggtgtttagcaaatgtacctaagttggattcatccggtgtgtggtgttgtacaagtggccatacagtagcgcaagtggtggtgggcacttcactcctgtttgttttgtgtaaccatacagcatacagatgataaaactcttgttcacattttacagagaggggaacttggtgttt

SEQ ID NO: 1627 - DNA, 1172 bp, Oryza sativa
  ref <308>: DATABASE ACCESSION NUMBER: AK059650
  ref <309>: DATABASE ENTRY DATE: 2001-12-06
gtgaaaacttgggcgttcaattcatgacactaataaaacctatcctgctctatgagctattcaactctaaatgattgaaatgcttttggattatcatgtcattgtttgtaccttcagtaacttcattgccgaccttctcattttatattgacatcactaaatgtgcattaaaatctcttccaatgcggcaactccatcttggcttcatgaactctgaactcgtttttaagaattggcaaacgatgatcagaaaaaaaaaagttaaagtattgtatttctttcctttttctttcacatattctgcttttagcctaacgtaattgccaacaatggagcctgtagtaccctgataagtgctcttgactgctgttcgttgaagtgcatgaagctactcataaaggccagtgtgttatcgagtctgtatttgttcaactactgctgtgcttttattttgctaatcaaaacatgatccacaatgcttttcatgatctcaggctggtgctgatgttaataacaagggtacaggtataactcccttaatgtttgccgcgttgcaagggtgttatacttacttcatcaagattctcctggagactggagcaatccctaatattcccaatgttttgggttggttgccagtagagcatgttgcatcatgtgattgcagggaaggagttgaaatgctatttccattcacatccccaaattccaaatgtcccaaactggagtgttgatggaataatttctcatgcaaaggtcaaccatacaaagccaacggatcaacatcaggagagtagaaaagctattttgaagtcgcatgcagatttggcatttaggcagaagaattacgactgtgcagcaaaagtatatgatttgttctgtacgcaaacaagagcatttgtagattgctcatgggtgatggtgaaggtgctctgtctgatggagatgccgaatgatgcagcctaactgggcaaaagctcacatgctactcaaggagtagaagcatgcatgcgatgctcacttggatacgcaaaaattggatcctgggagcgttgagattgagagggaacttaggtatcatcttctgtttctcttgagcatgttttccaatcacaaatgcggttgtgcacggaacatgactgttattattaagatgacgttgtggccacatt

SEQ ID NO: 1628 - DNA, 1820 bp, Oryza sativa
  ref <308>: DATABASE ACCESSION NUMBER: AK059651
  ref <309>: DATABASE ENTRY DATE: 2001-12-06
atgctgcccctcaacgccgcaatgccgcgccatgaccacttcggcaagccggtggagccgcggtggtacagcctcgcgcgccccagcgacgatcctgacaagaaggaaggcaagttcgcgagcaagatacagcttcggatgtcgctggactttgggtaccatgttcttgatgagtccacctactacagtagtgatctccagccatcatcgaagcacacacggaagccaagcattgggatccttgagctggggattcttggagcacgaaacttgataccaatgaaggggaaagatgggcgcaccaccgatgcttactgtgttgccaagtatggaccgaagtgggtgcgcacgagaaccattctcaacactctgaatcctcagtggaatgagcagtatacttgggaggtgtttgatccttgcacggtgattacagtggtggtgtttgacaataaccagattggcaagaatggcgatgcccgggatgagagtatcggcaaggtgagaatccggctctctaccctggagactgacagggtgtacacccatttctaccctttgttggctctcaagcccagtggccttaagaagactggagagttgcatttggctgtgcgatttacatgtacggcatgggtgaacatgattgcgctgtatggccgtccattgctgccaaagatgcactacacacagccaatctcagtgatgcagttggattacctgaggcaccaggcaatgcagattgtcgcggcgaggcttagccgtgccgagcctccacttcgcagggaggttgtggagtacatgctcgatgtgggatcgcacatgttcagtctccgccgcagcaaggccaacttctaccgtatcacctcgctgttctgtggttttgcagcgacggccaagtggtatgatggcatcagaagctggcgaaacccaattacaaccgtgttggtgcatatgttgtttctaatactgatctgctacccagagctcatcctgcctaccatcttcctctacatgttcatgattggattatggaactaccgttacaagccaaggcatccaccttacatggacactaagctatgccatgctgagtttacaaacccagatgagcttgatgaggagtttgattcattccctagcagcaggccagcggacattgtaagaatgcgctacgatagactaaggagtgttggaggtcgtgtgcagacagtcgttggtgacctggcgacacaaggtgagagagcccatgctttgcttagctggagagaccctcgggccaccgccatcttcatattcttgtccctggttgttgccattgtgctgtatgtgacaccattccaggttctgctggttattgcaatgctatacctgttgcgccacccccggttccgcagcaggatgccctctgtgcctttcaacttctacaggagattgcctgccaagtctgatatgctcctttgagcccaatgcattgagaacaagagaaaatggaggaaaccctgtaactttgtttctctcttccattcagttccctactgattagcatcagatcagatgtgaatatacttaaggagttggtaaattagaggcaagttagcggccagggaataatgtgttcattcgaatgttatttgctcagataggcagaaagaagggattgactggaccccttcgagtttgggggggcagagtttgttaatgtcgtgtttcttggggtaagaacaataggcaggcgcaagctaatcttcagtgtattttgtttatggatttgtgccaattttgttattttcttcatgtaatcatgtactacctgttggatg

SEQ ID NO: 1629 - DNA, 1389 bp, Oryza sativa
  ref <308>: DATABASE ACCESSION NUMBER: AK059652
  ref <309>: DATABASE ENTRY DATE: 2001-12-06
accaccccacccccacttttgctgctgcggaccgcgcctcatcgcgtcccgtctccacccgcgcctctcctctcgtcccgcgcctcggccgccgtctgattccgtgcagttggaggctaggaggagctcctcaaaatggtgaccaacgtggtggacctacggtcggacacggtgacgaagccctccgacgcgatgcgcgccgccatggccgccgcggacgtggacgacgacgtccttggcgccgacccgaccgcgcaccgcttcgagatggagatggcgaggatcacgggcaaggaggccgcgctgttcgtgccgtccggcaccatggccaacctcatctccgtcctcgtccactgcgacaccaggggcagcgaggtcatcctcggcgacaactcccacatccatatctacgagaacggcgggatctccaccatcggcggcgtccaccccaagaccgtcaggaacaaccccgatggaaccatggacatcgacaagattgtcgtcgccatcaggcatccggatggggcgctgtattatccgaccacaaggctgatctgcctggagaatacccatgcaaactgtggtggaaagtgtctgtctgctgaatatactgacgaggttggtgaagttgccaagagtcatggtctgaagcttcacatagatggagctcgcatttttaatgcttctgtggcccttggagttcctgttcatcgacttgtgaaagctgcggattcagtctcggtgtgcatatctaaagggttaggcgctcctgttggatcagttattgttggttcgacggccttcatagaaaaggctaaaattcttaggaagacactaggtggtggaatgaggcaagtgggaattctttgtgcggctgcctatgttgccgttcgcgacactgtaggaaaacttgctgatgaccatagaagggctaaagttttagcagatggtctgaagaaaatcaagcattttagagttgatacaacttcagtggagaccaatatggtattctttgatattgtggattcacgcatatcacctgacaaactgtgtcaagtccttgaacaacgcaatgtgcttgccatgccagcaggctcgaagagcatgaggcttgtcatccactaccaaatttctgatagtgatgttcagtatgcactgacatgcgtggagaaagctgctgaagaaatactgacaggcagtaagaagtttgaacatctgacaaacggtactaccaggaattcatacgggcactagtagatcactcctttcgtgcccactgatgcatcagtccagcgtccagcttgcttgtcatctcatgactgatgtactcacaacttggcttaataataactggtgttcactctgttggaatgagctgttactatgtgc

SEQ ID NO: 1630 - DNA, 1136 bp, Oryza sativa
  ref <308>: DATABASE ACCESSION NUMBER: AK059653
  ref <309>: DATABASE ENTRY DATE: 2001-12-06
tagtggtgtcacatgcgatgctccatatgaatggtcagacaagactgattcagagtgggaattcaagaagggtcaatcgactgaaagttttcatgtggtcgcatacgattttggaatcaagcacaatattttgagacgtttgacgtcatatggatgcaagataactgttgttccagccaattggcctgcttctgaggtacttaacttgaagcctgatggtgtgttttttagcaatggtcctggagatccagctgcagttccatatgctgtgaagacagtacaagaaataatagggaaggttcctgtgtttggcatctgtatgggccaccaattgattgggcaagctcttggtgggaagacatttaaaatgaagtttggtcatcatggaggaaatcatcctgtttgtgaccttcgaagtggacgtgtcgacataagtgcacaaaaccataattatgctgttgacccagagtcacttccagaaggggtgaaagtaacacatatcaatctcaacgataatagctgtgccggccttcggtaccctaagatgaaacttttgtctcttcagtaccatccagagtcctcacccgggccgcatgattctgacttggcttttggtgaatttatagagatgatgaagaacaacagattgtgaggcgcaaatataagatacaagggtttggttcttgaaccgggaggtgagaggttctatttcagatttctgatgagagccacaagagtcaaaataatctgttgtacctgtagcttttctttccttattataagctccgacgagcttgaatgcgagggtcaaggactcgagaataagttgctttgtgactgaatcagcctatgcaaaaatattttactcctcagtcctcaggcttcctgtatttccatcctttacattcctatgccttgtaaaagctgcgatgcatatgggcttggagtgcaacagggatgccctcatgcccccatcttatcaattccactaaaacaatctacagacgccacaaatccctgtcgcccaagtagaaaccaattagtggtctttggcatttgcactattgagggtgtgtttagttcacaccaaaattaaaagtttgattgaaattggaataatgtgatgaaaaaattgg

SEQ ID NO: 1631 - DNA, 1609 bp, Oryza sativa
  ref <308>: DATABASE ACCESSION NUMBER: AK059654
  ref <309>: DATABASE ENTRY DATE: 2001-12-06
gttgttggggttgcacgcacccctatgggtggtttcctaggtgccctgtcttccttgtcagctaccaaacttggttccatagcaattgaagctgctctgaagagggcaaatgttgatccagcccttgtgcaagaggtcttctttggtaatgtgttgagtgctaatttggggcaagctcctgcaagacaagctgctttaggtgcagggataccaaacacagttgtttgcagcgcagttaacaaagtttgcgcatctggcatgaaagcgacaatgtttgcagcacagtcaattctattgggcatcaatgatattgttgtagccggtggcatggaaagcatgtctaatgctccaaaatacattgctgaagctagaaaaggatctcgttttggacatgacactcttgttgatggcatgcttaaagatggcctttgggatgtatacggtgattttgccatgggaaattgtgctgagctttgtgctgacaatcatgctctgacaagggaagaccaggatgcctatgctattcaaagcaatgagcgtggaattgctgctcggaacagtggtgcttttgcatgggagattgttccgattgaagttcctgttgggagagggaaaccaccggtacttgttgacaaagatgagggcctggacaagtttgacccagtgaaactgaagaagctccgtcctagtttcaaggagaatggtggtactgttactgctgggaatgcttctagtataagtgacggtgctgccgcattagtattggtgagtgggcagaaggcacaagaacttggactgcaagttattgcacgaatcaaaggatttgcagatgcagctcaagctcctgaattatttaccactagcccggcacttgccatacctaaggctcttgctaatgctggcttggagtcttctcgtgttgattactatgaaattaatgaagccttttcagctgttgcacttgcaaatcaaaagcttcttggaattccttcagaaaaaattaatgtacatggaggagctgtgtctttaggacatcctcttggatgcagtggtgctcgaattttggtcaccctgcttggtgttcttagggagaaaggtggcaaaatcggagttgctggtgtttgcaatggcggaggcggagcatctgctctcgttctcgagcttgcataagaagccttgtgatccatctccagttctccaggacgtttgtgtactctagtttatttgattttctgctttagctgtttggacattcttttatcttaataattgggtaataaagtgtgtttgtggtgccaaagttaatctggtttgtactttttgtcaaaatatttctcctgtaagtggtaataatgtggtatgcagcagtctttaggctcaatcaattgtctatagaagttctagattcttttttctgctacacaactggtaacgctcaaatgaagcttttgtgttagccagcacatttttagtggactatatctatcgagaggcctatctacacaggaattatggacatttgaaagatgctcgtagggcacctgagttcactctttgaaaaatggagcgccaagaatggcagcatatctttgcacattattatcaactc

SEQ ID NO: 1632 - DNA, 1327 bp, Oryza sativa
  ref <308>: DATABASE ACCESSION NUMBER: AK059655
  ref <309>: DATABASE ENTRY DATE: 2001-12-06
ggggcggtgcactgcattattgttgcctcgctcgctcgatcgatcccctctcctctccaaatcccatccccaaatcccgaatcctccatcgagatcgatcgacgtcgagcggagcgaaggggggatatgggcggcgtggcggcgggcaccaggtggatccaccacgtccggcggctcagcgccgccaaggtgtcggcggacgccctggagcgcggccagagccgggtcatcgacgcctccctcaccctcatccgcgagcgcgccaagctcaaggcagagttgctgcgcgctcttggtggtgtgaaagcttcagcatgcctcttaggtgttcctcttggtcacaactcatcgttcttacagggacctgcatttgctcctccccggataagggaagccatttggtgtggaagtaccaactctagcacagaagaaggcaaagaactcaatgatcctcgagtgctaacagatgttggtgatgtccccatacaagagattcgtgactgtggtgttgaagatgacagattgatgaatgttgtaagcgagtctgtcaaaacagtgatggaggaagatcctcttcggccattggtcctgggaggcgatcactcaatatcttatccagttgttagggctgtgtctgaaaagcttggtggacctgttgacattcttcaccttgacgcacatccagatatctacgatgcttttgaaggaaacatctattcgcatgcttcttcatttgcaagaataatggaaggaggttatgctaggaggcttctacaggttggaatcagatcaattaccaaagaagggcgtgagcaggggaagagatttggtgtggaacagtatgagatgcgcactttttcaaaagatagggagaagcttgaaagtctgaaacttggggaaggtgtgaagggagtgtacatctcagttgacgtggactgcctcgatcccgctttcgcgccaggtgtctctcacattgagccaggaggcctctccttccgcgacgtgctcaacatcctccataacctgcaaggagatgttgtcgccggagatgtggtggagttcaacccgcagcgtgacacggtggacgggatgacggctatggttgcagccaagctggtccgggagctcacagccaagatctccaagtgagcatccattcagattcagggcatatcatatcaccaaccaaccccttgagtctgaagcagcaaagaggatgattcccagactcctttagctgttagtctaggttcctatgtagtagacatcagctatgccagattttgtatgtgaatatactcattaggttgcaataatgtttgcctcc

SEQ ID NO: 1633 - DNA, 921 bp, Oryza sativa
  ref <308>: DATABASE ACCESSION NUMBER: AK059656
  ref <309>: DATABASE ENTRY DATE: 2001-12-06
acacctaggttttcacctcgccgtcccactcccacccacgccgccgccaccgccgccgccgccgccgcttcactcgccggagcgccatctctagccgccgccgccgtcctccccctgagaaagcgtcgattccgtccgggggtgggcagcggtgggactcgtatccggacggccgcagattcgttgagcgacccgcgctgctggttttagtcttgttggcatccttctgttaaggaaaatggcaagcaaagcaggtggtgacggcaaagaagccatcaatgagcaaataattgcaaacacttatgggaacatgcggtctgaaatgactcaactttacaccaagattacagaattagagatggaagtcagtgaacactctcttgtgattggcgcaatcgagccactggatcactcaaggcgctgctacagaatggttggtggcgtcctggttgaaaggaccatcagggaagtcttgcctgcggtgcatcgcaacaaggagggccttgaagaggtaatcgctcgcatgcatgaagcactggagaagaaaaagaaggagatcaccgagtttgagctgaagtacaagatcaggatccggaaggcggacagcaacgctgatgaggaagaaggcagcaagaaggaagggtctgctcagggtgttcttgttggtcctgctggccagtgaagcaaaatgtcaagcttgcatactggtttttcctagagattatgaaagttaggttgctctttgctagatgtcaactgatttcggtctctctttctatctgtgtgtgaagtatactactattcttctgtggaaccgtggaatccgttccatgtacaattgaatgctatctggctatgctagttgataacttcggtcataactgcaggttttgtgcaggtattctaggtgagaactttggt

SEQ ID NO: 1634 - DNA, 1149 bp, Oryza sativa
  ref <308>: DATABASE ACCESSION NUMBER: AK059657
  ref <309>: DATABASE ENTRY DATE: 2001-12-06
gtgctgacctcctctaccgtgatggcctcctcgaccttgtggttgcgtccacggggggagggaggaggcggcacccgcccgagctgccgccggtgctcccctcctccttctccatccacttgtggtgacggcggcggtggcggcggggggagggcagatccggcgcccgacgccggcggatccgccgtcgtgccccctcccttcccttgtggcggcagtggcgaaggtacctacgttggcggcagagccggccgcgcgtctgccgccgatgcccttccctcatggcggcgtcggaccggccgccggcgcaggactgccatacgtcttcccccgtcgccgcgttgcctctccgtcctctcctccgcagcttcccaactgttcccctctcaactctcgacctctcctctctacgcggaacaccatgaccgtcgccgccgaggtcgacgcatcccctgacggagaggagaggaggaggcaagcttgcaatcgcacaaccatctatcgatttctcccttccttctctttcttctttctttctttctttcgtttccccctctcacatgtcaggttattttttctcctcatcctctccggatgatttcacttttgctcgaaatctctcatgttgttgtgttgaaggcggcgaagggggaaactttggtggtggtggtggccggagaggaggatggcggcagcggcagtgacggcggcgggtacgacaaggccgggatggactccggcaagtacgtgcagtacacgccggatcaggtggaggcgctggagcgggtgtacgccgagtgccccaagcccagcttctgtcgccgccagcagtcgccaacatcgagcccaagcagaagatcaaggtctggttcccaaaacagaagcctacaaatgtttgacaagaagaggatgaaagagtgacataggcgagctctgtagcatatatagaatgtttgctatccactggtacatctttaacccgagcctacctactgtatagatgtgtttagtacgtgcttactatgcttaattttggggataatatagtgcgacgtgtaagaaaattcagaactatgttgtatgctctagctgaatttgtttacttcctacaaaaaaaatggatgaactactgatccagttcatgttgtg

SEQ ID NO: 1635 - DNA, 1686 bp, Oryza sativa
  ref <308>: DATABASE ACCESSION NUMBER: AK059658
  ref <309>: DATABASE ENTRY DATE: 2001-12-06
tatatggtgttgttgatggtggaagtagtgatgaagatgagtctacatcaaagactaaaaagatacacatcaggatacgtgataagcctgctgcatctactgttgatgttaacaaactgaaagaagccactaaacagctaggtttaggtcctccaatcactaggacaagatcgttatcagggacgcctcaagagttgaaccaggctcctatgcagccgccaggtctcgcaccacctgctggtccagcaattccaaatgctgcagttgatctatttggtaccaatgctttagtagaaccacaagcttccagtggagccacaggtcctgtaattggtggcatgggagtgacggctggacctattcctgaggatttcttccagaatactattccatcgcagcagcttgcagctcgactacccccaccgggaataattctgtcacgaattgctcaacctgctcctggaatgagtgcagttcggcctgtccataatcaaaacatgatggctaatgttggtcttccagatggtggggtcccaccacaggcaccgatgcaacaggcacagtttcctcagcaaccaggcatgcctatggaccctattagtctacctgatggtggtgttcccccacagagccaacctcttccctcgcaaccccaggctcttcctccacagccacatggctttcaacctgctattcctgccatgtcgcaaccaattgatcttagtgctcttgaaggtccaggacagggaaagcaggctcctcgcccccctgcacctactgctgtgcggcctggacaggttccacgtggtgctcctgcagcagagtgctacaagatgggtcttgctcatcttgagcaaaatcagcttacggatgctttatcttgtttggatgaagcattcttggcccttgcaaaggaccagtcacgtgaagctgatatcaaagcgcaggccactatttgtgcacagtataagatagctgttgctttgctacaggaaattgctcgcctacaaagggttcaaggagctggtgcgctcagtgcaaaggaggaaatggccaggctatctcgccaccttgcttccctacctatccaagctaagcaccggattaactgcatcagaactgccatcaagcgaaacatggaggtccagaactttgcctatgccaagcaaatgctcgatctcctatattccaaggcgcccccatcgaagcaggatgagctcaagagtctgatcgacatgtgtgtccagagggggctgacaaacaaatctatcgacccattcgaagacccctctcagttctgcgccgtcaccctcagccgcctctcaaccatcggtcatgatgtttgcgatctctgtggtgccaagttctccgctctttctgcaccagggtgtgtcatctgtggtatggggagcatcaagagatctgacgcacttgctggacctgtgccttccccgtttggctaaacggcgcttcctgtgtcccaacgttgttctgatttttgtatctatagtgtgcagttaacattcttcgcatttcattgttgtagctgtcgtagtattgttggagatatagtacgtcttgggatttggatgagttgtaaccacccttttgatcgtgatgtgatttatacggacggtttttagcattgtaattaggttcggcatttatacatttcccatttacatt

SEQ ID NO: 1636 - DNA, 1529 bp, Oryza sativa
  ref <308>: DATABASE ACCESSION NUMBER: AK104091
  ref <309>: DATABASE ENTRY DATE: 2002-08-28
acgtcctcctcctccccagcagtcccacccgcgcacgcacgtcgatccgggagagagagagagagcgcgatgacgccgctccacgccgccccgcaccatgccgcggccgcggccgcggtcgtctcctcgccctcatccgcgccgctcctcctccgcgccaagccttaccaccccaaggcggcggcttgctccttcaccgtgaccgccaccactccgtcgaggaaagctttcctgtcgtgcccggatcacggccaggcggcggcgggggcggcgccgccgcgctccgccccggcgtcgtcgccggcgctcatctcctccgtccaggacctgtacgacttcatctgcagcggcccgctcgtggacaggatcgggtacaccaaggagaagatcgccggctccatcgaccggtggctgcgctgcggtgtgcaggtggcccggctgttccgcctcaacgagctccacctctcggaggcggagaaggccaggatataccacttctacatccccgtcttcctctggtgcgaggaccaggtcacggagcacagggccaagtacaaggacggcgacgagatccctccattagtgattggggtcagcgctccccaaggcagtggaaagacaactcttgttttcgcacttgattatctttttcgggttgctggtaggaatgccgctacattatctatcgatgacttctacttgacggcagcagaacagggtaaattgagggaaagaaatcctggaaatgctcttttggagcttcgtggaaatgctggaagccatgatctcccgttctcagttgaaacacttgaatcgctgcttaaactaactaaagaaggtttgaagatgaagcttccacggtatgacaagtctgcttttggtggaagaggtgatcgggctgatccttcaacatggccagaggttgaagggcccttagaggttgttctttttgaaggatggatgcttggattcaaacctcttccaaatgaagttgtaaaagcagtggaccctcagcttgaggtggttaataagaaccttgaggcatactacgatgcatgggacaggttcattgggtcatggatggtcataaaaataaaggaacctagttgcgtgtaccagtggagactgcaggcagagatagctatgagagcagatgggaaaccaggaatgtctgatgaggaggtcatggattttgtgtcgcgctacctaccagcataccacgcatatttgcccactctatataaagagggaccaaacggctcgaacccagaccacctgctggtcgttgacatagacgaaaagaggaatcctatgtggggtagatgagccctgaatgtacattgctgaaagaaaatggatcttctgacccaatggtggagtttgggatatctgatctttctgagaccacatattccaagcaagcaccactggcctcttgtttcttgtggcttgaacaagtactaaacgtgtaaaactttgatgtatacgaaatcttgctattacttataaggaaatcggaatcccaattc

SEQ ID NO: 1637 - DNA, 418 bp, Oryza sativa
  ref <308>: DATABASE ACCESSION NUMBER: AK059659
  ref <309>: DATABASE ENTRY DATE: 2001-12-06
aaaaaaaaagatcccatcatgcgacaggtactggtcgatttgcaggagaaccctagggcttctcaggagcatcttaagaaccctggagtgatgcagaagattcagaagcttgtaagcgctggaatagttcaaatgagatagtcgaccaaagcaagaagcgctgttcgtgtctatgttcattgctccttactttttttccatgctcagtctttgtggacttaagatttacacagtttggggctaatcttcattctcaatcggattatgtgagtgcagcgtgtcactggattattagtggttatggcatccgtgctacagctgcacgtgcaaacgtatgtctctatttgttagtcctaaacattttccctaccgaatgaaaatagagccataagaggtgcagaaatagtcgattgctttt

SEQ ID NO: 1638 - DNA, 1257 bp, Oryza sativa
  ref <308>: DATABASE ACCESSION NUMBER: AK059660
  ref <309>: DATABASE ENTRY DATE: 2001-12-06
ctcctcccccaaccctaatccctcctcttcccctctcacgcgccgccgccgataatccgccatcgccgcccatgctgataatcgccatcgctgcccacgctgcacctcgcccttcgcctccccggcggcaccaccctcggcaccgtcgattaatccctctatccccctcacgcgccgccgccgatcttcaccgtcgcgccgccgacgcccttcacctctccgccgacaccgcccactcctccgccccgacgcagcccgcgcctccgcgcatcgcccttcgcctcgccatcaccgccgccgtcgattgcctccaccctctttgacgccctatccccgccacacgcagctgcctcgccggggatgacctcgcgtcggtgacagtggtccagtgcccaatctgcttctcggtctgtgttgacactactgaggtctacggcgaggctactcccctcagcttgacaagcaaaaatttctcagtagcctcaattggcaatatcaccacacttctaggaggaggaaaggctgctccgcgggcttcgtagggatcccggcgagctcgcccccgtgactcctgcttcctctgtcacttgaatcaggacctagcatacatattcagacaggaggtctacggcgaggcagtggtgcggtcacaagttccaccactgaacgggctaactgagaccatggaatgatcatgtcattttgaaggatcggcaatggttgtaagcatcggcagattcgattcaccgagaagttcttcctcggtgacactgttgtccacaagtttctggttttgagaagacaacaagttctcagcttttttctgaagttctgatggatggcacagttagtactatggcatggcaatgggattattgaagcactgtaatgagctggtaatagttttttttccatctttgcaagaggaggcaacctatggagatggtgggacatttgtacttatcttttagccttaatatggacctgagttctcactgtagggagtgcaacaattccctgtaaccaaaagtatgaagtggacacagtacagttcaagaacaggttcttctccacgaaaataaattggcaaggtaaggatgcataggatgcaacaacacagtttgttgtagtcaatttgtaagcttgttgtagcaccacaaatgatattttagttgtttagagaggataattgtaatcttttgtatgtttaggctaccttagagttggaaaaaaaatctgggattgcaagagcattgc

SEQ ID NO: 1639 - DNA, 2020 bp, Oryza sativa
  ref <308>: DATABASE ACCESSION NUMBER: AK059661
  ref <309>: DATABASE ENTRY DATE: 2001-12-06
atgctcgtacatgagtccgtctagtgtagcgcggcgtcggttgtgcgtcccccgatttataatggatcgcatcggcgcattcgctatagtggttgctgctgccggtgcgtccaccgtcgttaatgccggcgcgcgagagatacatgtacgcgactagtagattctctacgccaactcgatcgatcgctctctgcgtccaccaccgaaactatttctgcatgttcatcagctgctagctgttcttgcacatagtggtggtggtgtagtggtgtgtgagactgtgagtgattgtgcgctcgtgagcgagctcagctgggctggctagctcatgagcatcccgttctcctcggctgcaagatggatcagatgaggcggcagcggcggcgggagtgcattggtgttctttgctcggcgctgtttttctctgtcctggcagtggccgtcgccgcaggctccggctcgtcgtcgcagccgccgtcttcgtctccggcgccagctgctagctcagcaacgccggctgcgagggcgccttctcaacggacgccgccgacgccagcaacgccggcaaaggcggcatccccaccggcgacgaactcgtcgtcctctccacggacacccgcggcgccagccccgaggcctccacagccgccaccggcgacgtcgccggcgccaacaaagccgtcgtctccacccgcgccgaagccaccttcccctcctgcgccgtcgccgtccacaacgccgtcgtctccacccgcgccgaagccatcttctcctcctcctgcggcgacgccgaccacaaagccgtctcctccaccgtcctcgccaccggctccgaggccgtctcctcctcttcctcctcggacgccaccgccaccgccgccggcagcggcaccgaaaccatctccttctcctcctccggctccaacgaattccacgacgaactcctcctcgccgtcgacgtccacgccggtccagctctcgccaaatttctacgcgcagtcctgcccgagcgtggagctggcggtgagggatgtcgtcaggtcggcctccacattggattccaccatccccggcaagcttctcaggatgctcttccatgactgctttgttgagggatgtgatgcatcagtgatgattgaaggtagcggcacggagaggaccgatcctgcaaacctctcacttggtgggttcaatgtcatagatgctgccaagaggctgcttgaagccgtgtgccctgtaactgtttcctgcagcgacattttagtccttgccgcaagagatgctgttacatttaccggaggaccgttggtgccagtctctctcgggaggctcgacggcctggtctcgctggcctccaacgtcagggcgaacatcatcgacaccggcttctccgtcgacgccatggcgaggagcttctccgccaaagggctcaccctggacgacctcgtcaccctctcaggggggcacaccatcgggtcggcgcactgcacgacgttcggggagcggttccgggtggacgcgaacgggagcacggtgcccgcggacgcggcgatgaacgcggactacgccggggggctgatcagggcgtgctcggcggtgaacaacacggtgtcgtcgacggcggcggtggactgcgacgaggggtcggcgtcgcggttcgacaacgcctacttcgccaacctgctcgccgggcgcgggctgctgcgcacggacgccgtgctggtgcagaacgccacgacgcgggccacggtggaggcgttcgcgcggagcgaggggagcttcttcgccagctgggcggcctcgttcgccaggctcaccagcctcggcgtcaggaccggcgccgacggcgaggtccgccggacgtgctcccgcgtcaacggctgatgatgcgtgcacgcacgatcgatacatacatgcatagaagggatcgacacaatgtatgttgagaatgatcgatattcgatttgttcgttgttgttgatgatgatctgtttgtagtagcagcttggttttttttttc

SEQ ID NO: 1640 - DNA, 1366 bp, Oryza sativa
  ref <308>: DATABASE ACCESSION NUMBER: AK059662
  ref <309>: DATABASE ENTRY DATE: 2001-12-06
aacagaagtgggcggcccaccgcccaatcagggagtccttgaccaggtgaagtttgtggacgcaggccgaccaagccggcgccaggcggcgagcggcggcgttcgggctcctctccggcgtgtcggcagcggggttcgtctccggaacactcaccgcgcggttcctccagacatcaaccaccttccaggtggcggcggccgtcgccgcggcgacggccatctatctcagggccgttgtcccagattccggcggagccaactccttcgttgacgaagcatgtgatcccttcctacaaggctcatcctgctccgccgcgacttcgtcttcgtcctcctccgatgaggagatctcaccgagacttccgccgcacaagggcggggtgccgtcgttgtcagacatggtttcgcttctcactggcagtttgaccctgtcaggggcagcaattgttaccttcttttacagtcttggggaacatgggcttcagactgcattactgtactacctgaaggcacagtttggttacagcaaagatgagttcgctaatcttctgttaattgctggtgctgcaggaatgctgtcacagctgactgtaatgccggtcttggctcgatttgttggcgaggatatactgcttattataggactcctaggaggatgtactcatgttttcctgtatggcattgcatggtcatattgggtaccatatttatctgcggtgtttataattctgagtgcttttgttcacccttctataagaaccaatgtatcgaagagtgttggatcaaatgagcagggaattgctcaaggctgtatatcgggcataagctcgtttgccagcatattagctccactaatttttacccctctaacagcatgggtcctttcagaaacagcgccattcaaattcaaaggtttcagtatcatgtgtgctggcttttgtacgctcattgccttcattatcagcatgaggatgcgagcagggcaatctggtgcaagtgagatgttggccattgtgcagcatgagcaagcatgatgagtatgctagtagattgtaaatttggccaacctgaaaccattgtaaatttacatactgtacattgtaaatttggccaacgtgaaaccatcccattgtctactatcctgatgggcgaatgactattcccctattcctctgcaaatctccatcagggaagggaaggattcttcttcagatagtaaattgacaactgctatgtcatagaagccagcccagcttgttgtaatatcacctagtagtgtatattgctggaatgatggcctacatatttcggccggagcttcagacatgagttaatgccaatggtagtacagatttcaacagcaagt

SEQ ID NO: 1641 - DNA, 1191 bp, Oryza sativa
  ref <308>: DATABASE ACCESSION NUMBER: AK059663
  ref <309>: DATABASE ENTRY DATE: 2001-12-06
aaactggagggtctctaaaggactcctttttggatgaagggttcattctagacaagaaaatcggtcttggccaaccgaagaggattgaaaacgccaagattttggttgcaaatactgctatggacaccgacaaagttaagatatatggagcacgtgtacgggttgattcaatggctaaggttgctgaaattgaagctgctgaaaagcaaaaaatgagagaaaaagtgcaaaaaatcataggtcatggaatcaactgtttcgttaacaggcagttgatctacaacttccctgaggaactctttgcagatgctggcatactggcaatcgagcatgctgattttgagggcattgagcggcttgctcttgtcactggtggtgacatcgcctccacttttgataacccggagtctgtcaaacttggtcattgcaaggtcattgaagagattatgattggggaggacaggctgattcatttctctggggttgaaatggggcaagcctgtactattgtcctcagaggagcaagtgagcatgtgcttgatgaagcagagaggtccctgcacgatgccttatgtgtgctttcacaaacagtgaacgacacccgtgtgttatatggtggtggatggcctgagatggttatggccaaagaagtagatggactggcgagaaagacacctgggaagaagtcccatgctatcgaagccttctcgcgcgctcttcagtccattccaaccatcatcgctgacaatgctggtctggatagcgctgatctgatctctcagctcagagcagagcatcacaaagagcagagcactgctggaattgatgtcatttctggcggcgttggagacatggaaaagctggggatatcagagtcgtttaaggcgaagcaagctgttcttatgtctgctaccgaggcagcggagatgattctcagggtcgatgagatcgtcacttgtgctccacggagaagggaggacaggatgtgatgtgtctgatatttgtgttctaatctgagggtgtttgtttttttgaagtgttttgtatcaggtcgtcttgtagacacatatgggacggccgggtctgtattatcatgaaagctttgtcctaacagcggaacactttgaatgggattcttatttgcagctttactcatgtgcgcttggctcaaaatatgttgggtttcggtct

SEQ ID NO: 1642 - DNA, 722 bp, Oryza sativa
  ref <308>: DATABASE ACCESSION NUMBER: AK059664
  ref <309>: DATABASE ENTRY DATE: 2001-12-06
aaggcaacttcttggaggtcggagaggaggagaggtcgaggagcgaggcgaggatggggcgcaagaggaaggagctgctgtcgtcggcgccgtggaggacgggggaggcggcggaggacgatgacgaggcggcgaggctgtcccgcgagggcaaggtgagcgtcaccagcaaccccggcgagacgcccaccatgcacgtcccgcgcaacaagcgccaggacctcgacctcgccgtcgacgacttcgacgaggacgagatcgaccccgagctccgctactccttccagcgcaactccaggtttctgcggagagtatttagtgtggatacacttgtcaagcctcttcctcctgtgatggcatacagtgtttctcgcaatgtgaactttttcttcaagatcttcacacagttctgggatgaagagggaattgccaatgcacagaaatcccttggactggggaatgaggatggctcccggcggcgttgaataccattttgtagcaaaaccaagctatgcattgagagatcttacgctagattctggaggcctttgttgtatgcctcaaatgacacttggtgtggtctgtctaagtttggttctagtgttcgcgtcttgcattttgtgctagtaaagttggttgcgtcatatattcagatgttgtaagcttcgagacttgtactcagaaatctcgttctggcttctgtttaaaaagttgaaaagggg

SEQ ID NO: 1643 - DNA, 455 bp, Oryza sativa
  ref <308>: DATABASE ACCESSION NUMBER: AK104092
  ref <309>: DATABASE ENTRY DATE: 2002-08-28
atacttccaacagctagctgacacacaaagcaacggcattgcaaactcatacaacatgggaccaacagacattgagattgctgacgaaggccatggtgccatttccctgagagacaccagtcctattttagacacgatggagtctggtaggagaggctgaaacatgaggcgacaagtatcttgatgttgtgtggattcttcggcctttctgagttttaagttctacaacatgactagttcgtacggttcccccatttccatgtacattgcgcaagaataggtagagttttgccaggtagaattgtgcttgtcatctcaggtgatcgtctcatcattgagagttccttgcaactcggtgctggccgttatatgctgacttaaactcgttgtgggtgttggctgtaaattacagtgggagtttgcactcttaatcatattccacagtcctctttgtt

SEQ ID NO: 1644 - DNA, 1069 bp, Oryza sativa
  ref <308>: DATABASE ACCESSION NUMBER: AK059665
  ref <309>: DATABASE ENTRY DATE: 2001-12-06
tacttcttgctgatcatcatatatctcttgtgagcttcagcaatgggggctctgccaagggctctagtcctcggcgtttgcgccgccgtcttgctggtgaacgtgctcgccgttgccgccgacggcgacgccgcggcggcggcgtccatggtcgtcggattggccaagtgcgccgactgcaccaggaagaacatgaaagctgaggccgttttcaagggtgttcgcgtggcgatcaagtgcaagaacagcaacggcgagtacgagacgaaggccaccggcgaggtcggcaagtctggcgcgttcgccgtgcccctcgcggcggacctcctcggcgacgacggcgagctgaggcagcaatgcttcgcgcagctgcacagcgcggcgtcgaaccagccatgccccgggcaggagccgtcgtggatcgtcaacgccgccgccgacaagaagaagaccttcgtcgccgtcgccggcgacacccacttcccgtcgtcggagtgcgcgtcggcgttcctctgcgacccgttccacaagaaggacttcttcttccactacaagaacccgtcgccgccagcgccggcggcgtaccacaagccgccgccgtcgtacacgcacccggcgccgccggtgtactcctacccgacgccggcgtactctcacccgacgccggtgtacaagcagccgctgccgacgccgtcgccgccgatctaccacccgccggcggaggagaagaaggtggcgatgcaggacgacgcggaggctgaccccgagctgttcaagaagctgctgccattgatcaagaagaatccattcctcaagttccccaagctcccgcctgtggaggtggaggcaaagccatagatggtcgccggcttcgccgcggcgccatgatcgatcgatcgaagcgaggaaacatgagtactagctggtttaattgcttcgtttctttgtgtgtttttcacaccggctactcgagctagttaattactgcccttctagcgttgttgaagcttggtctgttgcctgcctgctagcttaactattcagatataaataaaagcttctgttctct

SEQ ID NO: 1645 - DNA, 1335 bp, Oryza sativa
  ref <308>: DATABASE ACCESSION NUMBER: AK059666
  ref <309>: DATABASE ENTRY DATE: 2001-12-06
taaggattgcatctgatggcgttatttttgtcagcatggaaatcttccgacctcagaaggaacttgcttcatcacagtcaggattgaaagggaagttcaaaataacaacaagatgcctatggcttgataatggaagactattagatgcactttacaaagctgcatatgctgcattatcaagttgtccagtgaattgtccacttagtcacatggagaggatggtatctgaaatcttgaggaaaatggtaaggaagtatagtgggaagaggcctgatgtcattgcggttgctacagagaacacaacagtgagttttgtagaagactcagaaactaaatcatctggaaagtttggatctttctcagctcctaggcattcgagcaggagttcaggtaggggtcttgaagaaagtgataaatcatgcccagagaatacagagggagaggctaaagaaaatcttcctgatgtcctgggaacaacacgtgatgatgcaaccacaagctccaatggcgaagcatttttctcctcagatttgcataagcctaaaacactagagcatttttgggactcattcaaatcccctacagctgtaaaaattgcaagaattgtcaatggttcagctcaagggagtaaatcaaagattggcaagatcagcatagtgggtaaggactctagcgatccttcttctgctccagttaaatcttcaaaaaagaacaagtggaagcctgaggaaattaagagcttaattcagatgcgtggcgaaatgaatgagcaatttcagactgtgaaagggagaatggttctgtgggaagagatatcttctagcatgttgagccaggggataagtcgtacaccagcacagtgcaagtctctatggacatcattggttcagaaatatgaggagagcaagaaagatgaggaaagcgtaaagacgtggccgtatttcttggacatggacagggttttatcaagccaaggggaaatggcaacccaatgatcccaaggccgtagtttagtggttgtaattttggagggtgatggcataatcaatcaagtggcaggatgagatggctgcagcgtgttcttctccagagaatatacatgccataattcattccacgaaaagggaggcaggcacttggaatgactaagctgctacgtattcaccatgagtgtgctacagggctagggatagctgatattatttgatcaactatactagattaagtaattgaatagctaagttttgttgtgctattatttttggtgtaagaagacaccaaatgctaatccgaaggctttcaattgagctacccacatgcctatgcgtgtaaatt

SEQ ID NO: 1646 - DNA, 1968 bp, Oryza sativa
  ref <308>: DATABASE ACCESSION NUMBER: AK104093
  ref <309>: DATABASE ENTRY DATE: 2002-08-28
ccacccaaaccctcgcgccgccacccccagcctccgcccggatccagaccgcctccgccgccgagcaccatgggcttcgacgtcggcgtcgtcgccttcaacccggagggctggggccctcccgacaccgcgccggcgccggcatcccttggcggtggcgccgccgcggcctccatccccttcgcgcccttctcccgctcggacaagctgggacggatcgccgactggacgcgcaacccggcgggccccgccgccctcgccgccgcctcccgcgactccgtcttcgacttcacctccgtcgacgactccctcgccgccgccgcggaggactcctcgttccgcctcgtcgacgccaagccgccgccgcgccacccgcggttcggccccaagtggcgcttcaaccagcgtccgcagctcccgcagcgccgcgacgaggaggtggaggcgcgccgccgcgaggccgagaaggagcgcgcccgccgcgagcgccacttccagaacaaccgctcccaccaccaccccggcttccgcggcaaccagtcctcgtcggccaagtcctccgtcgacatccagcccgactggaccatgcgtgagcagatccccttcgccaactttaccaagctctccttctccgtcgccgaccagcccgaggacctcctcttgtgcggcgccgtcgagtactacgaccgcgccttcgatcgcgtcaaccccaaggccgcacgccgcctcgagcgcttcaagtctcgcaacttcttcaaggtcaccaccaccgacgaccctgtcatccgccgcctggctgaggaggacaaggccacggtgttcgccaccgacgccatcctcgccgcgcttatgtgcacaccccgcagcatccactcgtgggacatcgtcgtgcagcgcgtcggcaacaagctcttctttgacaagcgtgatggttcccagctcgatctgctatctgtcaacgagaccgcgcaggagcagctcccagaaaacaaggatgatatcaactccgcgcactccctggctgtcgaggctacctacatcaaccagaacttctcgcagcaggtgcttcttcgcgatggtgagaaggttacctttgatgagcctaacccgtttgcttctgagggcgaggaggcagcatctgttggctaccgctaccgccgctggaagctggatgatgagatcagcattgttgctcgctgtgaagtgcatgctgtgaatgctgatccaggtggtggtcgtcagttccttactctcaatgcgctcaatgagtttgatcctaagattactggtgttgactggaggcagaagcttgagacacagcgtggggctgtgctcgctacagagctcaagaacaatgccaacaaacttgctcgctggacttgccaggctttgcttgctggtgctgacatgatgaagttgggatatgtgtcacgtgtgcacccccgtgatcactacaaccatgccatactcactgttatgggatacaagccaagggattttgctacacagatcaacctcaacacatcaaacatgtggggaattgtcaagtcgatcgtggacatctgcatgaagtttgaggagggaaagtatgtgcttgtaaaagatccagcgaagccacaagtgaggatctatgaggtgccttctgatgcatttgagaatgactatgtggaagagccacttccggaggaggaacaggttcggccgccatcagatgatgttgatgctaccgcggaggaaatggatgcagcggcagaggctgaggcgaacaatgcagcagcttctgcaggtggtgagggcgagaagagcgcagaagctgctgccgcttgaagggctcctcttcaggttgccagctagatcctttttggtttaattatctgtttttatggtttacatttaagagttgaactgcctgttatcgatacagtggtcttgtttggtcgatgataaaactgttctgtttttcatctt

SEQ ID NO: 1647 - DNA, 1146 bp, Oryza sativa
  ref <308>: DATABASE ACCESSION NUMBER: AK059667
  ref <309>: DATABASE ENTRY DATE: 2001-12-06
aaaggagatcccctgatccctcttcctcgccggcggcaatcgctcgccggagtcaaggtaggatgatggcggcggcggggctggagtcggcgtaggagtacctcatcacgcatttcagcgagttccagctggcctccatcggcaccttcctcctccacgagagcgtcttcttcctctccggcctcccctctctcctcttcgagcgcctcggcctcttctccaagtacaagatccagaagaagagcaatacacccgattaccagaacagatgtgtagtgcgtctcgttctctaccatgtctgcgtcaatctccctctcaccattttatcatatcgcaccttcaaactcatgggcttgaggagcacccttccgctgcctcactggacagttgtcgtctcccaagtgctcttcttttttgtgcttgaggatttcatattctactgggggcatagggcactgcataccaaatggctgtaccagcatgttcacagcgtccaccatgaatatgccacaccctttggcctaacatctgaatatgctcaccctgctgagattctattcttgggctttgctaccgtggccggccctgcccttactggccctcacctcttcactctctgggtgtggatggtcttgagggtcttggagacagttgaggctcacagtggctaccacttcccatggagcccgtccaatttcttgccattgtatggcggcgctgaattccatgactatcatcaccgtgttctctacaccaagtctgggaattactcgtcgaccttcatctacatggactggctgtttgggactgataaagattaccgcaagacaaaggccctagaggagaaagaaaggacgaagcatctgtaaattgtgagctcttatccctttgctggcgccttattcccaatgagctttcatgtgttgtagtactgatgatgagacattccgttgattgaagcaaaacggcaggcaggcgtcttaaccactgctaccttgattagggcacatatgtatgtatgcggtgctcctcctgttattagttttcttcatgctgtaattctccattgtaattttggactgcagagttgggggtagaggtgtcctgcgattaatttgaagcaaaataaaaggttaagttttgctg

SEQ ID NO: 1648 - DNA, 477 bp, Oryza sativa
  ref <308>: DATABASE ACCESSION NUMBER: AK059668
  ref <309>: DATABASE ENTRY DATE: 2001-12-06
atcgatcgaaaccaaatttggggattcaaatcccccaattcgatctccaaatgcgagctggattcgataaaatatgtcgaaccactccgatgggaacagccagcaaggacgcgaacagtggaaaacctctgatgctgctggtgggcccggcgctgctcggccgtcggatcccgatcggacggacgaggatatcatcggctgagatgctgccgatcgatgaggaaattgattagcactgcaaattactagtaattacctctcgaagaattagtagtaggaattttgttggtgatagatttgagttgatgtttgaacataaagagtatggagatgaaaaaaaaaatgtgaatagaaattctccggcgcttgatttctccacgtgtttgtctcaacctctcaaaatactggtccatacctagcaatactccactttgtatgcttttttttgaaacccaataatttgtatgctgaacaaac

SEQ ID NO: 1649 - DNA, 1119 bp, Oryza sativa
  ref <308>: DATABASE ACCESSION NUMBER: AK059669
  ref <309>: DATABASE ENTRY DATE: 2001-12-06
gctgcaaaacaaaagcttgaattagatatacagcagttaaagggcaaattggaagtgatgaagcatatgccaggggatgaagattcagcattgaaaaataaaattgatgaattgagtgaggagctgcaagaaaagatggatgaactagatgctatggagtcacttaaccaaactttggttattaaagaaagaaaaagcaatactgaaatgcaagatgccaggaaggagcttgaaaatggcttacttgatctcttagatggtcaatcacatataggaataaagagaatgggcgagcttgatctggaagcattttcaaaagcatgcagaaagatgtcatcggaagaggatgcagagattactgctgccattctttgttcaaagtggcaagctgaaattaaaaatcctgattggcacccttttaggtttgtcttggttgatgggcaggagaaggaaattatcgaggatgatgccaaacttcaagaattaaaagaagagcatggcgaagacatatacagattggtgagggacgcgctgtgtgaaattaatgagtacaaccctagcggcagattcccagtaggagagctgtggaacttcaaggataaacggaaggccactctgaaggaaacggtccagttcgtcctgagacagtggcgagcgaacaggaggaagcgctaagcccacctgttcgatgccattgcgtgtagcgctgctgtttgcgttccacctgatctggacatcatgctacttaagcattagctcattcgagatctgtagtaactatgtagtggggttagaccatggctgtttcattccttgttggacacaaaataagttggtactattgcagtatctgcattggtggccacctatggtccacctgtacaagtagatctgttttcacctgttttaggtatgctatgtacagccatgaaccgaggtactttattcatctgcttggtatgcagatgcagcggaatatgtagtagtatgactgtatgaagtactgcttgtccgattgaagcctgtatgagcaaagtagagagactgtatgaagtgcttctctgattgaaatctgtcagtgcctggttggtgcttggccttcagggcagactgttattc

SEQ ID NO: 1650 - DNA, 1290 bp, Oryza sativa
  ref <308>: DATABASE ACCESSION NUMBER: AK059670
  ref <309>: DATABASE ENTRY DATE: 2001-12-06
taaatgaagccataaaaccaacaaagaaaagtgagaactcttctgagttcattactacttctaacagaagagtacacccaaaacgagagacagcgaccaatggtaggttagctggtccttcgccattatgcaatggattctatggagaatatccactaaggtcacatggctaccaaggaagtgagtgggagaaaaaacctgagactctcgatcgcaggcaaagaaaaagatctcgaaggtacacgcaagattttgttgaggctatctcggacgtcgacccaaacttcgacagtgatgatgatatcattggtgaagcagtctatgatgaggaatatcttagaagtcgaaagcaatataaggccagacttttagaactcgataaagagttccaattggaacaagttgccgatgatggtaatgatgaagtggaatatccttcgagtaccagtgaagatgaaaaggagccccaacggtacaaaagattggctacttgcaatcctcgagggaccaacttgagaactatcgatggattccaaacatgcatcacacgaagtaagcgttccacccgcccacacatgaagtatcatcagtatgatctttctggcacagatacagaattgggaaagccaggtaaaataaaggtaccagatccagatgctggttctgatgcactaaatgacatggagctctcgacaactagtcaagaccaggaggaagaaggtgctgaagtaaataaagagcggccacccctgctttctcctagcaggaataatggaagcgatgggagaagatttcttgacttaaacgaggttgcgcctgtaggcggttttgatgaaacacagagtcgcaacggcgaaaggcgaccacctggataacaactgaggatcatgcccttgggtttagatactgagtaacattgttgatccatcagaggccaatgagcacccatgagagagcgatacaacatcattcatgcgtcaacctgattggaggtgcttttgtcaacttggaagaaccaagtgaagaaacgatatggtccatcataagtgcagctgtagaattaccattagctgatccagtctgatgattgtagaccatggtgagatgtgtgcactgatgtctggcacgcgtcaactgatagcgtattagcgtatgcgtgttagattgccatttttcttcttctttttgagtcattgtcacattgttgtttcaccccggctacatatgcttgcgaaatcgcgaggcctaaatgagtaacattgttggtgtggcttggccgcttcaggatgc

SEQ ID NO: 1651 - DNA, 1718 bp, Oryza sativa
  ref <308>: DATABASE ACCESSION NUMBER: AK059671
  ref <309>: DATABASE ENTRY DATE: 2001-12-06
atcatcaaaacacctgtaatcatcttctgaattcatcaattcagagttcagagcagagtgtccctgcttctgtgcagaggagagagatcgagctatagagctagcctggctgctgccatggcgaccggacgacgcctctccatgatcctcctcctcctccttctcggcttggcttccggcgacaagattctcttccaggggttcaactgggagtcgtggaggcagagcggagggtggtacaacctgctgatggggaaggtcgacgacatcgtcgccgccggcgtcacgcacgtctggctgccgccgccgtcgcactccgtctccacgcaagggtacatgcctgggcggctgtacgacttggatgcgtctaggtacggcacgtcgatggagttgaagtcgttgatcagcgcgctccacggcaagggcattcaggcgatcgctgacgtggtgatcaaccaccgctgcgccgactacaaggacagccgcggcatctactgcatctttgagggcggcacacctgacggccgcctcgactggggcccccacatgatctgccgcgatgatacccagttctccgacggcacaggcaacctcgacaccggcgccgacttcgccgctgcccccgacattgaccacctcaatggtgtcgtccagcgggagctcaccgactggctcctctggctcaagtctgacgaggttggcttcgatgcgtggcggctcgacttcgcaagggggtactcgccggaggtggccaaggtgtacattgaggggacaacgccggtggggttggcggtggcggagctgtgggactcgatggcgtacggcggagacgggaagccggagtacaatcaggacgcacaccggcaggcgttggtggactgggtggacagggtgggtgggacggcgtcggcggggatggtgttcgacttcacgacgaaggggatcatgaacacggcggtggagggggagctgtggcggctgatcgaccagcaggggaaggcaccgggggtgatcgggtggtggccggcaaaggctgtcaccttcgtcgacaaccacgacactggctcgacgcaacagatgtggccattcccctccgacaaggtcatgcagggctacgcctacatcctcacccatcccggcaacccatgcatcttctacgaccatttcttcgattgggggttaaaggagcagatcgcggcgctggtggcggtgaggcagcggaacggcgtgacggcgacgagctcgctcaagatcatgctgcacgacgccgacgcctacgtcgccgagatcgacggcaaggtggtgatgaagatcggctcccgctacgacgtctccagcctcatcccgcccggcttccacctcgccgcccacggcaacggctacgccgtctgggagaaaatcgccgccgccgccgccgccgccgatcatcgcacctcttccagcgcatcgctctgattgattagcgatatgatgcttgtgtgccacctcttatgttttacttctgctgtatatggaacaggctcttctacctttaaaggtacgtactttcgtcactgatatgtgggatcgataaaccatgggtctaactgttagtgataaagccatgatgactttgaagatataggatttcaatccctgtatatagataagtacatatgtaatatacatacgcatgattagtgacatatatatacactacattgccttggctgtgatcg

SEQ ID NO: 1652 - DNA, 1032 bp, Oryza sativa
  ref <308>: DATABASE ACCESSION NUMBER: AK104094
  ref <309>: DATABASE ENTRY DATE: 2002-08-28
gcaaccaccaaagccgaggaggagatcacgagacgagagagaggcagagcaatcgaagccccacgccatggtcaagatcaagatgcccgccctgttccgccgccggagcggctccaagtcgccgccgctgccgcaggccgaccccgcgtccggcggcgggtccccggcgccgacgccggaggaggagatggagcgggtgttccgcaagttcgacgccaacggcgacggccggatctcgcggtccgagctcggcgcgctgttcgagagcctcgggcacgcggccaccgacgacgagctcgcccgcatgatggccgaggcggacgccgacggcgacggcttcatcagcctcgacgagttcgccgccctcaacgccaccgccagcggcgacgcggccgccgtcgaggaggacctccgccacgccttccgcgtcttcgacgccgacggcaacggcaccatctccgccgccgagctcgcccgcgtcctccacggcctcggcgagaaggccaccgtccagcagtgccgccgcatgatcgagggcgtcgaccagaacggcgacggcctcatctccttcgaggaattcaaggtcatgatggccggaggcggctccttcgccaagatcgcctaggatcaatcaaccacccaatttcttcccttctcctcatcctcctcattgaccaactcctatccatccatccatccgagcgtgccgtgtgcggtggaaattttaagtgtatatacaaccgattaaaagaccactagccctagattctttctactaataattgcgattctcaactactactagtttctttcttggtagattggaaattggaggctaaaaagcagcaattctatcccctgcttttggttctaagacacgccaatgctttctctcttttttttccccacaagatgtaagcgtttgcgtggagtaagagtcttggatcttggatcttgcattcttgtttcgattgttcaccatctggaattctggatgtcagttaatctgatcttaatataatccccttctgg

SEQ ID NO: 1653 - DNA, 1102 bp, Oryza sativa
  ref <308>: DATABASE ACCESSION NUMBER: AK059672
  ref <309>: DATABASE ENTRY DATE: 2001-12-06
ttttcttccagtttaatgtatgcctgccacttttccatccttatttgttcccgttttgcctctgctgattttgctgttgcctctgctgatttcaataatgcttcagctttaattttcataacttcgttgtacaaaactatgttctgagatggctggttccccaacggagaagattgagcttttccttttccttttccttttaatctctcttttgctttcttctgtccctcggggtgtctctctttgtttgatgattcttcttcagtctcttggtttgatgaggatgtgtaagctcctgactcagaaatcttagtcctcttgttcttgttttcttcctttttgataatacttcgccattttggttgatccttgagctctctccacatatactctaaggtgaaaggcttcttctgatttgattgattcttgtaccatagatgagctttttccatgatcatgtcatcagagtgtccactggtacaggtacgtctaacttgagcataaactccacaaaacttcccaatgtccttcttaacatttccccagtgtgtcttcaattgcttgactgtcctcttgtggccatttgtaggacggttgttattgaactcatcagccacatccttccaataatactctccctttttgtcatttccatctgtaggatcaaccgagttgctcaaccaagcactaattaaccgtaagttctcctcttctgtccaattgggcagggagtcgatgactccgacccatggaaagaactgttgggagtggctctaactgaggggtgttgcagtgcaaatattgcttggtggtttgcagttccaaacccctgatttggagcatggagaaggagagccaacacccagcagcaatggctacttcaacggacacctgctcggctgctcacgcaccagcaccaactgctttagattttatattcatttgtacacagtgaactgaaaaagtattgtattttatttccttgtggccagcccatatagctaaagactgctttagcaattaatgccatatggactacctccacaatgtatattgcctgtccttagagctgcatttattgcataatgcccactttagtgat

SEQ ID NO: 1654 - DNA, 761 bp, Oryza sativa
  ref <308>: DATABASE ACCESSION NUMBER: AK059673
  ref <309>: DATABASE ENTRY DATE: 2001-12-06
atctcttctcctcactccgcggccgcagcgaacccttccctcctctctcgccgccgccgccgatccccacctggaagcagcgagccgccgcctcctccccaattcctctccagaatggccggggcgaggagcctgctcctgaggcacctccgcgtggcggtggccccttcctcctcctcaccggcggcgtccctcaggcccgtggtggcgctgcgcgaggccctgtgtgcccggcggtggatgtcgtcggaggaggccaaggggtcgttcctggacaaggccgaggtcaccgagcgcatcgtcaaggtcgtcaggaacttccagaagatcgacgaccccgccaaggtcacaccagatgcacatttcaagaatgatcttggtctagacagtttggacgcagtggaggttgtcatggctttggaagaggaatttggttttgagatacctgacaatgaagctgacaagatcgactccattaaagttgcagttgatttcattgcttcacacccccaagcaaaatgagcaaatcaattgtgttatactcgttaattttctatgttttgttgtcacggagcctgtctaaggtggaagtcatctgctgtccgcatgatgtccacttttgcaatcagcattgtaccaatgctaccgttctgaatattttcttctgcctgtgggttttctggaccaaataatacttgattctgaggcggcagcccgccatcctgtatggagatttcgctggatatcaaaggtttagtttc

SEQ ID NO: 1655 - DNA, 437 bp, Oryza sativa
  ref <308>: DATABASE ACCESSION NUMBER: AK059674
  ref <309>: DATABASE ENTRY DATE: 2001-12-06
aggccttccttccttgcttgctccctagcttctctcggctcacacacacagctcaagcaagcgggaggacgtcgagggccaaccgagtaaatggccgcggatggggtcggccaggcttccccaaggcctccatggcctcctaaggagcgcgaggtggactcggaggggaaggccccgtgtccacgttgatcacctcagagcagcctggtgtatccaccgatcgtgacgcctgctcgcacgcacgcgaaggaggagggcatggctggaggggagaggagatgggaatgaagccgtattggtccgggaagcgtatacataggagtatttttgtgtaagatcgagaaatacgtaccagataaaaagtctcagttttcgggtagaggggaggtaattaaactggcaatcttagctaatgcaaattcttttttcgatcgatc

SEQ ID NO: 1656 - DNA, 349 bp, Oryza sativa
  ref <308>: DATABASE ACCESSION NUMBER: AK059675
  ref <309>: DATABASE ENTRY DATE: 2001-12-06
aaaaaaaagcagataagctaataaatctaaatcaacttcagtgtcagaaaacgatgaggaggtgcaggtagagccatcctctttgttcatctaatcatcttgtgcttcttctgtccagtccacacgccttctgcatttccatcatcatcgaccatgtcagaccttgttctgcaacatctcttccatcaagtcaagccctaataattcagattagtttcaggttcttctggggagatgtttacctgtatgatgtattgctgtgtacttgtaaaaacgatgcaatgtaaatctgtggtaaagttatgttcgatttcactcgaaacaaacaaacaaagaagttcggttagtg

SEQ ID NO: 1657 - DNA, 1091 bp, Oryza sativa
  ref <308>: DATABASE ACCESSION NUMBER: AK059676
  ref <309>: DATABASE ENTRY DATE: 2001-12-06
atcatcggtttccattgtcatctgcaacaaagctctcatcagcactctcggatttccatttgctactacattaacaagctggcatctcatggtgaccttctgcacccttcatgtcgcacaacgtatgcgcttttttgaaccgaaagcgatcgatgggcaaactgtaatcctatttgggttgctgaatgggacatcaataggccttctcaacctcagtttaggattcaattccattggattctaccagatgacaaagttggccatcatacccttcacagtaatgttggagaccatcttcttaaagaaaagattcagtgagagtatcaagttttctctgctgatcctgctacttggagttggcattgcttctgtcactgacctcaagttaaatcttcttgggtctgtcctttctggcctcgccatcgccacaacttgtgttggccaaattctcaccaacacaatacagaagaggttaaaggtctcttcgacgcagcttctgtatcaatccgcgccttaccaagcggcgatcctgttcgcaaccggccccttcgtggatcagctcctcaccagccgcagtgtcttcgcccacaaatacacggctccagtcgtgggtttcatcgttctgtcctgcctgatcgcggtgtccgtgaacttcagcacgttccttgtgatcgggacgacgtcgccggtgacgtaccaggtgctgggccacctcaagacgtgcctggtcctgtcgttcgggtacacgctgctgcatgaccccttcaccatgaggaacattctgggcatcctcgtcgccatattcgggatggcgctctactcctacttctcggtccgggagagcaagaagaagtcggcaggcgacccacttcccgtgtcgcagatgccggagaaggaggtggagccgctcctggcgaccaaagacgtcaacggtgacaccaagaaggcgaacggcgtgacccacgactgttgaatatatgtgtctcatttgttttagcatttagcccagcatttagctgtgtagcaccggcacacgtaagcctacccgttgtatctgaaattctgaatggccggggaacccgttcctttcc

SEQ ID NO: 1658 - DNA, 662 bp, Oryza sativa
  ref <308>: DATABASE ACCESSION NUMBER: AK059677
  ref <309>: DATABASE ENTRY DATE: 2001-12-06
aaaatgctacgttgtggcgcagtttatgcggggattaggggttcccgcggaggcggggttctgcgacgtctacggtctcgacgacgagatgctcgccatggtgccacagcccgtgctcgccgtcatcttgctttatcctcaggatcggaagaaggaatccgttgcttcaccctcctccacggtcgagagcaagttgaggggtcatattttgacagattttacaaacaaacagctgatatggatcctgcccggcgtgcttcgtttcttgaggaggatgaagaaatggaaaaggctcattctgttgctgtttctgctggcgatacagaggccaaggatggagtaatcgaacattatgtctgtttctcctgtgttgatgatgaaatttttgaacttgatggagggaattcgcagccaatctcccatggcccttcctctcctgatagcttgttgcaggacgctgcaaaagtcatcaaagctaggattgcgcagtaccccgggtcactcaatttcaatgtcatggctctttcaaagcagtgatgaaatcatatcctggtagaaaggttttattattcacaccactcttttccagtctgcaataatcttgttcatgatgtccaaatgtactcagcaattgacgagacagaacagtgtttgcatctact

SEQ ID NO: 1659 - DNA, 509 bp, Oryza sativa
  ref <308>: DATABASE ACCESSION NUMBER: AK059678
  ref <309>: DATABASE ENTRY DATE: 2001-12-06
actagtcccctagcttttgcctcatcaacagctgagcatttgcaacttcaatcagatcatggtgggtgcatggcaggagcatcttcatggttcttgagatcgggagcagcataagcagtatgaggatggagaagaatggctgtgctgttccttctcctcctccttctcaagaactcttcagtttgtccatgcctttcatggcataattccctggattccagaatctctgggtggcttagggaggtatgaacaaaccggcaagtcataaatcggcaatagtgagctccgactggatcttactcctcagtttatcaaatttagtttcattcccttgtaaccttattccagttgtttcaactttctattgttcccccttacaaaggtcattgcaattgtatcttgtggaagcagataagaagttgtctcggtgtaatcttgttttgtggagtcaaatgtttgcttgtgtgttgcttgggaatattttatccgagatgctcatatttaccttg

SEQ ID NO: 1660 - DNA, 486 bp, Oryza sativa
  ref <308>: DATABASE ACCESSION NUMBER: AK059679
  ref <309>: DATABASE ENTRY DATE: 2001-12-06
ctcgtcttctccacccctcgccgccgccgccgccgccgcctccgtcgtcttctgccgccgagcagcagcagcagtgccttccaccatgccgaagcagatccacgagatcaaggacttcctcctgacggcgaggaggaaggacgcgcggtcggtgcggatcaagaggaccaaggacgccgtcaagttcaaggtgcggtgctccaagtacctctacaccctctgcgtcttcgacgccgacaaggccaacaagctcaagcagtcgctccccccaggtttgactgtccaggaggtttaagcatcaagacagactatgctgttggtagcaccaggaatgtttgctccagttcgctttagtagctattagaaggtgaaatttatatgctgggttttgaatgtaacaccaaaagtttgtgttgagccttgctgtttctccttgctggacttatctaccactcatattgtcccaaatagactgaattttgaatc

SEQ ID NO: 1661 - DNA, 978 bp, Oryza sativa
  ref <308>: DATABASE ACCESSION NUMBER: AK059680
  ref <309>: DATABASE ENTRY DATE: 2001-12-06
atcgaacaagcaaagcggttggtatagcagcggcggcggcggcggcggcggcgggcgtcgccggcgagcagagcggaggagggaggaagcgcgcgagcgaacgatggaggcggcggcggcggttacgaggttgtccttcgtccccctcgcggcggctgcgaggccactcctcgccggcttcatgcgcccccgagtcttcgcgtccatctcctcctcctcctcctcctctcccttctccggtggaggcggaggccacttcttcggaggcggaggcggacgcggtaggggcggcggcggaggcggaggcggagaagaatacggtgcaggtgctgctgcagcggcctccgccgccgccgccgtggttctcggcgagaccgagacggcggacgccgacgtcatcctgctccgcgtcggggggatgtcgtgcggtggatgcgccgcgagcgtgaagcggattctcgagagccagcctgaggttacttctgccacagtcgactttgagaaaaaaacggctgccgtgtggacaacacctgaagccaaggcaacaaaagactggcggaagcaactgggcgaaaagctttcacatcacctgagcacttgcggatttcagtctcatctgcttgatgaagaagaacctgattctggatctcaacagtgagaacccttgcagttttacaatcagagggttcttgagagcagtacctacctacttacccttgtggaagttatatatcgtctctgaaaaagtacattctgtttgagagttttgtaggtctcaatcacgattttgttcttgaatccagccactgacaactacaaggcctagagattatgctcaaatccttatacaggaaatagagaaatttcttttggatttaaggttcaaatacagaagtagaattcgatcattgtatattgtcactaccgatatcaatgaacatatattgtcaatcatgaaggctgatgagtttgcaactg

SEQ ID NO: 1662 - DNA, 707 bp, Oryza sativa
  ref <308>: DATABASE ACCESSION NUMBER: AK059681
  ref <309>: DATABASE ENTRY DATE: 2001-12-06
gtgcctgctccagagcaagatggcaagaggggctcagccatctgcatccctcctgctcttctccctggggcttgtgctcctctacttctcctcaggaagcaccattcgacttgctgagggacagaaaacttggtgcgtggcgaagccgtcagcagatgacaaggttcttacggcgaatctcaactacgcctgctctcaggtgaactgtggagtgattcagcaaggtggcccgtgcttcaaccccaacaacctggtgtcgcacgccgcagtcgccatgaacctctactatgctgcccatggcaggaatgcctggaactgctacttccagaactcagctctcgtcgtgcagtctgacccaagttatggttcctgcacgtactactgattttaaaactgaggtcgaggtcgaggcagggcctacgcagctgagtttgtattaggatgtcttttactcccatgttagcagtgccgagatttcgtggcgatgccctagatcctctgatgcttagtttattgataagatgaacattgatttgctcggatcttggatgctgtttgtggcgtccattcccatcaaccttcattggatgtttggaaattcagacttgttgatccacatgcttcattgcttcctgtttcctagcatctcttgttttcagtttgatggaaaccggggattcgttgaatgaatatatgatttgtcactg

SEQ ID NO: 1663 - DNA, 1221 bp, Oryza sativa
  ref <308>: DATABASE ACCESSION NUMBER: AK059682
  ref <309>: DATABASE ENTRY DATE: 2001-12-06
caaaccctaaatccacgcgcattccacaccacccaaccagcgagagagagatggcggcgctccaccaccaggcggcggcggcgccggtgacgacgacgacggacgggggcgagctgcgggcgatggacctgtacgggaagctggagaaggtcggggaggggacgtacgggaaggtgtacaaggcgcgggagaaggcgacggggcggatcgtggcgctgaagaagacgcggctgccggaggacgacgagggcgtgccgccgacggcgctcagggaggtgtcgctgctgcggatgctgtcgcaggactcgcacgtggtgcgcctgctggacctcaagcaggggcagaacaaggagggccagaccatcctctacctcgtcttcgagtacatggacaccgacctcaagaagttcatccgcgcccaccgccagaatctccagaagatccccgtgcccaccgtcaagatcctgatgtaccagctctgcaagggcgttgctttctgccatggccgcggtgtgctgcaccgtgacctcaagccgcataacctgctcatggaccgcaagaccatggcgctcaagatcgccgacctcgggctcagccgctcgttcactgtccctctcaagaagtacacccacgagatcctgacgctgtggtacagggctcccgaggttcttcttggcgcggcacactactccactccggttgacatctggtctgtgggctgcatttttgctgagttggccactaaccaacctcttttcgctggagattccgaggttcagcagcttctgcacattttcaagttgctgggcaccccaaatgagcaagtttggccaggagtgagcaagctacctaactggcacgagtacccccagtggaatccctcgaaagtgtctgatcttgtccatggtctcgacgctgatgctcttgatcttcttgagaaaatgctgcagtacgagccgtcgaagcggatctctgcgaagaaggccatggagcatccctacttcaacgacgtgaacaaggagctctactgaaggtcgattgatgatgttcaccaccaaggaaaaaaaaacgttgtgcgtcttcgtgactagcctgccctgaagcattgcttttgcttctagggggaaaagtactgtttgtgtctgtttcctggatgctgcttagtgtgcttaagaattcacttgtttgtgatggtaatgagtaatgacttaagaattcgac

SEQ ID NO: 1664 - DNA, 318 bp, Oryza sativa
  ref <308>: DATABASE ACCESSION NUMBER: AK059683
  ref <309>: DATABASE ENTRY DATE: 2001-12-06
taaatatctgaaagcaaaaaaaagaaaaggcttgaacgagcttagtttctccaggatgtagtctgaaaattttgcaatgcctgtcaagtgaaccccatgtttggtaatttaatctctgggattatgtcatgactctggtactttgttggttggtctggagagtaagatgagatgtagggctacgtgaacaaccgtatgcttggcatgaatgaattgatattcctggttaccttggtttcccttttctgctcttatccctcttgatttctcatgcagtaaacttgttttgtttgtctcatttgatttgaaacgaaacat

SEQ ID NO: 1665 - DNA, 1588 bp, Oryza sativa
  ref <308>: DATABASE ACCESSION NUMBER: AK059684
  ref <309>: DATABASE ENTRY DATE: 2001-12-06
aagcaccgcctacattttcttttgaatccagttcaggtgtttgagctgagttcatcacaagggccagagataggattattattgttccgaaaggtaccacatttcagaatccttgtatgtggtggagatggtactgttggttgggttcttgatgcaatagataaacaaaattatgaatcacctccgcctgttgcgattcttccagctggcactgggaatgatctttcaagagttttatcttggggaggtggtctaggtgctgttgagaagcaaggaggcctctgcacagttctacatgacatagagcatgcagcagtgaccatcttagatagatggaaggtggcaattgaagataagcgaggaaaaaatgtgcttatggtgaagtatatgaacaattatctaggtatcggttgtgatgcaaaggttgctcttgacattcataatctccgggaagaaaatcctgaaaagttctatagtcagtttttaaataaggtgctatatgcaagggaaggtgcaaagagtatgatcgatagaacttttgtggacttaccctggcaagttagattagaggttgatggaactgagattgagattccagaggattcagaaggtgttctggttgcaaacattccgagctacatgggaggggttgatttgtggaaaagcgaggatgataaccctgacaactttgacccacagtcaattcatgacaagatggttgaagtagttagcatctccggaacttggcatctggggacacttcaggttgggctttctcgggcacggaggattgctcaaggacaatcaatcaaaatacaaattttcgctccatttccagttcaagtggatggcgaaccatggacccaaaacccctgcactctcaaaatatcccatcatggacaggcttttatgttgaggagaacaattgaggagtctctcggtcatgctgctgcaatcgtcactgatgtgcttgaaaatgctgaatctagtcacctaatcactgcatctcagaagagggccctcctccaagaaatggctctgaggctttcataaacccactcttgaaaacggtcgcgaaggtactcaatctgcgttgcaagtgatcatgcagttcgaagctgagttgtcgatacttcaacaccagtctagacaagaatgtcctaaagcaaatttcaggcagggagaggctctgcctgcctggtgtccacgtctctcttcaccaagtatatatccacttgtttgtggtggatggaacctaggaaacatgggttcattgcacacgttgcacatatttttgattggaatttcactgtatgcaccacctcagggtaacagttggtaagctttttttttttgagctgaacagttgggaaatgggtaatgttgtgttgaactgttgttgtgcaagttttctgtctaccttgttggtcggtctttctgtctggaagctctctgtcgagcgctctggtatcggggcatgttgtatataaagtggctactcagattgatcttattttcaaccataccatttttttttggtaaagttatcaaaaaagtgcctacgtttagtttgttgtcaaactttggt

SEQ ID NO: 1666 - DNA, 1177 bp, Oryza sativa
  ref <308>: DATABASE ACCESSION NUMBER: AK059685
  ref <309>: DATABASE ENTRY DATE: 2001-12-06
aatatgggggcaatcaaggttcttcagaacttgttttcagagcctgggcggttgcagttcatctatgctgatttaggcgatccaaaagctgttaatagaatatttgcagaaaatgcttttgatgctgtcatgcactttgctgctgtcgcttatgttggtgagagcacacttgagcctttgaggtactatcataacatcacctcaaacactttagttgtgctagaggctttggcagcacacaatgtgagaaccctgatctactctagcacatgtgccacctatggagaacccgagaagatgcctatcaccgaaggaactccccagtttccgatcaacccatatggtaaagccaagaagatggcagaggacatcatcttggatttttccaaatccaagaaggcagacatggctgtgatgattctaagatacttcaacgtcattggttctgaccctgaaggaaggcttggcgaggctccaaaacctgaattacgggagcatggccgtatatctggtgcatgctttgatgctgcactggggataattcctggtttgaaggttaaaggtactgactatgaaacacctgacggtacttgtgtaagagattacatcgatgtcactgacctcgtcgacgcccatgtgaaggcgctcaacaaggcggaaaggggcaaagttggcatatacaatgttggcacaggcaaaggtaggtcagtgaaagaatttgtcgaagcttgcaagaaggcaacaggagttgacatcaaggtcgactacttccctcgtcgacccggtgactatgccgaagtgtacagcgatcccgcaaagatcaacagcgagctgaactggactgctcaacataccgatctcctggagagcctcagggttgcctggacatggcagaagaagcaccggagcggctacggaccccctcaggccatggttttgtgaagagaatttaccctgtagcatctattggctgaaaacttaaaaacttaggtggatatattcttaggaatgttcatcatcaagggctttcaattgctcactcacagaagttatatgtaatatagcgcttatggtcattcgttcaattcttgagattcatattatgggaggattttagaagattgtaatattgttgatgtattcagtatacaataaaaatccaacaagctatcctcag

SEQ ID NO: 1667 - DNA, 1496 bp, Oryza sativa
  ref <308>: DATABASE ACCESSION NUMBER: AK059686
  ref <309>: DATABASE ENTRY DATE: 2001-12-06
ttaagagccagaagcatcatctcaagaagatcaagcataatgatgtgatggagcctggcatgagaattcaccttcctgtgtcagtggcagagggcgagattaagaagcggtatgagaccattccaactgccacattgcatcccaataaagatgagattgaatacttgagaaggcttgtcatacacaaggattctgccatacttgtacttaacaagcccccaaaagtgcccatgaagggaaatttgccagtgcataacagcatggatgtgcttgcagcagcagctctgtcatatggaaatgaagaaggtccaaaattggttcatcgactggacagagaaagtagtggtttgctgttgttcgggagaacaaaagaaagctttactcgattgcattggcttttcactagcgtcaatttagcaaaaacgaattctcaggtatggaatgctgcctgtgaagcatacatgcagaggtattgggcattggtgattgggacccctaaagaaagagaagggattatttctgcacctctttcaaaggtacttcttgatgatgggaaagccgagcgtgtcattctggcacatccatctggcatagatggtgcacaagaagctgtaacagcatatcgggtgatgggaccaaccattcatgggtgctcatggattgagctacgcccattgacaggccgaaagcatcagctccgagtacattgtgcagaagctctaggcacacccattgtcggagactacaagtacgggtggtttgtgcaccaaaggtggaagcagaatccccaaccagactttgaaccgtttactggggagccatacaagctgaggcgcccagaaggcttggaaatccagaagggcagtgttctctctaaagtccctctgctgcacctgcattgccgggaaatggtcatccccaacatcgcgaaattcctgagcagcaatggagaatggcatgaaaatggtgctccatggtccaaggagaagcccaatctcctcaggttcatcgcaccgatgcctgcacatatgaaaattagctggaatatcatgtcctcatatctggtgtaagagcatctccatgtgccattgttggtaacatcaagtttcattccatgtagttttactgagaagcagctaggcttctagttcattattttctagattctatagctacatcttctcacagtctgggtgagaatctgttctgcactgcttcgggagcctaagattttaggatataagctgccgctgctagaagctcagctcccccgaatagcgccatagctgtttttttcaggaatgccagattgtagcatctgaaccattgcaaaagaaacagttggtgtgaatatagatcaattttctaagagtatacatcctaccaaagttttaaatctttgtttcttttttgtaagcatgatgtaattctgaacaataattactgtacgttgcagcattttactactaatgaaatgccactgctagtctgctact

SEQ ID NO: 1668 - DNA, 1603 bp, Oryza sativa
  ref <308>: DATABASE ACCESSION NUMBER: AK059687
  ref <309>: DATABASE ENTRY DATE: 2001-12-06
tgttctgagcaatttttaaagtttggcttgccattcccaaatcttgaatgcggactccaagttagcccatctgaaattatgaagggggcatctgagcggctgaaccgtgacaccgcagtaaattgtgtcatggaagtactgcttaacaacaagtttgaagagtggctgttttctaaatatgaacaaaatagtgaagggaatcattttctccctaggcaataccatggtgttatacatacaattgctgccttggggtacaactgggctttgaaacttctgcttaattcaggtgtacttgtaaactaccgtgatgcaaatggatggactgctttacattgggctgcacgatttggcagggaagagacggtagtgctccttcttgatgcaggtgccgcagctggtgtactgtcagacccaacagcacaagatcctgctgccaaaacacctgcttcagtagcttctgcatatggtttcaagggcctttctgcgtatctttcagaagcagaactaatagctcatcttcattctctcgaatcaaaagaaaacgggtcttctggagatcaaatatcaagagttgtgggcagaatatcagacacatctgcccatgcacaaagtggtagcgatgatcagcttgcactgaaggaatccctaggagctatgcgatatgctgttcaagctgccgggcgcatacaaactgccttccgtattttttccttcaggaagaaacaacaagcaggtcttcagaatagaggtaaccacattatatccattcgtgaggtaggtgctgcttcacacggtatgcttgagaaagccgcgttatctatccagaagaacttcaggtgctggaagaaacgcaaagaatttctgaaaatacgcaaaaatgtcatcaagatacaggcgcgtgtcagagctcatcaacaacataacaagtacaaggagttacttcgaagtgtgggcatccttgagaaggtcatgcttagatggtaccgaaagggtgttggtttacgaggattccaccctggggcaatagcaatgccaatcgatgaagaggacgaagatgacgtagccaaggttttccggaagcaaagagtggaaacagctctcaacaaagctgtttcaagggtatcatcgatcatcgacagtcctgtcgcgagacagcaataccgaaggatgctcaaaatgcacaaacaaaacaaggatgatgatgaaaagtaggactgaaatgttcctttttccaatcacaggatgatgatgaaaaagtagaagtttctccagcatctcatgtttatggcagtggcagtcatcacatgtgttggctaagccacaacaacaaagcaatgcactagctggccagtattgccatgtccgaccttgttaaatgatctgacgagcagttggccttatgaagaacagtaaatccttggcgattcactgtgcagcgaatcctgaaaaaccagaggaatttatcgatgatccagtaccatcactggttcttcttgcccttgctctgaaaaaatgtgttttaccttttgtacataagaaaaatcatgtgcaaagctgactcttggccaatattcagaaaaggtgtaccctctttgcattt

SEQ ID NO: 1669 - DNA, 1000 bp, Oryza sativa
  ref <308>: DATABASE ACCESSION NUMBER: AK059688
  ref <309>: DATABASE ENTRY DATE: 2001-12-06
tatactccaacagggtgcttcgaaaaatttgaatcttatggagtgggataaactctggacaatcaacaagaaaataattgacccagtttgtgcaaggcatactgctgtgttgaaagatcagcgtgtgatcttcaggcttactaatggtccagagaaatcatttgttcaaattttgccaaggcacaagaaatttgatggtgcaggaaagaaggcaacaaccttcacaaacagaatttggctagattatgctgatgcatctgcaattagcaagggtgaggaagttactctgatggactggggaaatgccatcattaaagaaatcaagatggagaatggagtaattactgaactgattggagaactacatcttgagggatctgtgaagacaacaaaattgaaggttacatggcttccggacatagatgatctggttcctctctcattggtggaatttgattacctgattagcaagaagaagcttgaggaggatgagaacttccttgacaacctgaacccatgcactcggaaagaaaccctggccctaggagacgcaaatatgaggaacctcctgcgtggggaggtcatacagcttgagaggaaaggctattacaggtgcgatgccccttttgtcagatcctcgaagccggtggttttgttcgctatccctgatggtcgacagcaggccagtttgaactaggcggcatgattctgatgagcttctcaagtcgttgagttgtcagagattcctgaatgctctactgaaacactcccatctcatactgtaatgtcgcttatgtgtcatgggtgatttgcgctaagttttggtgcacagtttaatgtttctcatgctccatgctccagttattaagaagacacaacatttcttagatggcaacgtgttagcttggcgatatcatactgccagatacaagcatctgaattttttgaagactaatatctgatattgcttggcatctgaaaaaaaaaaaaaaaaaaaaag

SEQ ID NO: 1670 - DNA, 556 bp, Oryza sativa
  ref <308>: DATABASE ACCESSION NUMBER: AK059689
  ref <309>: DATABASE ENTRY DATE: 2001-12-06
tttcttttcttcatgctgtgttgtaattcttgtataatttaattgatgcaggcccaagatcaaaagccactcactggaagcaaactgttctgtacctggaggatgtactgaccatctgtgagggggaaaccatcacaggcagtatgactgttacaccgaataaaaagaatccccgagatattgacattaagctctgctacgccctaagtgggcatagatgccaagtgtcaagaacacaacactacaagatgcggtgatcaatgcgagctcagctgccctgcaatccattaaattttggttgaccaagtatcttgtttcgcaaactgtgcttgttcccgtgatcctgtattaacatacgttatctatgttctttgggatctaagcataagtagaaaatagattgaactggcctgccgatatgagatttgctattttgcaaaactatgttgtcttgctggctggtggtattggtaatgaatgcgttgacaatgatgatggcaattgctgtgtacgttttatgaaaatggatcaatgacgtattgccagtttgccacac

SEQ ID NO: 1671 - DNA, 1540 bp, Oryza sativa
  ref <308>: DATABASE ACCESSION NUMBER: AK059690
  ref <309>: DATABASE ENTRY DATE: 2001-12-06
gttgggatagagaacttcatccgtgcaaaatacgaggacaagagatggataccgaggaatgggtcatcaagaccatcatctggtgctagagatgagaagagctcagagtcacaaactagtgttaacaggggtggccataatcaaagatcttcatttgagcaacaccgcacttcaccagctgcagtgagcaaaattgctccagtggtttctaggacgcccacccaggcaccacatcagccaaaagcacaaccatcagttcccaaggtttcacctcctcaacccgagaaatcacctcctaatgcaacaccaccaaaggttgagaggccatcagttgcaccacctcctaaggttgactatgcaactgatctcttcaacatgttatcaatggatggaacaaccgagaaagaagcagagtcatcttctaatgatgatagtgcatgggagggcttccagtctgcagagccagtacctagctcagacaaaaaggattctgctaagccagtagaaagtaagccccagtctacatcaggcatagaggacttgtttaaagattcaccagctgtgacagtatcctcagctccagctgccccacaagtaaatgtgaagaatgatatcatgagtctgtttgagaagtccagtatggtttcgccatatgctgtccagcagcagcaacttgcttttatgaccccccagcagcttgcacttctgtctcagcagcaagctttactaatggctgctcttaaagctggaaatgcaccccaaatgattccagggaacgccagtctgctaaatggtaatggttctaatcctgccaatggaggcttgccttcacaaagctggacaaatcttgcttatcagaatcctgggttggctccagtagcagcacagaatggtgccaccaaggttgcgaacaacaatcaggaattctcttttgggaatttcaattttagtacacctggagcatacaacactagctcatctgtcccagcaaatggggctgcaagtgcagctgctaacaagagcacatccccgacctcttcttccctcccctctcaatcaggcaaagaatatgatttttcatcattaactcaaggactgttctccaagcgatgaacacttgctatacttggaaattaaacaaatgggcctgtatgcaacgatggacacagcagattttattagggggaaccgggggccttgtacactcttttatgaggcagcatttcttcttgtggatattacgacaccttgtagctgtcctggacaaataagaggaagaatatagcagctaattgcatatgttgtttcctacagctgaagagagtcgatattgttcatgatgccgatctctttgaatagaggacgccttgtggctttgttggacttacatttataagagcataatgcaactattttattctctttgttcatgacatagttacaatacgtgacgccgattattttctactgtaccatacttggattttgttattcacaaaacatttgattgtattattatgccaagtgagctattacacgc

SEQ ID NO: 1672 - DNA, 950 bp, Oryza sativa
  ref <308>: DATABASE ACCESSION NUMBER: AK059691
  ref <309>: DATABASE ENTRY DATE: 2001-12-06
atacaacaagaccttggattggtctaaatggtacatcttctggtctgatgagcgtgctgtagcaaagaatcatgcagagagtaattataggataacaaaagaaggattcctgtccaaggtacctattctcaatggccatgtctactctataaacgacaacgcgacggtggaggatgccgcaacagattacgaatttgtcatcaggcagctggtcaaggtccgcactattggagtctccgaaagcaacgattgccccaagttcgatctaatcctgctcagcatgggttctgatggacatgtggcttcattgttccccaaccatccatcccttgagctgaaagatgactggatcacctacatcaccgactctccccagcctccacctgagcggatcaccttcactctccctgtgataaactcggcttcgaacatcgcaatagtgactaccggtgacgataaatcggaggctgtccatttggccatttctgacaatgcagatggtccagaagccccctcatcgctgccagcaagaatggttcagccaacagacggcaagctggtgtggtttttggacaagtcagctgcgtcctctctggatgccgagaacgatgacgcctttgagcagcatcgcgagtactaactccaatcgtcgaaagaacattccttttgctgtggatgaaggtgtgtgcgtgtgtaagtaggcggtttggtatgatcgaattcaggatgttttgccttccagtttagcagaatgcttgttgcattagtttttttgtggagggttttgttcagggagagccttgagtgtgttttggtcgttttggcaaattggagatggttttagagcgaagaggattgagacgtcagaactgagaacacccaaatttgattaggggtggtatgatattatgtgctacattatatttagttcaatcaaagttagttcaagc

SEQ ID NO: 1673 - DNA, 1711 bp, Oryza sativa
  ref <308>: DATABASE ACCESSION NUMBER: AK059692
  ref <309>: DATABASE ENTRY DATE: 2001-12-06
atcccgaccagacgtcgagtcgagcattaactcagtcagggtggccatggcgctcaaggtcgtctctttccccggggacttggccgcggtctcattcctcgactccaacagaggaggagctttcaaccagctcaaagtggacctcccgtttcaaacgagggacagaagagcagtttccctgagaaggacttgctgttcaatgcaacaggctccaccaccagcatggcctggtcgagccgttgttgaacttgggaggaggtcatgggatggccccaagcctatctcaattgttggctcaaccggttctattggcacacagacattggacatagttgcggagaatccagataaattccgggttgttgctcttgctgctggctccaatgtgactcttctagctgatcaggtgaaaacattcaaaccaaagcttgttgctgtaagaaatgagtcattagttgatgagctaaaggaagccttagctgattgtgattggaagccagaaattattcctggtgagcaaggtgtcatagaggttgctcgccacccagatgcagttacagttgttactgggatagtagggtgtgcaggactgaagcctacagttgctgcaattgaagctgggaaagatatagcattggcgaacaaagagacacttattgcaggtggtccttttgtgcttccccttgcacaaaagcacaaagtgaaaatacttcctgctgattctgagcactctgctatatttcagtgtatacaaggcttgcccgaaggagcacttcgccgcattattttgactgcatcaggtggtgctttcagggactggccagttgacaagttgaaagaagtaaaagttgctgatgctttaaagcgcccgaactggaatatggggaagaagattactgtagattctgctacattattcaacaagggtttagaagttattgaagcacattatttatttggtgctgaatacgatgacattgaaattgtgatccacccacaatctatcatacactctatgattgaaacccaggattcatctgtgttggctcaactgggatggccagatatgcggataccaatcttatacaccatgtcttggccagacagaatctattgctcagaggtcacctggccccgactagatctttgcaagctgggttcactgacattcaaagctcctgacaatgtgaaatacccgtcgatggatctcgcctatgcagctggaagagctgggggcaccatgacaggagttctgagtgctgctaatgagaagactgtggagttgttcatcgatgaaaagatcgggtacctggacatcttcaaggtggtggagctgacatgcgacgctcatcggaatgagctagtaacaaggccatcactggaggagatcatacattatgatctgtgggcgagggagtatgctgccagcctacagccatccactggcctcagccctgtacctgtctagtacttgtagcaatacaaaattacagtagcattgtacaccactgccgtgccagctccatgcatagtcagcagctggccactctctagctatatctagatgcgagagaattttaaggatgtaaatcatgccttcacatgaataaatcgttcgtccgtgcgttgtgtattcatgtaaattttgacggatggtcaagtaaaaataacaatggcaaattaatttagggaagaaaaaacaaaaaaaaag

SEQ ID NO: 1674 - DNA, 1922 bp, Oryza sativa
  ref <308>: DATABASE ACCESSION NUMBER: AK059693
  ref <309>: DATABASE ENTRY DATE: 2001-12-06
aaacttgcttgccgcaggttactgatccaccgaaggagggaggcgcccgcccgccgccatggccgaggtgacggtggtccgtgcggagcgcgaggaggagtccaccctggagcagggtctcctcgccatcccggaggaatccaaccaacttacatacactggagatggatctgtcgacttttctgggaatcctgttgtgaaggagagaactggtagatggagggcatgcccatttatcttaggtaatgagtgctgtgagcggttggcctattatggaatctccacaaaccttgttacatacttgacaaagaaactgcatgatggtaatgcttctgctgctagcaatgtgactgcatggcagggaacttgctacttaactccccttattggagctatactggctgatgcatactggggaaggtattggactattgcaacattctccacgatatacttcattgggatggctgtactgactctttcagcatcagttcctacattcatgcctccaccttgcgaagggtccttttgcccaccagcaaatccattgcagtatactgtcttttttcttggactttacctaattgctcttggtactggtggtattaagccctgtgtctcatcctttggagcagatcaatttgatgatacagacccagttgagcgaatccagaagggatctttctttaactggttctatttctcaataaacattggtgctctcatatcaagcagttttctggtttgggtgcaagacaatataggatggggaataggctttggcattccaacaattttcatggggctggccatcataagtttcttctctggaacatcactttatagattccaaaagccaggcggcagtcctattacacgagtatgccaggtggttgttgcctcctttcgcaagtggaacgtacatgttccagaggatagctctcgcttgtatgagttgcctgatggggcttcagcaattgaagggagtcggcaattggagcacaccgatgaactcagatgtctggacaaagctgctgtctatgctcagatgtccaccatgtttgttgagcaagggatgatgcttgatacatcagtaggtccattcaagattcctccagcatctctatctacctttgatgtggtaagtgtcattatatgggtccccctctatgatagtatcttggttccaatagctaggaggttcactggcaacccgaggggctttacagagttacagaggatggggattggtttggtaatctcaatcttttcgatggcggcagctgcagttcttgagattaaaaggttggacattgcaagggctgaacatttggtggatcaaaatgttccagtaccactgaacatctgctggcaaattcctcaatatttcttggttggtgcctcagaggtcttcacatttgtcgggtcacttgagttcttctatgatcaatcaccggatgccatgaggagcctctgcagcgcactgcagcttgtcacaacagctcttgggaattatctcagtgcattcattttgacattggttgcgtacttcacaacaagaggaggaaatcctggatggattcctgataacttgaatcaaggtcacctagattatttcttctggcttcttgctgggctcagttttctgaactttgtgatatatgtcatctgcgcaaacaaatacaaaagcaagaaagcagcttgagctaatcaggagttaaaagactgtcgtcatgggaatttcacttcaaaattctgtatatatgtgcacaaagtacatgttgaagcagcgaccgtaacaagagaactttaaccatcctgtactctgtatttgatgctactatacattttatactttttgttctgtagatattaatttattgaagctacttgtggaatgtagctttgcttccaatgcgtct

SEQ ID NO: 1675 - DNA, 855 bp, Oryza sativa
  ref <308>: DATABASE ACCESSION NUMBER: AK059694
  ref <309>: DATABASE ENTRY DATE: 2001-12-06
gcgtcttcccgttcgtcctcctgtccggtccgagtccctctgacgacgcgactttccccacgccgggatcgagctccggggaggggagctgcgagctgaaacactttgtcatatcagtcaacagtagagaggagaccagatgcaggcatctagagctaggctctttaaggagtataaggaggtgcagcgagaaaagtcagctgatccagatatccagttaatctgcgatgattcaaacatattcaagtggactgctcttatcaagggcccttcggagacaccttttgaaggtggtgtatttcaacttgcattctctattcctgagcaataccctctccttcctccgcaagttcgcttcttgaccaaaattttccacccgaatgtgcatttcaagacaggtgagatttgcctggatatcttgaagaatgcgtggagcccagcatggacactacaatccgtttgtagagccataattgcattgatggcccatcctgaaccagacagtccacttaactgtgactcaggcaacctcctgcgctcaggcgacatcagaggctatcaatccatggcaagaatgtatactaggttggctgccatgccaaagaaaggttaactccagggtgcaaaaggaaatatgcgccaagcgaaggcatggctgattcatgtgatttgctctgttaagtgtaactcttactgtcaccatgtgaacatctggtacttattttcttacctcactcttatggatgtatgccctggagtgaagagaagaaaaacatgcattgtaatgcttggtctatatgatgtcataaatataactgggttcggtacttctaatgcactgtccattgttcaatt

SEQ ID NO: 1676 - DNA, 1512 bp, Oryza sativa
  ref <308>: DATABASE ACCESSION NUMBER: AK059695
  ref <309>: DATABASE ENTRY DATE: 2001-12-06
tttcgcagaaagaaaggatttatctcaaatcaattaaggggttggcttgtgtctgctgtctaatatcttgcaaccacagctggttaagtgtctatgcggtgttctttttaacctactacttcgctgatatgctagattactagtaaaggactaagtctgactctattccatcctacagcgtacgggcctgtttggcacagttctaactccagttccgcctctcctggagttggagcccagccaaatagttcaactccacctaaaatgggagtggagctgggtggagcgctctcacaaaatgaactagagaggtggagcttgggtttaggcagctccacaactccactccgaacccaactcctagagttaaattttaggagttggagctctaccaaacatgccctccatacctattgactaagcctctgactcgactccatcatactttcctattgactaagcctcttactcgactccatcattcattcctatcacttcagaaccacagctcccacctctaaaatctaactaccctagctgagtgcgcacgaactgctttcctaaatatttctcctcaaacgttgaggttagcaaatgttctaatcgttatggcatgtgatcaactgacaattcaagtttgtgatggtttctattatttatgatgtttcttaagccagaataggaaatagcactaaggaggttcgagttcagttttggcttctaacttagtaccaatgttgggggcatatctggacttttctgtgggaggactcattggagatagggagattccatacaggataaaactccaaaagcattcttgaggcattctagtatagtacaagtcaagtaattttttcagtgtccaatgataatttcaggaaacatttaagccagttatgtttgtcatttggtgaactcaaaatgtaatgtgcactttgatgttacctacttacctcactaatattttcaatggcttccttgacagctttgcgctgctctaaacatcaacaaaggaagtgtcgacagggatctcgatgtttaccggaacatactctccaaattggtccaggctaaggaacttctcaaggaatacgtggaaagggaaaagaagaagagagaggaaagatcagagaccccaaaatcgaatgaagctgttacgaaatttgacgggagtctcaattccatgaggcattaactcaagccttcataaggggagtgagtgctaccgtggataacagattttaacagagttctggatcacgttgagaaactatcaaggtcacctttcactgcacggacactttggctgctctcgtgtggttttgtattctgccgtataaaaggatccagattgttcttactactgagcattatattttttttgtaattctccttttcagtgttcaaatgtatcgttttccttttctttgacaatatatgaagaggtatgtggggatcaatgttactcacaagatgaaaaatatattgttcagttatcccttcatgatg

SEQ ID NO: 1677 - DNA, 2079 bp, Oryza sativa
  ref <308>: DATABASE ACCESSION NUMBER: AK059696
  ref <309>: DATABASE ENTRY DATE: 2001-12-06
aacaagaagagagtattttctcctctgttccttctcttttgcccttctggttgggaaacaagtaacgacgccggcggcggagagacgatggttcatctgccgcaccaggggaagctgcggcgggatgtcaaggaggaggcgctggagcacagacggtggtagtgtgtccaatcaacagtcatcccaacatggtttccttgatgagcctagcccattgggcttgcggctgaagaagagcccctctctggtggatttgatccaaatgaagcttgtgcaggctggtaaggccaaagatgtccagcatagtggaaccgctagtgcctcagagaaattgaaggcttccaatttccctggttctgttctaagaattggatcttgggagtgggtgtcaaggtatgaaggcgatctggttgcaaaatgctattttgctaagcataaacttgtgtgggaagtactggatggtggtctgaagagcaagattgagatacagtggtctgacatctgtgccatgaaggtggtttctccagaaaatgaacctgggatcttggagatcgcattgtcccggcagccacttttctttcgagaaactaatccacagccaaggaaacacactttatggcaggcaacatctgatttcactggtggacaagcaagcattcacaggtagtaaaaatgaatgacacgttggtaacatgcgtgcttaattttaaaatgtatacccctatgttcgcaaatatggtgcttatttttcccttttgtctaactagggaaattttgatagcattttggaatttaccccataatcatgaggaacaattgtgaaaaaaaaatcagacaattatcacaacgaattagtctctcacagttgtttatgctgactaatttcctaatactgccgagtggtgagttgacttttgactatcatttatgtaaggaggcattttcttcagtgcccgccaggaatgatgaataagcatgttgagaagcttgttcattgtgacccacgtctatattcactaagccagcagaacgacatcaatttggataatccgtactttgaatcaaagtcttctatatttgaagatgcagagggcataaaaggccaagattttgagcataaagatgatggcgatcagttagctccccaaagatttacagaactgttaccgcctcattctgcatcaggtaggatagatactgaagccagacagctctcaggaacaccggacaagttacttcaacatttcccttgttcagttagtggtactcaagtgattaaacaagatgctgcttctggtgattgtgaacggcaagaaagcatctataattggaacggtatcaaggtaccggggataaggcgctccatgtccaaaagtgagattgcaaatcacattgggaatcatatctacagacagatgtattcagggaacctacctgcagttcatcgtggggattccacgtcaagtaaagtaacattagatggaataacccgattcctcttgggcagcacccagatcatcggcgatggcgatggcgatggctcaatgggtaaactgacatttgatgagcttaccagacaactcctcaatgattcccagataaccaacgcagctgatgaaaggatgctcatgtcaagggtcaactccctctgcagcctgattcagagagattcaggttcaggccagacaaaccccagcagcagcattcatggtgacaatgagatgcaagaaaggaagccccaaccttatgcgcttccggtgtcagcagacagtggaagcaacacctcattgccgccgaggcaagaatcgtttggggatctcctgacgcacctgcctcgcatctcatcatttcctcacttcttgtgagtgatctgacggagcaactctggagttggagtgttattctattggggtacatattggcttgagaactcttgcttgtagaaatttttgccgggaaatgtcttgaccccttttcttcttacttttttttgtacataaatagataggataactgtagattgtatagtaagcttctttagttcgatagggcaaatgcatccggtacatattctcgtcg

SEQ ID NO: 1678 - DNA, 1565 bp, Oryza sativa
  ref <308>: DATABASE ACCESSION NUMBER: AK059697
  ref <309>: DATABASE ENTRY DATE: 2001-12-06
aattgacttgttcatttttgcaagctgtaggtctggagagtggagaggaagaggaatcctcctcagtcctcaccttcagatttcagaacacaggcaatcggccctagctgcaatccaacaagatgggcatgcctctgctgctgctgctgctgatcctcgtcgctgctggcccccaggcaggcagagctgcaaagccaatcccaaatctccagctcatgaccaaggagggcggcagttcaagaatcatccaggacgacatcataaaggcaatcaacaagcatcccaatgctggctggacggctgcacggaatccatactttgcaaactatactactgcgcaattcaaacatatccttggagtgaagccaacaccgcatagtgtgctaaatgatgtccctgtcaaaacttatccaagatcgctgatgcttccaaaggagtttgatgccaggtctgcatggtcacagtgtaacacaattgggaccatacttgatcagggtcactgtggctcgtgttgggcatttggtgctgtggagtgtctccaggatcgtttctgcattcatttcaacatgaacatttcgctatctgtcaatgacctagtggcatgctgcggtttcatgtgcggcgatggttgtgatggaggctatcctatcatggcatggcgctactttgttcggaatggtgttgttaccgatgagtgcgatccatactttgatcaggtcggttgtaagcatccaggatgcgaacctgcttatcctacgccagtgtgcgagaagaaatgcaaggtgcagaaccaagtttggctggaaaagaagcatttcagtgtcaatgcatacagagtaaattctgatccacatgacataatggcagaggtctaccaaaatggccctgtagaagttgctttcaccgtttatgaggattttgcacactacaaatcaggagtatacaagcacatcacaggtggcatgatgggtggtcatgctgtcaagttgattggatggggaaccacggatgctggcgaggattactggctgcttgcaaaccagtggaacagaggatggggcgatgatgggtacttcaagatcataaggggcacaaacgaatgtggcatcgaagaagatgttgttgctggtatgccctcgacgaagaacatggtgaggaactatgatagcgccttcggagtcggaacggccatagtttgactttaatcaatgttaatggcctcaaatacggttgggatcatgtaaatttgtcctgggtgatttctggattttgcacacacgggcaggcttctcgagactgatcggagtttaggctacttgtccagaaacacattggaataatatctgaataatagatgtattctctctctctctctctctctctctctctctctctctctacgtccggttaactacgggatgtgacgtagaggtgttagggaggagcgcacgttaatctcgctgtaatccaagttgagacttgaagaattaatgtgtatgctgtaagtcaaatgatatgcgatctgtgcgctgcttactagtatcccaaaagtatggattttgttc

SEQ ID NO: 1679 - DNA, 1134 bp, Oryza sativa
  ref <308>: DATABASE ACCESSION NUMBER: AK059698
  ref <309>: DATABASE ENTRY DATE: 2001-12-06
cttcaacgccggcaacaggtggaagaagcggggcatttcttgcgtgccgatcacctacgacgtgaggctccggccaactccggggaaggtgtccatcatgaacgacggctccatcgccgttgaggtcggcggcgtcgagatcgggcaggggctgtggacgaaagtgaagcagatgacagcgttcgcgctgggccagctctgcgatgatggcggcgagggcctcatcgacaaggtccgtgtcatccaggccgacaccctgagcatgatccagggaggcttcaccggtgggagcacgacctccgagactagctgcgaggctgttcggaagtcgtgcgccgccctcgtggagaggttgaagcccatcaaagagaaggctggcacgccaccatggaaatcccttattgcccaggcaagcatggcgagtgtgaagctgacagagcacgcgtactggacgcctgaccccacgttcactagctacttgaactatggagctgcaattagtgaggtggaagtcgatgtgctgacgggagaaaccaccatcctgaggagcgacctcgtgtacgactgtgggcagagcctgaatcctgctgtggacttgggccaggtggaaggcgcattcgtgcaagggatcggcttcttcacgaacgaggagtacacgaccaactccgatgggctggtcatcaacgacggcacgtggacgtacaagatccccaccgtggacaccatccccaagcagttcaacgtcgagctcatcaacagcgcccgcgatcacaagcgcgtcctctcctccaaagcgtccggtgagccgccgctgctgctggcgtcgtcggtgcactgcgcgatgagggaggcgatcagggcggccaggaaggagttcgccggcgccggaggctcgccgctgacgttccagatggacgtgccggcgacgatgccgatcgtcaaggagctctgcggccttgacgtcgtggagagatatctcgagagctttgctgccaaagcctagagatagaagggttctttggcttagctttgtataaacaccaacaataatctgcgcctggatttgtgttgatgtagtatatatgtacagaacaaaaggtgtttttttgggaaaaataaaatcatatggatggt

SEQ ID NO: 1680 - DNA, 1549 bp, Oryza sativa
  ref <308>: DATABASE ACCESSION NUMBER: AK059699
  ref <309>: DATABASE ENTRY DATE: 2001-12-06
acgcctttccgcgatttcgtcagttaccctgcatcctttgtgaactccattcagaagccacgtgttgtcatcatgcttgtcaaggctggtgcaccagtggaccagaccattgcaactcttgcagcacacttggagcagggtgactgtattattgatggaggaaatgagtggtacgagaacactgagaggagggagaaggcaatggaggagcgtggcctcctctatcttgggatgggtgtttccggaggagaggagggtgcccgcaatggcccgtccttgatgcctggtggctcattcgaggcgtacaagtacattgaagatattcttctcaaggtggctgcccaggttcctgatagtggcccgtgcgtcacatacattggcaaaggtggatctggaaactttgtcaagatggttcacaacggaattgagtatggtgacatgcaactgatttctgaggcatatgatgttctcaagtcagttggtaagctcacaaacagtgagctgcagcaggtgttttctgagtggaacaagggtgagctcctcagtttcctgattgagatcacagccgacatatttagcatcaaggatgaccagggttcaggccacctggtcgacaaggtcctggacaagactgggatgaagggaactgggaagtggactgtgcagcaggccgcagagctttctgtggctgctcctacaattgaggcatccttggattccaggttcctcagtgggttgaaggatgagcgtgttgaggctgccaaggtcttccaaggtgacttctccagcgacttgccagtggacaaggcacagctgattgaagacgtgaggcaggctctttacgcctcgaagatctgcagctacgctcagggcatgaacatcatcaaggccaagagcatggagaaagggtggagcctcaacctcggtgagctagcgaggatctggaagggagggtgcatcatccgtgccatcttcctggaccgcatcaagaaggcctacgacaggaactccgacctcgccaacctgctcgtggaccctgagttcgctcaggagatcatggacaggcaagcggcatggcgcagggtggtctgccttgccatcaacaatggcgtcagcaccccaggcatgtcggcgagtctcgcgtacttcgactcctaccggagggacaggctgcctgccaacctggtgcaggcacagagggactatttcggggctcacacctacgagagggtcgacatgcccggctccttccacaccgagtggttcaagatcgcgcgtgctgctaagatgtgaaatgcttcaaattttcggtaatatttggttgctgcttgctgctgagtcgcttgtagggtgggaggaactgttgttaaattttatggtcaatgtgctacgcttaatttggataaggaggtccatagctatctccattcttttaatgtaaggagcagcccagggtggagagaacatggatatttatcattggaacctttgttgtgatctttgtaagtctatatatgaataaaagcattttggcaatgcttgctttttt

SEQ ID NO: 1681 - DNA, 632 bp, Oryza sativa
  ref <308>: DATABASE ACCESSION NUMBER: AK059700
  ref <309>: DATABASE ENTRY DATE: 2001-12-06
accattggtggtgctctctcattcctcgtctctggtatgacaccacggacatccatattctttttctcgttcgcaaccatcaagacagtggatgatcattgtggtctgtggctccctggtaacatcctccatgcgctgttcaacaacaacagcgcttatcatgacattcatcatcagctctatggaaacaagtacaacttttcacaaccattttttgtcatttgggacaagatacttggaacttacatgccttactctatcgagcacagaaaaggaggagggtttgagtcacggccagttaaactcaacatagcagagcagaccaagactgattagtgtattctcggtccactactctcggctctgtggtaccctgatcttctaactacactgttggtgtgaaattatcaccttgttcgtatagtgatgtttttcttgttctctatattcttcttctgttaccttttgggaggggttctccttgtaccaaggtatagtgagtaaattagtgtactatatcaaagaatactaaagcactaagatccacttggatctgtttcctggagattggctgcatgtattgagcttacatgcatgccaatgttaacaagagaagatgatatttacactgt

SEQ ID NO: 1682 - DNA, 1248 bp, Oryza sativa
  ref <308>: DATABASE ACCESSION NUMBER: AK059701
  ref <309>: DATABASE ENTRY DATE: 2001-12-06
atttgatgcacttttatgagaggatgggtgacacccttgcggtgcaatacagtggttcggctgctcataacaagatattctctgcaaagagaggtcatctgaagctttttattcgatcacaagagttcttcagaacactacaacggcactacagcaatacctgtatcgatgctaacaagcaagcagccataaacttatttcttggctacttccaaccacaggaaggaaaacctgcactctgggagctagagtcatcttcagtggatcatatcgctgtgcacgcacgtacaataaaaagagtgagatcagatggcagcattctttatggaagcaacacatccatatctggatgtagtggttgccataatgaagacaaggagctgttgaatgcagcaccgcttgatgttaaaagtgggtcacaatttccagtgttggaatctgattcagtacatggcaatgaaatttcattgacctgtgaaagtgaggtatcaaacttaaggtatacacctatgatacctcagacacatcatgttccaggcggcgttgaaactgaaagtagcattcattctggtgattcaaactttctggatcttgaatggctttcaacttcaggcaactcaagcgatgaaaggtccattgcaattagtactccagatgtgaacctttcagcggagaatgttataagtggcataaattctgagaccatggaaaatcaagatgctgatatctatactcagaatttacctgagcatttcgtgcagtgggttaaccacggagacaccttttggtattaaaattacccgatgcttgtgtcatgtacgcggtacgcgttggctactttgaaggccaaaacttgtcttttccaagtggtcatgagacgggaattggtgatttgagtagggaattaggagtgagaagagatagatggcacagcaaacttcagacattcgccttgtgatatatgtccacatcatcccatagccctcttaggaaagtataacattctggttatttgttcccatctttcttgtaggagcaagtagataggcgtttttctcaatttttgaaaagaaagtagaggtagattcatatggatatataatttttgttctttcgaaaaatgtaccattgtgggaacattccgtttgatatgtaaatattattttatgcttggcgtgttttgggttgttgaggtcacaaggtggattgtaaagcatcgtccactatatgtggcttggttcgttgatt

SEQ ID NO: 1683 - DNA, 1547 bp, Oryza sativa
  ref <308>: DATABASE ACCESSION NUMBER: AK059702
  ref <309>: DATABASE ENTRY DATE: 2001-12-06
gtctaacattctcaagggcgagtccttagaatcagcaatgaaagaattggatgcaaaaatgactctgctccaagaaaaagaatctgaaatcgaagcacttcaggataaggtcaggtctttggaggatgaagtagccaagcagaaagaagattttcatactgctgataaggaagctgatgaattaaggttggagatagaagaccttaggttgaagctcgaagcggcggaagaagaccttaacaatgacaagattgccagttcagaaatggaaaccctgattgaacagaagaacatgctagccaaggaacttgaagctagcaaagctgaagttgagaagattaagaaggccatggagggtcaagcctctgctttgcacgaaatgtcagctcaactgagagtggcgcaggagaagtacctagataaacaagaggagattgatcgtgctcgtgcacaggtagaggagctcaatgtaagtctgcagaatacaaaggagagctatgaggtaatgcttgacgaagcaaactatgaaaaagtttgcctcaagaagtcagttgagagaatggaagcagaaaccaagagtgcgtctgaggaatggcagtccaaagagctaagttttgttaactcaattaaaaaatcagaagaagaaatcatcaacgccagagctcagatggacaagaccttggaggctgtaaaaggcaaagaaagtgaaaatgctgagttacaggagaagttgaagcatcttgaagctcagctaatggaagctaacaaaacatgcgaggaagccaaggccgagaccttccagtggaaggaaaagctactagacaaagaaaatgagttgcagaacataaaacaagagaacgatgatttgcaagcaaaggaacttgttgcttctgagaagataaaggagctctccgtgcttgcaaatgcaaaagatggagctacaaatggtagtcacaaggaagaaagtaatgtcaagggggacagcgaggatgatgaaccggtaatggtagttgcaaagatgtgggagaacagcaaggttactgatgatgcctcatctaaggagaagggaaacgatggtgaatcagaagttgatttagagtccaacacgggagattccattgttgatggcaatggtttgcactccacgacggcgagcaatggcaacgcatcaccgcccaagcagcagccgcaaaagaagaagcccttgctgaagaaatttggtggtctgctgaagaagaaaacccaaccttagcataaattctgatgacatttctttgttttgtgctatatggcatctctttctttgactggtcatctagcttctgggtattgcctcatcatggtaaaaaaaaatgttgggtgttttaagagaatacaaatggtcgattgtatttacaaccgtttgtttattccttgtgcatgtttgatcgtcattcatattctagttattgtatttattgttattgatgtataatatgccttgataatgttgctgtaaaaggagcagaaattttcaatttgattggtacagattcatttgagaacat

SEQ ID NO: 1684 - DNA, 2272 bp, Oryza sativa
  ref <308>: DATABASE ACCESSION NUMBER: AK059703
  ref <309>: DATABASE ENTRY DATE: 2001-12-06
atggggctcgaggaaggcggcgcgatgagggcgctgatgcggcggaagcaggtggactccgaccgggtccgcgccgccggcggccaccagctcgccaaggagctctccgttacgcagctcgtcgcgattggtgttggttcaacaattggagctggagtatatgttcttgtgggaacagttgctcgggagcatgctgggccggcattgacactttcatttctgatagctggagtggcagctgcactctcagctttctgttatgcagagcttgctagtcgctgcccttctgcaggaagtgcctaccattattcgtacatctgcgttggcgaaggagttgcatggctgattggttgggcattgatactggaatacaccatcggcggatcagctgttgcccgtggcatttctcccaatctggctttattttttggaggacaggatagtctaccatggtttttagcacgccatgagcttccatggtttgatgttgttgtcgatccttgtgcggctttcctggttctcgttgtcaccgccttgctatgcaaggggataaaagagagctcatttgtacaaggagttgtgacagtcctaaattgcttcgtgatgctatttgttattatagccggcagttacattggcttccaaacaggatgggtcggctataaggtggctggcgggtttttcccttatggggcgaacggaatgcttgctgggtcagcaactgttttctttgcctacataggctttgattcagttgctagcactgccgaggaggtgaaaaatccccaacgagatctgccactgggaataggaacagcattgtcagtttgctgttccttatacatgttggtttcagttgttatcgttggtctggtaccatatttcgctatggacccagatacccctatatcatcagcctttgcaagacatgggatgcactgggccatgtaccttgttacaactggtgctgttcttgctctttgctcaaccttgatgggatcgattctgccacagccaagaatattgatggccatggcacgcgatgggcttttgccatccttcttctctgatgtcaaccagcggacacaagttcctgtcaagagcacaattgttactggcatatgtgcagcttgtctggccttcttcatggatgtgtcacaactggcaggaatggtcagtgtgggcacactccttgcattcactatagttgctgtgtccatcttgatcctcagatatgctcctccagatgaggtacccctgccatcttctctggaagcgtcattccgtttgagccaagaatatgatgaggaaaaggttaggggtcctcctgtagatgcgaatcatgaacagttgtcatctgtggtagaatcaataaatgacacccttatcgagaagaagcaagacacaagtgtggaggagtcaaagcgtcggaaagcagctgtttgcagcatatcatctgtatgtgtaggggttgtggtcctcacaacttcagcttctttcacattcttgccattccttttgcgatgcttcttctgtgtttttggtggcctactcctcctagccggtctcggtgtcctctgctatatcgaccaagatgacgggaggcactcatttggtcactctggaggattcatctgccccttcgttccgttgttgccggtgatgtgcatcctcgtgaacacatacttgttagtaaacttgggtggagggacatggatgagagttggggtatggctggtaatgggagtattcgtgtacattttctatggccggacccacagctcattgaccgacgtggtgtatgttccggtggcgcaagcggaagagatatacggttcatcatcttcatcaggatttgtggcctaggtaaggagcagagtaccaaagccttgagtgatgaaatgctccaaaatcaattttaccacactttgaacaaacctggctgaaagggactcctgctgctgcgttctgtattgcatgccaggcatatgggtttgaagaattcaattcatatattgatttttaaattgtataaattatagtgtaaggtcatatttcgtataagcacctagttgaatgaatgtgaatattaaatagatatataatgaagataaggtctgtaatatgtgtaaattcactagagtatatcccagcttctgctgggaaaattcatatttccatgtaccttttgcactcgaggtcttcttgagtgggaaatgctgaagaccttggtcagatcctgcaacatgaataaagtcaacacattcccatt

SEQ ID NO: 1685 - DNA, 792 bp, Oryza sativa
  ref <308>: DATABASE ACCESSION NUMBER: AK059704
  ref <309>: DATABASE ENTRY DATE: 2001-12-06
gaaaaagagaaggagatcaagcaggaatacagccaaacatgtgactggatcaagaaacgcttgggtgaaaaggttgctcgagttgatatatcaaaccgtctcagctcatcaccatgtgttctagttgcagctaagtttggttggtctgcgaacatggaaaggttgatgagagcgcaatctatgggtgacatgtcatctctggatttcatgcgttctaggaaagtttttgaaatcaacccagagcatgagatcatcaagggcttgaatgctgcctgcagagccaaccctgatgacccagaagctctaaaggctgtagatatcctgtttgaaacttctatgatctctagtggctttacacctgacaaccctgccgagctaagtgggaagatatatgagatgatgagcacagctatggctagcaagtgggcctcgcacgctcaacccgctgagatgaacctgcagcgagactcacctgtcagctctgagccgattgaagccgaggtgattgagccggagttggtggacgatagccagaagaaataagggaatcgtcgagttttccctcaggttctataaaccttaggttctttttcggatccatttcatacgattatgccgtcctcccagaatattgtagcttaattttgttgccgaaacgctgagattttttttttcagtttggttgagcggccagtgcaatgagctgtgtgttaaaccaataggattgtgttatgttaggaataatggtttctttgctaggaacaattactttgaaacaatcctttgctctcc

SEQ ID NO: 1686 - DNA, 1625 bp, Oryza sativa
  ref <308>: DATABASE ACCESSION NUMBER: AK059705
  ref <309>: DATABASE ENTRY DATE: 2001-12-06
ggatcatgcttggcgttctatcaataccatcacttatatactttgcattgaccatcttttacttacctgaatcgccgaggtggctcgtgagcaaaggaagaatggctgaggccaagcgtgtgttgcaaggcctgcgtggaagagaagatgtttcaggagaaatggcccttctcgttgaaggtctgggggttgggaaagacacaaaaattgaggaatacataattggacctgatgatgagcttgctgatgaagggctggctccagatccagagaagatcaaactgtatggtcctgaagaaggcttatcgtgggttgcccgtcctgttcacgggcaaagtgcacttggaagtgcattaggtctcatctctcgtcatggtagtatggtcagtcagggtaagccccttgtggatcctgttgtcaccctttttggaagtgtccatgagaagatgcctgagataatgggaagcatgcggagcacattgtttcctaactttggcagcatgtttagtgtggcggaacagcagcaagctaaaggtgattgggatgctgagagtcaacgggagggtgaagattatggatcagaccatggtggggatgacattgaagatagcctccaaagcccacttatttctcgtcaagcgacaagcgtggaaggaaaggagatcgctgcacctcatggcagtataatgggtgctgtgggaagaagtagtagtctcatgcagggcggggaggcagtaagcagcatgggcattggtgggggatggcagttggcttggaaatggactgagagagaaggtgcagatggcgaaaaagaaggtttcttctccttgcaacaatccctatcctgatagtagcactagctatcttgattctggtcaatattctggatgtggggaccatggttcatgcctcactgtccacagtcagtgtcatactctacttctgcttctttgtcatggggttcgggcctattccaaacattctctgtgcagagattttcccgaccaccgttcgtggcatctgcatagccatctgtgccctaacattctggatcggtgatatcattgtgacatacaccctccccgtgatgctcaacgccattggactcgctggagtgtttggaatctacgcagtggtctgcatactggctttcctgtttgtcttcatgaaggtgccggagacaaagggcatgcctcttgaagtcatcaccgagttcttctctgtcggagcaaagcaggccaaggaggactagttgctcggatcaagtgatcaatcagattgctggtggtaatcttgttgcttccaaatcgcgctgcgggttaaacctgtgatggatgctttgttaaagaatcttggaagagatcagaatgcagtgagcctaaagagatgatttggctgtacatcatgaggctgaatcctgtcgtagactggattttggagcttaggatatgtagatcatctgttccttttggtttggtcattttccatttgtgtttctttggaattcttctccctgtaactagtggtctatcacagttgtgttactggttttgccttactcttgagtttgttttcttctctcggttgtgagttctgaatattagcatagccgagtactagttctg

SEQ ID NO: 1687 - DNA, 362 bp, Oryza sativa
  ref <308>: DATABASE ACCESSION NUMBER: AK059706
  ref <309>: DATABASE ENTRY DATE: 2001-12-06
gttggctttgagagattttatggtcagaaagatcaactggagctggcactttatattctccgaaactctgtcaggctaaagtcaatgaagataaatccaaagcctataattgctgaatatcttggagaggtgagagaaagtgaaggatttttctttctgggatggctaccaggttgctcttaagtttctctgcaaagaggatcgctataatgttgttgatgttaaggaagttgggcttagtgttattgagagcacaccagatctctagctaaactggtccaatatgtatcaagttcctagcagaaaactcttgccagcaaagaaggcaagaaagaaaatgcatagacccttgaattttattg

SEQ ID NO: 1688 - DNA, 1552 bp, Oryza sativa
  ref <308>: DATABASE ACCESSION NUMBER: AK059707
  ref <309>: DATABASE ENTRY DATE: 2001-12-06
acaacaactgctagcccaaaaaaaggaaagaaaacacttgctgcagaaacttgggaatttcaatggcgggagcaagagccattggttctctcccagtgcctaatgtgcaggagcttgcaaaaacttgcaatggtccagatgaacacatacctgaaagatacatcaggccagaggctagttctgaggaggtcatcagcaactaccatggtgaggcgattccgatcatcgatctcaataagttgctttctccgcaatcatcagaagaatgtgtgaagctgagatctgcctgccagtattgggggttctttcagctcatcaaccatggagtgccagatgaagtgattgcaaacctcaagagagacattgttgatttcttcagccagccactggacgccaagaaggagtacacacagctacccaacagcctcgaaggctatggacaggccctcgttttctccgaggaccagaaacttgactgggcagacatgctgtatcttcaagtccatcctagcgattcaagggacttgaggttctggccgacttcccctgcatctttcaggtgatctacccaaataaaatgtgtaatttagcttttgataggcatctgtctcttcttaactggagatgtctggaaataggcgatcccttgatgcatactcatcagagactaaaagcctggcactctgcttgtttgagttcatggctaaggctgtgggcgctaagccagaggctcttttaggcatatttgaagagcagcctcgaggcttaaggatgacctactacccaccgtgcctgcaatctgacaaggtgatgggcatttcgccgcactctgatgtggttggcctaacactgctgctccaggttaacgacgtgcagggcctgcagatcaagaaagatggcaagtggttatccgtagacgctccgaatggtgcacttattgctaacattggcgacacacttgagatcctgagtaacggaaagttcagaagtgttgaacacagggccgtgataaacccaaataaagagcgaatttcagcagcactcttccactatccaagtgaaaatatggtgatcagccctctgccggagtttgtgaaagatggtaaagtgaagtacagatcaataagttaccttgatttcatgaaacaaatcttcacacaacagcttgatggaaaaaaccgagtggaggtattaaagctggaccagtagctgtgaccatgacgcctgagatactgacatgaacctgcttgggggctgtccatgagatctgctgcttagaggtgaaacaatcctgtattacaatgatgatttacctgatattttgagtcttgtaccatatatcaggaacaacatgttcttgatcaagttatgatgcaaacacctgaaacaaaaaatggaaataaacattgatgccttgaagaataaactatatgataatacaacttcagttcgaacttcgaactaaacatgtagaatttatgcgcgaacagataacgctccatatatcttcccatcacatgtttgattgatataatatataactacattcggc

SEQ ID NO: 1689 - DNA, 2039 bp, Oryza sativa
  ref <308>: DATABASE ACCESSION NUMBER: AK059708
  ref <309>: DATABASE ENTRY DATE: 2001-12-06
ccggaagaggaggttcctcctcggagactcgttccgcagaagggtgttcttcaattacgagaaacggatacggctgctcagccctcctgaaaaggtaattaatttggttcattaagtgtaaaacccgcttaatttgtgttggtcggcttgtggtatcctaattcaggtgtttctgcgagtagatctttgaatatttcgcgtctgtgcggaacccggaaggggaagtattcatgttgcctgctgacttgatgagagcagtagttcctgttttccctccatcggagtcgatcatagttcgggagggaagattaaggggggaacgcaatcctggagagttgcactgtgctccatcggagttcttcatgctgtttgacacaaacggtgataggctcatctcctttgccgagtacatcttttttgtgacattgctcagcatccctgagtcaagtttcagtgcggccttcaaaatgtttgacgttgaccacagcgggtgagttctatttctactatcgcacttgttctagcaacatgtcctgctgtcagaatgatatgcatctgctcggtacctcatattgccctgtttctagtattactagtcttggtctagtaatatgaccctgctgctagaatgatgatatgcatctgccatataactgttctttaattaataaacctgatatgtttgcatgtttaacaacatcaccacatctgttagttaatggtaaaaacaataggttactgtatataccatttttggtggtttagttcagcattccttttcttttcatgtgtacaccttttattactgaagctgctaaaggtatgtttccttttgtgctcttggatttgtgcataaacaaggacacgtttaaatattgcctttgttcgtgctatattgttgtttacctgtgaccattcgcatgcagttaatttctcttctcgtccagaaaagaccagctctttatgagcatctgacttgttagttgatggtaaaagaagggtatgaacaaattttggccagcttattctctgttattttgttgtccttatctgttacttgtcattttcagggagatagacaaagaagagttcaagaaagtaatggcactgatgcgatcctataacagacaaggagccaaccatagagatggcttacgtactggactaaaagttggtcagcctgtggaaaatggtggagtggttgaatacttctttggtaatgatgggaacgaacctctacactatgacaagtttacaaattttttgaaaggattgcatgacgagatcattcgtctggaattcagtcactatgacgtcaagtcatctaatactatcccagcaaaggatttcgcattatccatggttgcttctgctgacatgaatcacatcaacaagctacttgatagagttgataatttaggcaatgatcctgatctcaaaggagtgcgcatcaccttcgaggagtttaaatcctttgctgatttgcgacgaagattggagccactggcgatggctatctttacttatgggaaagtaaatgggctgttgacaaagcaggatctcaagcgtgcagcgcaccatgtttgtggtgttgacttaactgacagagtagttgacatcattttccatgtgtttgatacaaatcatgatgggaacttgagctcggaggaatttgtgagagcattacaaagacgagaaactgatgttcgtcagccagcgacaccaggctctatggggctgttgtcttactggctaaacttcaacaagtgttcttcgcttacacagatgctgctcaagtagattgttttgatccttgctagattcttcttggttggatttccgtcacggagatgccgaagcgattttgctgtaaatatcgtgtgggttgtcaaagggtgccctgtcacatagcagctgtaaatattttatagcgcctttcttgcaggggtagattaatcattcttgtaaattaaggcctatgcaaaatgtaactgatactctgataagacttttgaaaggttaaaaccaactttatcgcc

SEQ ID NO: 1690 - DNA, 1803 bp, Oryza sativa
  ref <308>: DATABASE ACCESSION NUMBER: AK104095
  ref <309>: DATABASE ENTRY DATE: 2002-08-28
acttgtcggatctctctctctctctctctctccctctctctctcgcccatgtaccatctccatggacgacctcgccgccgcctcccctcctcacccgccgccgccgccgccggaatcccacgtgcctccgcccccgcagacgccggagaaggattcatgtgaggatacaggagacatgaggatcagtgaagaaaagccatgcacagatcaggagttagatgctgatcagatgaatagttctagctttaatagttccagcgagtgtgagaatcaaacacctagcaatgatgaaatgactggatcagagtccaaatctgaggcagctcaaacagagggtggtggatcgagtgaagagaaggtcctgaagaagccagacaagatcctgccttgtcctcgttgcaacagcatggatacaaagttctgctactacaacaactacaacattaaccagccaagacatttttgcaagagttgtcagagatattggacggcaggtggaagcatgaggaacctccctgttggtgctggtaggcgcaagagtaagagctccactgcaaattaccgcagtatattaatcacgggcagcaatctagctgctcctgctggagatgctcccctctatcaactctctataaaaggagatcaaacagcaacggcagttaaatttgcacctgattccccactctgtaattccatggcctctgtgctgaaaattggagagcagagtaagaatgccaagcctacctcaacagcacaacccagaaatggagaaacccagacctgcccggcttcaggaacaacttcagatagtccccggaatgaaccagttaatggagcagttagtgggcatcaaaatggaattgttgggcatagtggagtccctcccatgcatcccataccatgcttccctggtcctccttttgtgtacccatggagtccagcatggaatggcattcctgccatggcaccaccggtatgcacagcaccagctgaaccagcaaattcttcagacaatggaagcacagctagtgttcagtggagcatgccaccagtgatgccggtaccaggatactttccggtaattccatcttcagtttggcccttcatttctccctggccaaatggtgcatggagctcgccatggattcaacctaattgcagcgtgtcagcttcatctcctacaagcactagtacatgttcagacaacggctctcctgtcctaggaaagcactccagggactccaaaccgcaaggagatgacaaggcagagaaaaacttgtggattccgaaaacgcttcggatcgatgatcctgacgaagctgcaaagagctcaatctggacaacccttggcattgaacctggtgaccgtagcatgttcagatcattccagtcgaaacctgaaagcagggagcagatatccggtgctgcacgagtcctgcaggcgaatccagcagctctatctcgatctcaatctttccaggagacaacgtgatgtatattgaagaaatcgtgtgacaattgtagaacatgttactactataatttaagcaagtgctacagcctgaaggatgattggcgatgtaggcgctgctgcaaacatggaggcagcgtgatctgtactattgaaacctgaagagtactattcttgacatttttctataatttgcctgtggagcatgcaccagtctactgggttcatgatcaggctgtcagcatatgttttgttgtacaataataataattgttaatagctttgcctaaaggatactgatagtattctgctgatccttcagctctgtgatc

SEQ ID NO: 1691 - DNA, 329 bp, Oryza sativa
  ref <308>: DATABASE ACCESSION NUMBER: AK059709
  ref <309>: DATABASE ENTRY DATE: 2001-12-06
gagagatgctgctttggcctgagcacggcacaaggtctggtaaagtttgagtgtgagaacagcacaagtaaacagaggtgggtcgatgatgtgaagaatctgcttcggcaggtcgctgcagaagagcaagtggaaaataagttgggatcagtgaagctcagttgatgtagttcatacatgtgtacactattttcatgttggcaggtggtataccatagaaggtgccttattgatgccaggcgtatatattgttgtactcttaaattgtcaggtagttttgtactgtacacacaaaatgataagatacataatagatcatatgttagtcc

SEQ ID NO: 1692 - DNA, 1460 bp, Oryza sativa
  ref <308>: DATABASE ACCESSION NUMBER: AK059710
  ref <309>: DATABASE ENTRY DATE: 2001-12-06
agttttcctcacactaaagctcgagaatgatgccactgcccctgaagcatctcaagttctactcgcattcacacccacagaggttgaacatcttgcgattgtcaaggcgaccagagcggaggggaagcgcaagaagaagatatatgtgcctctctctgtgaaagcctctgatcttgctgccgctccaaatggtgctcgcctgtactccattttgctgagcactccattgaaacctgctgaggtgacgacgctggaagtattttatgctttgacacactctttggagcccttcccagcagagatcacccagtcagatccccagctggtttactaccgtgacagtgctgtgcttctatctccgtaccatgttctggagcaggttacctacatcaaaatgccgagcaatagggtggagtcctttacaagggtggaccccaccagtcgagctggtaatgaagtgaaatacggcgcatacaacaaccagcttccaaactcgtatgtgcccatacttgtgcattatgaaaataatcgtccgtttgctgttgttgaggaatttgtgcgcaaggtggagatttctcattgggggaatgtccaaatcactgagcagtataagctgaaacatggtggtgctcagcacaaaggagtcttttcaaggcttgagtatcaatccaggccttctataagtggagtgtcatcatttaagaatcttcttgcaaggttgcctcctcgagttcattcagtatactatcgtgatgagatcggcaacatatcttcatcccatttgcgtagtgattcgcacaagtcagaacttgaaattgagcccagatatccattatttggtggttggcactgcacgttcaccattggctatggtttgccattgcaagattttctctttgaatcagatgatggtcgacgctacataaatcttacttttggatgccctctgttggatacggaggtagatgatcttaccatcaaagtcgtgcttcctgagggatcgacaagtccacaagctgtagttcctttcctgatggaacaatatcttgagactagttattcataccttgatgttgttggaaggacgacagttgtactaaagaagagaaacgtagttggagagcacaatgttcctttccaggtgtattacgaattcaatccgatcttcatgctcgcagaaccgttgatgctgatatcagccgtgttcctgttctttgtagcctgcattgcttatcttcacatggatctttccattgggaaatcataggctccttgaaatatttagaggcgctctccgcacttgcccttctaattatcacagttgaatcaaggctgccttttgtgttagtttgtacggttcccgtgggggagaagatggtctttttgtagaacgttgtcgttgtaggaatgggatgatgaggatgactttatataagtatccatacttgattgatctgctc

SEQ ID NO: 1693 - DNA, 1270 bp, Oryza sativa
  ref <308>: DATABASE ACCESSION NUMBER: AK059711
  ref <309>: DATABASE ENTRY DATE: 2001-12-06
gcacgcgccgccgcagcctctctctctctctccgccgctccggctttctcctcctcttgctgctccgattgctccatggcgggcggcgacagcgcggcggtgtcggcggtggaggggaggctgtcggagctctccaccaacagcgacgagaaggggctccccaggaggggcaagtctttatcaggaaggacattaaacaccgcacagattcaactcgttgcaagccatccagaggtgtatgaaccatgtgatgattcctttgcacttgtcgatgcgcttctttctgacaaagcacaacttttgacgctaaagccaagattatgcatggagataggatgtggcagtggctatgttatcacatctctagcaatcatgctcaggcagttaggctcaggaacccagtacctcgctactgatatcaatcaacatgctgtggagacaactcaagcgacccttgaagcccatggcgtccatgcagacgtgattgctactgatattgtgtcaggtcttgagaaacgcctgcatggtttggttgacgttgttgttgtgaaccctccttatgtaccaacacctgaggaagaaatcgagtccaatggcatcgcttcatcttgggctggaggtataaacgggcgccaagtgattgatcggatccttcctgctgtgcgtgagctgctatctgaaagagggtggctgtatatgattgctcttgaagataacgatcctctggatatctgtcatttgatgaatgagaagggctatgcatcacgcgttctcttgaagagatgcactgaagaagaaagcctttatgttctaaagttttggcaggacgcttccactggcacaaacgcttctcatgccgctagatcaccacgctctgaatcctcatggctttctcagctgcctttcagatccctttggcataagaatgcatagtagctgttagccttgtcgatttatctccagttccaaaagatagcaacaagtactttgcaaccttcagatggcagaagtatctgtaaacatgtctgaaatgagatgctgctgttggtctctgactcccttcaaaagagtaaaagaatcagaaatcagactgacttggtggacttagctatgaatggtcctatgagcaattagcaataaagttccaacccttttattttgggtgttcttctattttggtgtgtatatgtgctagtctggattccttatctcactgcacttgtaatatgggtcctgttattatcgaatggattagtaaaccatatcagcg

SEQ ID NO: 1694 - DNA, 1876 bp, Oryza sativa
  ref <308>: DATABASE ACCESSION NUMBER: AK059712
  ref <309>: DATABASE ENTRY DATE: 2001-12-06
aaatccgcctcctcctcctcctccctcctctctacccacccaccctctcgccgtcgcagatccgatccaggaagagctcgccgccgccgctgccatggcgctctccgtggagaagacctcgtcggggagggagtacaaggtgaaggacctctcccaggcggacttcggccgcctcgagatcgagctcgccgaggtcgagatgccggggctcatggcgtgccgcgccgagttcggcccctcccagccgttcaagggcgcccggatctccgggtccctccacatgaccatccagaccgccgtcctcatcgagaccctcaccgcccttggcgccgaggtccgctggtgctcctgcaacatcttctccacgcaggaccacgccgccgccgccatcgccagggactccgccgccgtgttcgcctggaagggggagaccctcgaggagtactggtggtgcaccgagcgctgcctcgactggggcgtcggcggcggccccgacctcatcgtcgacgacggcggcgacgccacgctgctcatccacgagggcgtcaaggccgagggggagttcgagaagtcaggcaaggtccccgacccggagtccaccgacaacgccgagttcaagatcgtgctcaccatcatccgcgacggcctcaagtccgaccccagcaagtaccgcaagatgaggagaggctcgtcggagtctccgaggagaccaccaccggtgtcaagaggctctaccagatgcaggagaccggcgccctcctcttccccgccatcaacgtcaacgactccgtcaccaagagcaagtttgacaacctgtatggttgccgccactctctccctgatggtctcatgagggctaccgatgttatgatcgctggcaaggttgccgtggtctgcggttatggtgatgttggcaagggctgtgctgctgctctcaagcaggctggtgcccgtgtcattgttactgaggttgaccccatctgtgccctccaggcccttatggagggtctccaggtcctcaccttggaggatgttgtctcggaggctgacatctttgtgaccaccactggcaacaaggacatcataatggttgaccacatgaggaagatgaagaacaatgccatcgtttgcaacattggtcactttgacaatgagattgacatgctcggccttgagacctaccctggtgtcaagcgcatcaccatcaagcctcagaccgaccgctgggtcttccctgagaccaacactggcatcattgtccttgctgagggtcgtctcatgaaccttgggtgcgctactggccaccccagttttgtcatgtcctgctcattcactaaccaggtcattgctcagcttgagctgtggaaggagaagagcactggcaagtacgagaagaaggtgtacgttcttcccaagcacctcgacgagaaggtggccgccctccacttgggcaagcttggtgccaggctgaccaagctctccaagtcgcaggctgactacatcagcgttccagttgagggtccctacaagcccgcgcactaccggtactaggctgcccagcacgactagcggctgtggcatgagaagtgtcaacttgaagttcgccatgacgactctggagtatcctgctttgttttcatcatcttatatgccgtcacttaggaggatttgttgtggggtttatggtttgagactggtgaaggggaggaatgggaagccgtttgcttttgcccagaaataatggcgtaattgggtggagttggggaggtgtgctttggcagatacagttttgtcttgttgactctacttatctgatatcatttgcaagcgttttgataaaaatcatgcgtcatttatgaataatattcttgccttt

SEQ ID NO: 1695 - DNA, 1187 bp, Oryza sativa
  ref <308>: DATABASE ACCESSION NUMBER: AK059713
  ref <309>: DATABASE ENTRY DATE: 2001-12-06
aaaattacaaatatgcaccctctcctgatcagtgggaaagatcaaccatagtctctggaattttgaaggtgctttatgatgcaactatggtggtgtctggatctttatatccaacatcaaacctttatttccatgagatgtggaaaatcaaattggtcttggacaaggaacactctaacaatgacactgaagtggcaagtatggttcaaaagatgaaggacaaatttgacaagtattggcttaagtcttacaaatatctgtgcattcctgtcatttttgacccaagattcaaattcaattttgtggaatttcggcttgggcaagcctttggtgaaaatgctaaagagaggattgacaaagttaagaagagaatgaacatgttgtttaaggagtactctgataaactcaaggatagcaatgctaacccactgcgccaagctgaacatgtgatggctatctctgaaaatgatcctatggctgattgggttcagcacatctctgaacaatgaagtgagcaagttgatactgaattggatatctacctcaaagagaatcctattcaggaatttgggaacaaatttgacattctaaattggtggaagaccaatcactcaaagtatccaactctcgcttgcatagcacaggatgtgctagcatggcctgcttcaacagttgcatctgagtccgcattcagcacaggatctagagtgatcagcgatttcagatgtagccctacgatggattcagttgaggcgcttatctgcctccaagattggtttcgagcttctgccggtcctaacataaatgtgagctcagtaaatgaaatcaactacagtgataattttgtgaacctggacctggaggattccatggatggacaggatggtggaagcttgtgaatgcccaaacaaaggatctggatattgatgaatctggacctgggtgattcaacgaacagtgcaagctagggaatgccaaatgatgcccactttgatcttggaaggctgcattttgtttgatctcaatataatgaaccggatatttgggttgttcaaatcgatttttgtgaatgatatgagtacatgcatgtacttagttttaattgaactgggtgccagtacccagtgattgatgtttgtacttttgaatgcaaaagattaagtcatttcggaatgtttgcattgggt

SEQ ID NO: 1696 - DNA, 773 bp, Oryza sativa
  ref <308>: DATABASE ACCESSION NUMBER: AK059714
  ref <309>: DATABASE ENTRY DATE: 2001-12-06
atcgatcaccggcgacgagagacactctcactgaacgaagctacctagcttaattacctagctactcgatcgatcatcagtctagatatggcggctttgaacggtaaggtggtggtggcggtgatggtggtggcgatggtggtggcggcgccgggggcgtcggcggcgatcacgtgcgggcaggtggggtcggcgatcgcgccgtgcatctcgtacgtgacggggaggggcggcctcacccagggatgctgcaacggcgtcaaggggctgaacaacgccgcccgcaccaccgccgaccgccaggccgcctgccggtgcctcaagaccctcgccggcaccatcaagtctctcaacctcggcgccgccgccggcatccccggcaagtgcggcgtcaacgtcggcttccccatcagcctctccactgactgcagcaaggtcagctagatcgattaatcctgcttggaccgaccgatcgatatatcgatcgatgctggctcgcagttgatcaactagccaaaataatagctacagtaaaaataacagctggggcatatcaatgcagcgctggtcatctctctctctatctctgtatactttatgttgcacgctccgtgcgtgcatgctatcttaattttcttgactctgtacaccgctctgtgtacgtgtaatcctacgttgatgaattgcatcttgtccagacttggacctagctaactacgtactccagcttggcagcttcttgccgaggcaatctgtagtaatttccttgttac

SEQ ID NO: 1697 - DNA, 1083 bp, Oryza sativa
  ref <308>: DATABASE ACCESSION NUMBER: AK059715
  ref <309>: DATABASE ENTRY DATE: 2001-12-06
aataatctacttcccccgtttcacaatgtaagactttctaacattgcccatattcatttagatgttaatgaatctaggcatatgtatttgtttagattcattaacatctatatatatgtgaagaatgctagaaagtcttacattgtgaaatggagggagtagtggacagtggcaagaacaagtgatctagaacagtaacattgtatataatggacaatatagttaagctgttatatatttctatatattgacatttggcataatgctgcatttagctgtttggtttggtacccatgagagccaaactttgccttaccagcagatttggctaccattcttcgccttctatgccaaagctttcgtatggcagtgttttccttcgcctatctagttcacttttcaagtcaaatttggccacatattgagcaaccagattagctagccaccttgacttggtaaaggccatttggacactgctaaaatctgtaatactgctcagtctagccacttgggttttctccacaacattgtcactgctattctctcgaatacgcaacagagttgcgtatcattgcatatttgcattaatttgagagagggtgtccaaaacatgccaaaacagcaagtacaaacagcacactactgttcttcagtcatctttctgctgtttgcatgtgcacaagtgaaatttatttatccagaatgaaaatgacttaacttatcaggatggttttctctgcaggtttagggggcacctgaacctggctggaagcatttactcaaaacaactcaacaccatcacagagagacgagaggaaaagcttgtgaagaagtaactcaaactccctttgcttggagcctctgcgaaagatttggcttaatttctcccccaacaagatgtagttgccgatttagaccatgggccctcgtgaagctcaactgtacataggagagcgacccacccccttcggcaaaacatttatgttttcgaaattgaattttagagaaaagaacaagtggatttaaaaaatttcagtgtctttccagctgttaattctttctgaagagaagtggtcgatatcg

SEQ ID NO: 1698 - DNA, 1303 bp, Oryza sativa
  ref <308>: DATABASE ACCESSION NUMBER: AK059716
  ref <309>: DATABASE ENTRY DATE: 2001-12-06
ttcttttgacatttattctgttaagaggattatgccagattgacaatgttttaatcttgttaaccttctgcataacttgttaaggtggcaaaagacataaaatttgtctctttcccttttatgttctggcatttctcttggaatctcatagaatccttttactttttaagattggagtcctctctctgtgcgccctgtttcttaggaacgggctcttttttgggctggataattttcctttggtgataggcagtactgttattttgtgtagtagtcccaagtttgttggtatttttgtcagtatatgatgggagcttaactattacagttctccagcttcttgtactccagtcattactcgctacctgcgtgcctgcaggccacattctgtgtgccatgtttctgattaagatgactttgacaggtgttccttggactgaagaagaacaccggaggtttttgcttggattgcaaaagcttggcaaaggtgattggcgaggaatctctcgtaatttcgtggtctcaagaacacctactcaagtagccagtcatgctcagaaatattttatacgccaatccaatatgaccagaaggaaaagaaggtctagcctttttgacatggtgccagatgagtctatggaccttccaccacttcctggaggtcaagaaccagagacccaagtattaaatcaaccagcactacctccaccgagggaggaggaggaggtagattctatggagtcagatacttctgccgttgcagagagctcttccgcttctgctatcatgccagataatttgcagtcgacctatccagtgattgttccagcttatttctcgccctttttgcaattctcggttcctttctggcaaaatcagaaagatgaagatggtcctgtgcaagaaacacatgagattgtcaagcctgttccagttcattcaaagagcccaatcaacgttgatgagcttgttggcatgtcgaagctcagcataggagagtccaatcaagagacagtgtctacttctctttcattaaatctggtaggaggtcaaaatagacaatcagctttccatgcaaatccaccaacaagggcacaggcatgatctccttctgcacacaactgcatttagatgaatcccaggcaaaataagctttgcctccttgtttttttgtttttattttaagattaaccgttctccgtagtctgtatcatgtgctgtaagttatgctatgtatgaatgtatctgttgtttgtctggcacacatgataaatcactctatgttaacaaaatcagtaatggt

SEQ ID NO: 1699 - DNA, 1555 bp, Oryza sativa
  ref <308>: DATABASE ACCESSION NUMBER: AK059717
  ref <309>: DATABASE ENTRY DATE: 2001-12-06
gacatgtctgtgaagatgcggactacctgcacctggacagaaagaccctatgaagctttactgttccctgggattggctttgggcctttcctgcgcagcttaggtgggaggcgaagaaggcccccttccgggggggcccgagccatcagtgagataccactctggaagagctcggattctaaccttgtgtcagacccgcgggccaagggacagtctcaggtagacagtttctatggggcgtaggcctcccaaaaggtaacggaggcgtgcaaaggtttcctcgggccagacggacattggtcctcgagtgcaaaggcagaagggagcttgactgcaagactcacccgtcgagcagagacgaaagtcggccttagtgatccgacggtgccgagtggaagggccgtcgctcaacggataaaagttactctagggataacaggctgatcttccccaagagtccacatcgacgggaaggtttggcacctcgatgtcggctcttcgccacctggagctgtaggtggttccaagggttgggctgttcgcccattaatgcggtacgtgagctgggttcagaacgtcgtgagacagtccggtccatatccggtgtgggcgttagagcattgagaggacctttccctagtacgagaggaccgggaaggacgcacctctggtgtaccagttatcgtgcctacggtaaacgctgggtagccaagtgcggagaggataactgctgaaagcatataagtagtaagcccaccccaagatgagtgctctctgctttgacgcacatatttttgatgaataacattcattatatcgtgaaatctgtccgcagatcagaagccaaagatttattgggggatgactggattcaaaggcatcgaagaattgtacaacaaaatgcaaatcattatagaaggattgcttggtcaaaggtcttgcaatgcctctctggtcaaggtttgacttcatcaggaggtagtggtcaagtaggaagtgagggaggcaatagcagtggagcttcaagagctgcggtcaaagagagattcaggtctttcaatgtgctatttgaggagatttatcaaaagcagtgtggctggtctgttccagatacggagttgcgtgagtcactaagacttgcagttgctgaaatcctgttgcctgcatacagatctttcctaaagcgctttgggcctctcatcgagaacagcaaggcacccggaaaatatgtcaagcacacaccagagcaagttgagctactgcttgccaatttgtttgaaggaaaacaagagcgtacttgattggggtatgtggctgcttaatatacaccagcgacgatgtgatgtcattctctgtaaattgggaccctggtagcattgcttttgtttgtgtagcgctgctgctcagaaccgttgctatgtgcacctttccttgctggggtgcatgatttgtatagatactgtcctagttgccatttattgtttttgttgatttggtaggtgctaggttcgttctgatatgttggaaactcgtgttagtgcattcattattcagt

SEQ ID NO: 1700 - DNA, 1135 bp, Oryza sativa
  ref <308>: DATABASE ACCESSION NUMBER: AK059718
  ref <309>: DATABASE ENTRY DATE: 2001-12-06
aaccagcatgtggaccagtgtcccgtacaatcccccgtcgacgttcgacatgctcgccatggaccatgccaagaaggttgagattatggacgatctcagggcgttccagaaggggaaggaataccactccaaggtcggcaaggcgtggaagcggggctaccttctgtatgggccaccgggcactggcaagaccactatgattggggctatggccaatttcctcgactacgacgtctacgacctcgacctaacatctgtcaaggataacgccgagctgcggaagctcttcctcgatacgacggacaaatccatcatcgttatcgaggacatcgacgccatcgaggtcgagctcactaccaagcgcaagggcaagaagatggacaacagcgacgaagtcgacaacaaccatgtgctggtcgagctttccaacaagactgatgataaaagcaaagtgacgctgtcaggcctactcagcttcgtcgatgggctgtggtcggcgtgcggcagcgagagggtgttcgtgttcacaacgaaccacgttgacaggctcgacccggcgctgattcggccggggaggatggacaagcacatcgagatgtcctactgccgcctcgatgcctttaaggtgctggccaagagctacctggacatcaccgagcactcgctttttggtgaaatcgggagactgctcgacgagaccgacacgactccggcagatgttgccgataacctcatgccgcggggtaagaggaacggtgaaatcagtcgactgatcgatgagatcgacgcaccggcagacgtggccggtaatcacatgctacggtgcaagaggaagagagacgcggacgagtgcctggcaggtttagtggaaacactgaagaaggccaagatggaatcagcaacacctcctatggacacaatcgaggaagaggccaacaaagaggaacaaacctaacacagaagaaagctagacaggggctgatacatgatgagggctgctacttcttggcctcctcggtttgcgtgtcctattttacctgacttccgtgtaatggtgcgtacgggtttattagtcacttaagctagcataagccataccataaaatggcaaaatatataaaaatagtggtgtatt

SEQ ID NO: 1701 - DNA, 859 bp, Oryza sativa
  ref <308>: DATABASE ACCESSION NUMBER: AK059719
  ref <309>: DATABASE ENTRY DATE: 2001-12-06
gtagaacgggcgtggggttcaagtgcctctccccaacaggagtacctcgtcggcgacctgcggcggcggcgatgtcggcggcggcggtggaggccaccgagcggggcgagccctcgggcggaggcggagaggtcgcgtacgtcagctacggcggggagcaccacctcccgctggtgatgtcgctggtggacgaggagctcagcgagccctactccatcttcacctaccgctacttcgtctacctctggccccagctcaccttcctcgcgttcgatcccaaggatggcaagtgcgtggggacggtggtgtgcaagatgggggagcacaggggggccttcagggggtacatcgccatgctcgtcgtgctcaagccctaccgcggcaggggaatcgccaccgaattggttacgagatctattcgggtaatgatggaatctggctgtgaggaggtgacacttgaagcagaagttacgaacaagggcgccctcgccttatatggtcgtttgggtttcatccgagcaaagaggctgtacagatactatctgaatggcgtcgacgcatttcgcctgaagctgctatttcctcgccctgatcctggtatgcatccaatgatgatgctaggcaatgagagagatgaccagcacatggattctccttacttgtgataccattctggtcgattgataggatgagttaggatccaaggcattttgctcttttatgtcagtttgatgatgcttttgtagctttgctgtaactcttgtaacattgatgtgttcaaagatagtatcttatttgacatggcattatgtttctttcaatccatgttagacggttgaaaaagaatgccttattacat

SEQ ID NO: 1702 - DNA, 1643 bp, Oryza sativa
  ref <308>: DATABASE ACCESSION NUMBER: AK059720
  ref <309>: DATABASE ENTRY DATE: 2001-12-06
agccacacctcctcctctttcccctctcctccctctccactccacacgccgtactcgcctccgtcttcccccccgatctgcgggcgcgcgagctcggagcgtccttccccgcgcgcgccgccgccaccgccgagagagtggcctcctcctcctcctcccttccttcccgcgtggcctgggcctgcggttaccccgcgcgcacggccgacgacgactgcgacggcgacgaaggcgagctggtttcggaggggggcgcgacgcggccgacctgctcccccatctggttcgaatcgaaaggtggatgccaatcggttggtcggttaaaaacaactaatttagctgatcctgtggggaagaagtaatggtactgccaggctctaaggagtctcaaaattatgatagcaacaaccagaaggttcatcctcaaccaattgacgaaaacatgaatcagaacttgctgaagacatatgaggtcatggtaaagaagttccagtcccaaatccagactagagatactgagataacacatttacagcagcaaatcgatgaggctaaacttcggaaatcaaagcttgagaagaaactgaaacaaaggggcttactcaacaaggaatctgaggaatctgatgatgaagacaactacttttccatcgagttgacaccaagtttatttacatctgctgttgataatgcataccaatctatacatgatttttcaaagcctttgatcaacatgatgaaagctgcagggtgggatcttgatgctgctgctaatgcaattgaacctgctgtggtttacacaaggagggctcacaaaaagtatgctttcgagtcatatatttgccaaagaatgtttggtggtttccaagaagagagcttttctgttaaggctgctaacattactgtttccaatgaggctttcttccatcagttccttgcagtacgagccgtggatcctttggatgtcttgagccaaaatcctgattcggtttttgggaagttttgcagaagcaagtacctattacttgtgcacccaaaaatggaaggctctttctttggtaacatggatcagagaaactatgtaatgagcggtggccatccgaggacacctttctatcaagcatttctgaagttagcgaagtcgatatggttactgcacaggctggcatactcctttgatccaaaagtcaaggtctttcaagtgaagaaggggagtgacttctccgaaattcacatggaaagtgttgtcaagaacatcatcctggatgaaggtgcagagaggcctaaagttggcctaatggtgatgcctgggttcttgattgggactagtgtcatacaatctcgggtgtatctttcaggtgtcaagtctgctgattgaagctgatgcagttactcgagaagatcaaggctactttgcatcttgcctgatcaaccaatcacattagtacaaggacgattaagggtcttgtgtgtgatgctgctgtcatctctgaaagatgctatagtcagagtgtcggtgaaaaatattgtctttttaaaatttcgagtgccatgctgtttgtatgtttcttcagatagatttcttctgtaatgtaactgtcaaatgtttgtctatatatatgtttatgtgtgttttgactggc

SEQ ID NO: 1703 - DNA, 1334 bp, Oryza sativa
  ref <308>: DATABASE ACCESSION NUMBER: AK059721
  ref <309>: DATABASE ENTRY DATE: 2001-12-06
acaaagtaaatccttagctgtgaagtcatggatatttgcatccagtaacatgacctaatggaggaatactttagaaaaggtccaacatatgcattaaaattccaacataacttgcatacagtgacaactaggaaaaactcctccagattacacctctaccaggtgctctttttcttcatatcaggagaaaaaaaacatgaacaaagaagaatttggaatattatttgcactgttatataatatattttctgcatgatatggcattataaatgattttgttttttttcgaggaaacgattgcaattttttgaagatgtaaaaaaccaatttatacataactattttttaggtctctaatttttctttttattaggaatacaaatttaacctgattggtttgaaggaccactagcttatattgtacaatattgcactcaatgtaatctcatccgctttaattgcttttgctcctgatctacactgtgagatagcattaacttgtctaatttctatgcagttcttctacatagtaatataatttgtattgaaatacagttgtaatttctggagaatgattatgcttgtcactaaacatttaattgaatattttgcggaactgtaacattaggaaatatagccctctgtcattaggagaaatacagtgaccaacaaatgatacaggcagtagtcatttttgtttccttactgctattgtttactgtctctgcttacatatctccatgtgcaataccagtattttatccccttggatcctattttatttttctgaccttctctctaatggttgcaggtttgtttattctgggagctgtactgcacttactcgtcccgccaaaagaaaaaaatataagaaaaagaggaaaagaaaaggaaatattctcttcaacttcaagctacagattggttgagagtagtgtgtaggggtttcctcaactgaaaagacaaaaagaaagtgctaacaatgtggcttgcgtttgctgttatatttggtgcttcacgcaaccttctgcttgatgctatatttcctttcaagagatactgtggatattttgatgttgcacttcctcatatttcagtcatggaagtgcttcaagttgttagatcatcatgggaaatttctgaggatacactaattgtatttcacttgtgtagaagatcaccccagctgtgttttacacttttactccaggtcacacatgaagaaagctgaatacagttcgtgtaacatgtagctgaagtagcaggcacagaatgcttgtagtctaattgtgtgaaacagatgcttttattgaagaagttatcagatactaaac

SEQ ID NO: 1704 - DNA, 1476 bp, Oryza sativa
  ref <308>: DATABASE ACCESSION NUMBER: AK059722
  ref <309>: DATABASE ENTRY DATE: 2001-12-06
gcatggccgttcttagttggtggagcgatttgtctggttaattccgttaacgaacgagacctcagcctgctaactagctatgcggagccatccctccgcagctagcttcttaaaggaagctataaatgtcaaagtttctgatatttgtgaccttaatccccatgaggccttgggcaatagctatgttgtcaatataatcatcagggacttggttcctgctgagccttggtggtatatagcatgcagcacctataagagaggcacagctagagaaggaaacgcatataaatgcccgagatgcagcactgatgcaatagaaacaaggtacagagtagttatcatgggtatcgatccatcggatttggcaaacgatcaagccaaagctgctgagtttaccttctttggagaaatcggtgaacaattgattggcaggcctgttcttaacctggttgcatctgttcatggagcacgagatatagtaccaccagagatcaaagcaatttttggcagacaatatgtcattagaactagtgtgtcacgtggctcattgcaaagaaatcgggtatcctaccaggtggattcccttatgctaccccacccagatccaagccatgcaatttgtctacccagccatgatacttgcatgggctcttctggacatggctcaacatcagctaatgcagttgaaccacatgccatcgttttgtcttctactcaatctatgccaccttctacgccgtttgtgcttccagatacaaaggacacaagggacagccatggtgatcagcatgaggcaacaccacctactccacaggctagcaatatattttatactcacatcaattatatgcatatgtctttgtcagaccttcctaaccattaatactttatcaggtcatagctatagcacatctagataaaaaacgtaaatcttctatggctgatgagaatcttggccatggagggttagtgccaatggaaaatttcatgttttactttgatttcttctctttttcctcatgactcaaacaacttccatttgtagctcatctcctgatgaacatgatcgtcgcaagccttctgttgtgcacacactgttcgtagacaagctgccaccagagctgccaaaatgacttgagcctcccatgtgatatccccagagcgaagtgaccttttgcacctggcatggcaacgcgcatacttctctccctgattgaagcaaagctaaaatactttggtcaatctattttgcagtgccaacatagaaaagagaaatgttcttttgcgcaagccattagaccaatcgatattagttttacctgttacgggctcactacccctaatagctagccaaatgataaatgaattagtatcagcaatgtttggtgtctgtaatatatgcacgttctaacaaatatcactgcaagtgataagacatagtcttattaatagtactatatctattccgcttatact

SEQ ID NO: 1705 - DNA, 1237 bp, Oryza sativa
  ref <308>: DATABASE ACCESSION NUMBER: AK059723
  ref <309>: DATABASE ENTRY DATE: 2001-12-06
attggatgttatattatctggagtgcagcagctggaaccagatatgcaattgattacattcgatcacgacgactggccttcctagtgcaacaaatctgcaagtggtgctctattgttgtgaagagttctgctctcctgtcaatatggatctttgttattcctgtgttgattggactcctgtttgagttactggtcattgtacccatgagggtgcctattgacgagagtccggttttcctgttgtatcaggattgggctcttggattaatattcttaaaaatatggactaggctggttatgttggatcaaatggcacctttggttgatgaaagctggaggacgaagtttgagagggttagagaggatggcttctcccgtttgagaggtctatgggtcctgcatgaaatcataatgcctattgtcaccaagctccttacagctctctgcgttccatatgttcttgcaaggggtgtcttcccagtgcttggttacccactcattgtgaactcagcggtctaccgtttcgcgtggcttggctgcctgatattcagcgcgctgttcttctgtggcaagagattccatgtttggttcaccaatctccacaattccattagggatgaccgttatctgattgggcggaggctgcacaactttggtgaggactcactccattcaagtgaacctggaacaactacagcgtctgacgatgatgaacacgagcaagcactcattcctcgcgatcaggaaggagagttggggctgaggttcaggcgccatatcatgcgtggaaaccaaccgagaatggctgcataagcagggacgagtttttggacaaagcaaggggcatatgcacgatctgacttctgccctggagcttctgcttgtgattagtaatccgcattgtagagtgaaatgagtccgtcagttagtgataggaaaagtaaggattgttgtacaacaaagtccaagggaagaacagctcaaaaaaaaaagaatacacaccagaaaactcatggtaagctcacttccctgtggctatgtgttgctgactgtaaatatagacgaactaccccacacaatttattgtggttctgatgtgtaatggacaatgaattactcctacagtagtacatcaagttggatagtagctagggttggtagacgatgttgtccacacttcatttcttttcatttcttgtgaactttttgtacctgttggtgttggatcttttttttt

SEQ ID NO: 1706 - DNA, 1082 bp, Oryza sativa
  ref <308>: DATABASE ACCESSION NUMBER: AK059724
  ref <309>: DATABASE ENTRY DATE: 2001-12-06
tttggtgaggaagaaaacaaatcatagcacacacatatgtgaaagaatttgttcccacgacctccattttaccgaaataacatattacggagagatttttgaaagttacatacaagttacactatagttacagtgtgattacatagaagttatagtgtaattacactacgattgtactgtaattacatctgtcaaatttttagggaaaaatttgtcgacaaatatatagcaaaatcgtctctgtttagttagtgttatataatgctacacctcagcctgcaaagggggcagatcgacccattaggtgcgctggccgaccctaaaaatttggcaccaaaaggttcttgggttggcccatatatttttagggaacaaagggctgacacccagtgaaccctagggtccacgtggattgaccctaggtgtgctctcgtctcgcacgcggcagcggcggcgacttcaggcgacgcggcactgtgctccaccgtcggtgtgcactctacctgcaggcggcggagcagtgaccgacgaggtgctctacctgtggcagcggcggatggaggcaccagtgggcggcggctatctgcttgatggccaaccggaggagcagtgaccggcgaggtgttccggaggacactccaccggcagcaacgatgagggctccggaggacacccagccacatcgccaccttcgtccagctgggtttctctcgcccgtgagcaccgaacctgggcctagaggattcaatggattgtggaagcttatggatgtccaaatgaaggatctggttattgatgattccatgaacttggacgagtcaatgaaacgaatggacctttgaaatactctgttctgtaatcatcattgcatagaagatattttctagcttcgttaatttttagtctgtcactttgatgccctggatatttgtgatgtttaacttcatattttgtggatgatatttgatccttgaaggttgcacttttagtgttgatttgttttacacaacagaaatttctatagtgatatttgattctgtaagactgcatttttagtattgttgatttgctttggacaacag

SEQ ID NO: 1707 - DNA, 1129 bp, Oryza sativa
  ref <308>: DATABASE ACCESSION NUMBER: AK104096
  ref <309>: DATABASE ENTRY DATE: 2002-08-28
acacatttcagctcaccactgctagcttgggaagaggaggaggagcttgagcttggagagagacaacaatggcggctcaggctcttctctctgggaggcagctgctggggaggccattgcaatcttcagtctccaggtcttcttcctccaggaaggcacccttcatggtcagggcagaggccactccccctgccaagcaaggtgctgacaggcagctgtggttcgcatccaagcagtccctgagctacctggatggcacgcttccgggagacttcgggttcgacccgctggggctatcggacccggaggggaccggtgggttcatcgagccacggtggctggcctacggcgaggtgttcaacggccggacggcgatgatgggcgtcgtcggcatggtcgccccggagctcctcggcaagctgggcctcgtccccgccgagacggcgatcccgtggttccagaccggcgtgatcccccccgcgggcacctacacctactgggccgacccttacactctcttcgtcttcgagctcgccctcgtcggcttcgccgagcaccgccgcttccaggactggtacacgccgggctccatggggaagcagtacttcctcggcctcgagaagtacctcgccggctccggcgagccggcctaccccggcggcccgctcttcaacccgctcggcttcgggaccaagagcgaggcggagatgaaggagctcaagctcaaggagatcaagaatggcaggctcgccatgctcgccttcctcggcttctccgtccaggcgctcttcaccggggttggccccgtgcagaacctgcttgatcacctcgctgatcccgtccacaacaacatcctcaccagcctcaagttccattagagatgccatcaactacgtatttaattaattacgagtttttaattatgtatgtatgtacgtgcgtatgcgtatatgtgtgtacgtatgtatgtacgcaactttgtacgatcgatggtgcgtgtgatcgagaggggtatgtatgtacgtacgtatatacgatgtattattatgcatgggtgtagggtgtgggtgtaacatgtaaatttgtgctccaactgatttgcacgcatggtcgcatggatcgatttgct

SEQ ID NO: 1708 - DNA, 1204 bp, Oryza sativa
  ref <308>: DATABASE ACCESSION NUMBER: AK059725
  ref <309>: DATABASE ENTRY DATE: 2001-12-06
agactagctcccactttccagtctcccgccgccgccgccgctgttcactccgcaccaactccgacgatcccccggcgagctctcgacgatggcgacggcggcgacggcgtcggctacggcggccacccgcttcacgcggctggcgggggtcgggctccggcgcacggcccgcctccccacggccgtgcggttccagcgccgggtgctcgccaccaccgcgctcctcaggaccgccgagctccggcccaaggagcagggcctgcccgagacgctcgactaccgcgtgttcctcgtcgacggcgggggccgcaaggtgtcgccgtggcacgacgtgcccctgcgcgcaggcgacggggtgttccacttcgtcgtggagatccccaaggagagcagcgccaagatggaggtcgccaccgacgagtcattcacccccatcaagcaggacaccaagaagggcaacctccgatactacccgtacaacattaattggaattatggattatttccccaaacatgggaggacccaactcttgcaaacaccgatgtcgaaggagcatttggggataatgatcctgttgatgttgttgagattggtgaaagacgtgctaacattggagatgttcttaaggtaaaaccgttggcagctttagcaatgattgatgagggtgagcttgactggaaaattgtggctatttctttggatgatcctaaagcatctcttgtgaatgatgtggatgatgttgagaagcattttccgggaacattgactgccatcagagactggttcagggactacaagataccagacggtaagcctgcaaacagatttggtctgggcaacaaacccacaagcaaggaatatgctctgaaggtcatagaagaaaccaacgaatcatgggagaaattggtgaaaaggaatatccctgctggagagctctcactagcctaatcttgtccatgagaagccatcagattcttttggtcatttacctaagcatgttgttttcataagctataagcatgctgcttcttgcgaactctttggtgacctgtgtgcaacaggaacagcttgtggagtgaataaggctttctgagctagtttttctaagggaattgggtgttcttgagcagcgattgtgtttggaacaagctttacaaagtgaacaatcagtttagaagttgaatgataagcaaatatagtttc

SEQ ID NO: 1709 - DNA, 1134 bp, Oryza sativa
  ref <308>: DATABASE ACCESSION NUMBER: AK059726
  ref <309>: DATABASE ENTRY DATE: 2001-12-06
acaacaaaacacaagccaaaacaccatttaaccacctccaagcttcgcattccaagagaccgagcgactgttcagccagagattaatcagagaatggctggagaaggagatgatcaactgaagcttctcggattgtgggtgagcccatacactcaccgagtgaagcttgcactcagcttcaagggcctgagctacgagtacgtcgaggaggacctcagcaacaagagcgagctgcttctcagcaccaacccggtgcacaagaaggtgcccgtgctcatccacaacggcaagcccatctgcgagtcgcaggtcatcgtgcagtacctcgacgaggagttccccaactccggcgtctcgctcctcccatctgactcctacgatcgcgccattgctcgtttctgggctgcctacatcaacgacaagctgatgccgtcgtggctgcagtcgtcgatgggcaagacggaggaggagagggcggaggcgctgaagcagacgttggaggcggtggcgaacctggagacggcgttcaaggagtgttccaaggggaagcccttcttcggcggcgacaccgtcgggtacctggacgtgtcgctcggcgccatgatcggatggatgcgcgccggcgaggctctgcacgggaggaggaccttcgatgccactagaagccctctcctgaacgcgtggatggagcgcttcgccgcgctggacgccgccaaggccgccatgccggacaacaacaagctggtcgagttcgtcagggtgaggcgggctgccgctgcgaacaactgaagccgaaacaatactgtattggtcagttcccagttggtacgagatttgctctgctccaacaaagagtatcttaaggtattgatacctcacggtaccaaatcgtttctaaccgttgaatctaacaatgtccatcgatgggaaacgatttagtactgtaaggtaccggtacctcaattactttttgctgaaccgaaacaaatctcatcgtcactgctttgggcctttggccaattgtcatttttcaagttgcaaaagtgtgatgttcttccgggtcatccgttcgatcggatctccttgttaccgggacatcatttcttccaataaaggaaaatgttgaattttggt

SEQ ID NO: 1710 - DNA, 1064 bp, Oryza sativa
  ref <308>: DATABASE ACCESSION NUMBER: AK059727
  ref <309>: DATABASE ENTRY DATE: 2001-12-06
gttagtacccatcaatgcctccctcctcctcctcctccgccaccaccaccagctcgccgtctcgtctccctcctccgcttcgcctcctctgatcacctcgctcgccggcgacgccgcgatcgccaccgcaccgcagggcattgtgtcgtcgaggggagagatgaggcctctgtacctgcgcagcagcggcagcttcaagaagctgctcctctccatcagccaccgcggcgccaagaacggcaatggcgacgccgccgccaaggagagatacacgcccgccgccgccgcggcggcgccggagtcgccgcggaagccggcgtggcggtgcttctcctacgaggagatccaccgcgccacgaacgcgttccacgagggcaacctggtggggaagggcgggtcgtcggaggtgtaccgcggcgagctccccgacgggcgggccgtggcggtgaagcggctgatgggcgcgtgggcgtgcgagcggcgggagcgcgacttcctggcggagctcggcacggtggggcacgcgcgccaccccaacgtgtgcgccctcctcggctgctgcgtcgaccgcgacctctacctcgtcttccacttctccggccgcggctccgtctccgccaacctccacggtaccagcgacacgaacgcgacacctaacagcaacagcacgaacgcgccgccattaatggcgttttgacgtttcttgatttgatttgattgctgcatcgcagacgagaagaaggcgccggcgatggggtgggcggtgcggcgcgccattgccgtcggcacggcgagggggctggagtacctgcacaaggggtgccagaggaggatcatccacagggacatcaaggcatccaacgtgcttctcaccgacgacttccagcctcaggtcagtctcttcggagacatccgataaaattggaacgatacaacaaagattagcatggccactacgcaaggatgacacgcacaaatggagaaataatccaaatttttttaggagctgtatttttctcatgctatatttaatgaataagcacaatcttgtgctggttccgttc

SEQ ID NO: 1711 - DNA, 961 bp, Oryza sativa
  ref <308>: DATABASE ACCESSION NUMBER: AK104097
  ref <309>: DATABASE ENTRY DATE: 2002-08-28
accccaattcccaaagcaaccgacacacacacacacaagctacaaacatggctgcttcttcttggtgggttgtagcggcgtgcgtggtgttggcggcggcggcggcggccgacccgagggacgggttcacggcggtgagcctgggcgatggcaacttccagctgcagtggccgtacgacgtggagagcagctcgaggtacagcttcgacggcacggtgaggcggctgtgggtcttctccgacgacaagcccttcaagccgcagagcggaaccaacccaaggacggagatcaggatgacgggttatgactactcgtcaggggtgtggcaattcgagggcaccggttacgtcccctccggcaccaccggcgtgtccatcatgcaggtgttcggtggcgggaccgccaccaccctcatgctccacgtctatggcggcgacctttggtactaccaccagcaggtggtggagaccaacatctacgaccgctggttccgcctcaatgtcatccacgacgtcgccgcctcccagctcaccgtcttcattgatggccgggagaggctccgcgtcgccggcaagggtggcgactcgcactacttcaagttcggcgtgtacatgcagacgaacccgtccaaccgcatggagtctcgctggaaaggcatcagcatcctcaacaagacatagtaacctagtatcgaaattagacataaattgatgttatgaataaatctatctagattcaataatattagattgtgtcaaatctatcgggtataaagttattatattttaagatggagatagtacttggagtaaattataactggacattgtgtaaacacgcatgtctctacttgtgttcttacatgcgtggagtactatgcacatgcctatatgtatggttgtgtatgtcaattttgtttcatctatatattgagtgtacgtatatatgatatctttgcatt

SEQ ID NO: 1712 - DNA, 1079 bp, Oryza sativa
  ref <308>: DATABASE ACCESSION NUMBER: AK104098
  ref <309>: DATABASE ENTRY DATE: 2002-08-28
agtagctatacagaaagcaaattaattaagcatccaaaatggcttcctccccaagcacagtatttcttgtactgtccctaaccctagccaccgtctccgtcgtcgtcgtctccggcgccggcgaagcgccaagcccggcaccgacggggcccctcaacctgacggagatcctgacgaaggccgggcactacaacaccttcgtccggctgctcaaggacacggaggtgacgtcgcaggtgagcagcctgctgaacaacgaccggaacggcgacgggctgacggtgctggcgccgacggacgccgcgttcgggcggctccggccggggacgctcaaccagatggacgcgcaggcgcaggcggagctggtgctgtaccacgtcctccccaggtactacggcttcgtcacgttcgagaccaccaccaacccggtgcgcacccaggcctccggccagcgcggcgtctgcaccgtcaacgtcaccaccgccggcgaggacagggtgcgcgtctcgtccggggtggtggaggccgagctcgggaggccgctccgcgacggccacccgctcgccgtgtactcgctcgacgccgtcctcctcccgcccgacatgttcggccccggcgccaagaaggactacggcgccgccgacgcgcccgcggcggcggggaagcacgggaagccgcagaccgcgtcgtcgtcgtcggtggcggcggcgcctgacgaagcgccgtcgaaggaggtggacgccacggcgacggcggccgccggcaggatggcgccggcgggatgggcggcggcgtttgcaggggtcgtgaccgcggtggtcgccgtgagcctgctctcgtattgatgagcaggcatgcatgcgatgcaggcgatgcacatatcgttaatttacattgggtttttgctcgatatatgctacgcacaagcacgctccatttcgctctgttaatatgttgtgtacaaacaacattgcattttgtttatcagatgtataccttgtgaatgcatgttttacattccaagttactgcaccgatgtagttttataatttacatatacgctcaactttaattcgtac

SEQ ID NO: 1713 - DNA, 1098 bp, Oryza sativa
  ref <308>: DATABASE ACCESSION NUMBER: AK059728
  ref <309>: DATABASE ENTRY DATE: 2001-12-06
cagggttcagagctcgcccaacctcccgaatgccgtcggcgccggtggtggcgcgttcaagcagccgcctttcgccatgggcaatgcggttgccggatctacggtcggtgtgtacggaacaaggtagctaatccgctctgttatcgagcacgaggtttgtgacttttgtgagagtggaaatgaaagatgaaattggactgaaatatatagcttgtcttgctttgtatagggacatgccgaaggcgaaggcggcgcaattgaccatcttttatgctggttctgtaaatgtattcaacaacgtctcgccggagaaggtatgatttcattgtgacagatggtgcatctttgtgctgtactatggatgattattaccaattgacatgttttaatagctgtttctcattgttgcaggctcaggaactcatgttcttagctagcagaggatctcttccaagtgcgccgactaccgttgctcgtatgccagaggcacatgtctttcccccagcaaaagtcactgtacctgaggtttcgcctacaaaaccgatgatgcttcagaaaccgcagcttgtttcgtctcccgtgccagccatttccaaacctatctccgttgtgtcacaagctacaagtcttccacggagtgcctcaagctctaatgtcgactccaacgtgacaaaatcttctggtccattggttgttcctcccacaagtttgcctcctccggcccagcctgagacactagccactaccactgctgcagctattatgccgagaggtatgcctattaattgcttgcatgaattgtattgtgatgttatgatagtagttagaacttcagatgaattgttacagtgtatgatttatttctctttttttcattgcagctgtccctcaagcgcggaaggcatcccttgcccgattcttggagaagcgaaaggaaaggtagagatcatatatttaagggacaattgctcatttgaccctgtttcgaagcctaactaccaatctgaccttacattttttagtttgctaatttgaccccgcttttcaaaattgagcatgccgtttgaccctatttacactacgccgttagggtttcac

SEQ ID NO: 1714 - DNA, 1336 bp, Oryza sativa
  ref <308>: DATABASE ACCESSION NUMBER: AK059729
  ref <309>: DATABASE ENTRY DATE: 2001-12-06
gtgctcagtttcactcttatcagtgaattagatcatatacttgtgtccttgatagctcgttaattagcatggctaggtcactcgctgctgtcctactccttttggtcgccgccgcgggagccagccatgccgcgtcgccggcggagatgtactggaagatcgcgctcccgacctcgccgatgcccggcgccattcgcgacctcatcagcccagcgagctcagtgggctcagcttcgaaggaggacacggtgggcaacgtgttcttcctcgagaaggacctcttcccgggctccaagatgacgctccacttcacccgcgccaccgccggcgccgcgctgctcccccgcggccgcgccgagtccgtcccgttcgcctccgaaaggctcccggagatcctctcccagctctccatcccggccgtctcgccgaccgccgacgccatgtggtccacgctcgccgagtgcgaggccgcgcggctcgccggcgagacgaccaagcacaagcactactgcgccacgtcgctcgagtccatggtcgagttcgtcgcgtccagcctcggcacccgcgacgtccacgccgtgtccacggaggtgatcagcacgttgacgccgacgccgaggcaggcgtacagggtggaggccgtgaggcccgtggcggtgcccggcggcgacatggtggcatgccacgggatgccgtacgcgtacgccgtgttcgggttgcacgggctcaagggcgcaggcggtggccgcgtgccacggggacgtggacgggcacggcgcggtggcggaggcatacaagaggctcggcgtggcgcccgggagcgtggccatctgccacttcctgcctcaggacgacatgatctgggtgcgcaactgaattaatgaagcagctaccttgcgcgccatccatggctaattattttagacatgctccttcctatattttggatctacctgccggctatcatgttatcataaatttacgcgtgtgcgcgcgacgatccgacatgcccacactaacgtgttttactttgttaattaataagtctgcatacccaggtcatcttgtacggtgctactccctctatcccgaaataaaacaacttatagagattgaagtttgtcccaaaataaaccaacttctaccttcttgcctaccatcaatgcctaccacctgtctgcaaaacaataaattttattacttcaataccccgggttggttcatgtgcagtacttaggacaagttttgtagtagatgtaaataccacatctaatttaagtcatgtcatcttctcattaattaaaagatagcaagtgcaacatattgcacttttctt

SEQ ID NO: 1715 - DNA, 1128 bp, Oryza sativa
  ref <308>: DATABASE ACCESSION NUMBER: AK104099
  ref <309>: DATABASE ENTRY DATE: 2002-08-28
gtgctcagtttcactcttatcagtgaattagatcatatacttgtgtccttgacagctcgttaattagcatggctaggtctctcgctgctctccttctccttctggtcgcagccgcgggagccagccatgccgcgtcgccggcggagatgtactggaagatcgcgctcccgacctcgccgatgcccggcgccattcgcgacctcatcagcccggcgagctcagcggcctcagcttcgaaggataaggaggatacggtgggctccgtgttcttcctcgagaaggacctcttcccgggctccaagatgacgctccacttcacccgcgccaccgccggcgccgcgctgctccctcgcggccgcgccgactccgtcccgttcgcctccgaaaagctcccggagatcctctcccagctctccatccccgccggctcgccgaccgccgacgccatgcggtccacgctcgccgtgtgcgaggccgcgcggatcgccagcgagacggcgcccaagcacaagcactactgcgccacgtcgctcgagtccatggtcgagctcgtcgcctccagcctcggcacccgcgacgtccacgccgtgtccacggaggtggtcaacagggccgggccgacgccgaggcaggcgtacagggtggaggccgtgaggcccgtgccggtgcccgggggcgacatggtggcatgccacaggatgccctacgcgtacgccgtgttcggggtgcacgggatcaagggcgcggcgtacacggtgacgctggccggcgccgacgggaccatggcggaggcggtggcggcgtaccacggggacgtggacgggcacggcgtggcggtggcggaggcgtacaagaggctcggcgtggcgcccgggaaggtggcagtctgccacttcctgcctcaggacgacatgctctgggtgcgcaactgaatgaagcagctacctgcgcgccatccatggctaattaagctccttcctatattttcgatctacctgccggctggctatcatgttatcatcgcgtgtgtgtgcgcgccgatccgacatgcccacactacacgtcgacactacacgtgttttattttgttaattaataagtctggacaaccaggtcatcttgtacggc

SEQ ID NO: 1716 - DNA, 1026 bp, Oryza sativa
  ref <308>: DATABASE ACCESSION NUMBER: AK059730
  ref <309>: DATABASE ENTRY DATE: 2001-12-06
aaataaaccacctcttcaaacgtgcgtcgcctgaccgcttccatccatccaccagtctcgcttcttcgtgtctacggtctacctcggcgagtcggcggcggcgatggcggcggcgacggacggcggggggctgccgctgctggcggacaaggcggcgagccacagccaccaccaccacccggagcggcacttcacgtcgggggaggtggtccgcgacgtcatcatgggcgtctccgacggcctcaccgtgcccttcgccctcgccgcggggctctccggcgccagcgcgccatcctcgctcgtgctcaccgccggcctcgccgaggtcgccgccggcgccatctccatgggcctcggagggtatctcgcggccaagagcgaggcagaccattaccagcgggagatgaaaagggagcaggaggagatcatcgccgtcccggacactgaggctgctgagattggcgagatcatgtcgcagtacgggctcgaaccgcatgagtatggccctgtcgtggacgggctccgtaggaatcctcaagcttggctcgacttcatgatgaggtttgagctgggattggagaaaccagaccctaaaagagctatacagagcgctttaacaattgcgctatcttatgtcattggtggactggtccctctccttccctacatgtttatctccacagcacagaacgccatgctcacatctgtcggtgtcacgctggttgcactacttttctttggatacatcaagggtcgctttactggaaaccgtccattcctcagcgctgtccaaactgctattatcggtgcgcttgcttctgctgcggcatatggaatggccaaggccgtgcaaactagatgatttgaaccctcatgtgttcctgtctgaagtttcagtaggcagaactgaatccaacgaagctgcaatgaatcacaatctcatattaagaatatgtattttacctttcatgtaacaaggaataaattttgggaaacatgaaataaaagcatgctattttaagttct

SEQ ID NO: 1717 - DNA, 928 bp, Oryza sativa
  ref <308>: DATABASE ACCESSION NUMBER: AK059731
  ref <309>: DATABASE ENTRY DATE: 2001-12-06
ctaccaacctgccaatttcttccttccttccatccgtcctgcaacctcctcctctgcttctcgatttctcctcctccactccatcgtctctctctctctctctctctctgcagctaactcctccgaattaggaggttcatcttgatgtaattgactggattcaataaaatttttcattatcttgaaaaagaaagtagcggaggtgcaacgttggcatatggagaagcggaggcggccggcggcggcggcgatgcttctggtgctcatccctgctgcatcgcgcccaccccatgggatcgtagcagcaacagaatccagtgtccagaatagtgagcagagctttggtttcaaccttacacttgccaagactattgtggagtatgcctcagctgtctatatgacagatctaacagagctctatacatggacatgctcaaaatgcaatgacttaatccaagggttcgagatgagacgtctaatcgttgatgtccagaactgcttgcaggcatttgttggtgtcgatcacaatctcaacgctatcattgtttcaatcaggggaactcaagagaacagtgtacagaattggattaaggatatgctatggaagcaatctgatctgaactacccggacatgcccgacgcaaagccatcgcaaacgccgttcacaaggcgaggaagttatatggagatattagcataatagttacagggcattcaatgggaggagcgcttgcttctttctgtgcacttgatcttgcgattacccatggaggcaacaatgtttacctgatgacttttgggcagccgcgcgttggcaacgctgcatttgcatcctactttaccaaatatgtgcccaatacaattcgagtgacacatgagcatgacattgtgccgcatttgcccccatattttttcatttttccagacc

SEQ ID NO: 1718 - DNA, 1026 bp, Oryza sativa
  ref <308>: DATABASE ACCESSION NUMBER: AK104100
  ref <309>: DATABASE ENTRY DATE: 2002-08-28
atgcgccgcgtccacagctcgatcgctagccctactcgctagctagatcggcggccatggtgaacggctacttgttccgggagtacatcggcgcgcagttcaccggcgtgcgcttctccgacgtgcccgtcaacccgggcctcagcttccacttcatcctcgccttcgccatcgactacttcatggcgacgcagtcctccaagccggcgccagccaacggcgtgttcgccccgtactgggacacggccaacctgtccccggccgccgtcgccgcggccaaggcggcgcaccccaacctcagcgtcatcctcgccctcggcggcgacaccgtccagaacaccggcgtcaacgccacgttcgcgccgacgtcgtccgtcgacgcgtgggtgcgcaacgccgccgactccgtctccggcctcatcgacgcctacggcctcgacggcgtcgacgtcgactacgagcacttcgccgccggcgtggacacgttcgtggagtgcatcggtcgcctcctcaccgagctcaaggcgcggcacccgaacatcgccacctccatcgcgccgttcgagcaccccgtggtgcagcgctactaccagccgctgtggcggcgctacgccggcgtgatcgactacgtcaacttccagttctacggctacggcgccaacaccgacgtggcgacgtacgtgatgttctacgacgagcaggcggcgaactaccccggcagcaagctgctcgccagcttcaagaccgggaacgtcaccgggctgctctcgccggagcaggggatcgccggcgcgaaggagttgcagcggcaggggaagctgccggggttgttcatctggtcagcggatagctccatggtcagcagctacaagtttgagtacgagaccaaggctcaggagatcgtcgccaaccactgatcgtccatcgaacggtcgtgataatacttatgaaataagagcaaataaattgcgaaataatggtcgtattatatatcgagcgtcattatgcacgacttacgtgctaaat

SEQ ID NO: 1719 - DNA, 1393 bp, Oryza sativa
  ref <308>: DATABASE ACCESSION NUMBER: AK059732
  ref <309>: DATABASE ENTRY DATE: 2001-12-06
attagggtaaggggaggagcggcgatctcgtcggcgacgacgacgtcgaggtcgaggcggtggcggaggagcatggccgacggtcaggaggacgccgcgggtctggacgatgaccttgttctcgaggatgagctgcgaggtcgagaagagggcgaagacggcggcggcggcggcggcgaggaagaggaggaggacgacgtcgacggcctcgccagcttcctcgaatcggagatcctctctggatctagcggcgacgaccctaccggtcgggaggaaggggatgagaaggagaagcagttaggagatgatgcgaagaacaataagaggaagcaggagtctgaatctgatggggatagcggcagcggggaggagcagaacaagagggtgaggagagcaaaggggaaagagaaggacgtggcgtcggtggcgcctcagatcgatagcggcatgttctgcaatatcccgccggagttgttcttgcagatattcaagttcctctcatcggaggatctcatctcctgcgccctcgtctgccgcttcatgaacgtggttgcgtccgacgagaccctctggcgccgcctgtattgtatgcggtggggcctgtcatgcaataccaaactcagggagtgcgcttggaagaaactctacatccagcaagatagagaggatatggttgagtttgtgagaaatacacctacagaattcaaggagtattatatccagatgcaggcttcaaaaaggagtcaagctccccttccctctgaagtcaacgatgacaaggttattcttgataaaacaatagccgatcaggtgtctagctggaaaagcagcagaggcctcactgatgatgcggtcaaggggcattcttgttctgggaatacatgctcttacacccagattggtgatgcttatatttgtgagaagacaggccgtgttcatgtttgcgatgacgcttgtcgtgaatttgtcttggaccagtctagtgggctgctgctttgtacaatatctgggcactgctttgaaaggtggttgtgtcctgatgatgagtgggatgctgatgatgatactgatctacaacaagctggtatgaccgatgaagcagagccatttatgggttctggacgatttgcacgcgcatatcagttgggttacagctgtgctgatgagaaggaacttgaatatgccttgaggttttgctgataattgggattgcctaatcatactggcaacatgaaaccaagtttttggtttgcaagggaaattatggtcagaaggcttggtgctatgttttttttttttttacctagtttaggtttctggtatgttcctatgtgtacaactcacgcacaaatatgagacggctaaaattctgatctgttttgatcagttgagg

SEQ ID NO: 1720 - DNA, 1005 bp, Oryza sativa
  ref <308>: DATABASE ACCESSION NUMBER: AK104101
  ref <309>: DATABASE ENTRY DATE: 2002-08-28
gctcttttcgtactacttgcaaggaggagaaagaagaacacgaggaggaaatccaagccaatcgccgcctccgcctccgattccttccgatgaagaagatcttcggcgccaagaagaaccaggagcccccgcccagcatccaggatgccaccgatcggatcagcaagaggggcgactccgtggacgacaagatcaagaagctggacgctgagctcgcccgctacaaggaccagatcaagaagaccaggccaggccccgcccaggaggccatcaaggcacgcgccatgagggtcctcaagcagcgcagaatgtacgaagggcagcgtgacatgctgtacaaccaaacatataaccttgaccaagttgcttttgcatcagagggacttaaagatgctcagcaaacgatgactgcaatgaaggcagccaataaagagctgaaaggaatgatgaaaactgtcaagcttgaagatatagatagcttgcaagacgagatgatggatcttatggatgtgagcaatgaaatacaggaaactctcggaagaagctacaatgtccctgatgacattgacgaggaagaacttatgggggagcttgatgctttggaagccgacatggactttgaatcaaattcagtcccctcgtaccttcaaccagataaggaatcagatctagattctgagcttaacttgcctgctgcaccaacgggtcacacacccgccccaccaaaccggcagcaggaggacgaattgggattgccgacagtgccacaagcatcgatccgtagttgattggattcgttttgtaaaaacataatgtcgtatgcaataacaaattcagtgtatctttgctcatatactactgcaatttgttaagattggaaatagctttctcattgttttgtttagggtctatatgtaagagcatttgttactttttgaagtacagtgtaaatttaattggctgctggggcatacatatataagtccttattctgtgttggtgatg

SEQ ID NO: 1721 - DNA, 1250 bp, Oryza sativa
  ref <308>: DATABASE ACCESSION NUMBER: AK059733
  ref <309>: DATABASE ENTRY DATE: 2001-12-06
gtcacgtcgcccctctgctctctgcactgctgcggcgaggagctagctcgagccggccggaagccatggccacggcggagcagcggcagatcgagcacgtccacctccccgtgcgggggctcaccctccacgtcgcgcaagccggcaaaggggagctcgggacggtggtgttcctgcacgggttcccggagatatggtactcgtggcgccaccagatgctcgccgtcgccgccgcagggtaccgcgccgtcgcgccggactggcgtgggtacgggctctccgaccagccgccggagccggaggcggcggtgtacgacgacctcatcgaggatctcctcgccatcctcgacgccctcgccgtgcccaaggcattccttgttggaaaggattttggggcaatgccagcttacgactttgctctccgtcacccaaaccgcacatgtggtgtgatgtgtctgggcatccccttaggcactgctggtttgtcctttgacacattgccagaaggattctacattttacgttgggcgcaaccaggaagagcagaagctgactttggcaagtatgatgtaaagagagttgtgcgcaccatctacatactattctctaggagcgagatccccatagctaaggaaaatcaagagatcatggatcttgcagacttatcgacaccccttcccgagtggtttagtgaggaggatcttgatgtctactcatccctctatgagaattctggttttagatatccgctacagatgccatataggtctctgcaccagagaaaaccaattggagatgcaaaattccaagtcccagtgtttattgtcatgggagaaaaagattatgtctttaagttccctggtatcgagtctgctatgaaagacggaactatggagaagcatgcaccaaacataaagatcacctacatccctgaaggagggcattttgtgcaggagcagttccgtgactatgtgaatgagctccttcttggcttcttgaaagatcatcctgtggttatataaatgctattgtagcctcagttgtgcttcacccgtagttcaagttggcttagaaaacgttgtgctatatcatggtatgaatttgtcaacaaactaaggatcagctatggctagtttgttactttcagtaatgcctatttgagcttgttgtatctaggttgtcctgctggtgttactagcaatgtaaagactaaacccattgctatacttctaccatgacttttgcaagcc

SEQ ID NO: 1722 - DNA, 1011 bp, Oryza sativa
  ref <308>: DATABASE ACCESSION NUMBER: AK059734
  ref <309>: DATABASE ENTRY DATE: 2001-12-06
attgcaaccgcaaagcctcttctcctcttcttctcctactcgcttactcaatcgctcgaggattcttggattggattattgggttggattttgagttgatcaatggcggcagcggcgcaggctccggcggcggcgaaggtggtggtggcgacgtcgccgagggcaggcggaggcggaggcggcggcggggacaggaaggtggtgccggttgtggtggcggcggcggccggcgacgaggcgcagagcgagatgcacgtgctggcggtggacgacagctccgtggaccgcgccgtcatcgccaagatcctccggagctccaagtacagggtgaccacggtggagtcggcgacgagggcgctcgagctcctctgcctcggcctcgtccccaacgtcaacatgatcatcaccgactactggatgcccggcatgaccggctacgagctcctcaagcgcgtcaaggaatcgtctcagctcaaggagatcccggtggtgatcatgtcgtcggagaacgtgccgaaccggatcagccggtgcctggaggagggcgccgaggacttcctgctcaagcccgtacgcccctccgacgtgtcgcggctctgcagccgtatcagatgatcgctcgctcgccatgttggatcatggagaggatgattaactcctaggattttttttggtggctttctcaattcttggacatagttcttcttcttctgctgctgcctcaaacaagaagctaaacatttggggctttaggagatgattagccttactgccttagcaagttagaattgaaattaggtgtcaggcatttgcttgttcccctgtgtgctctgcaaagacgccatgaaaaaaaaacagagagagaagagattcttctgaagcttctgttcaggaggtttctcttgtcacaatgttgaaatggcaccagagcatcaatctgttctttttaactgtttcaagatcggtcagagttttgacattaatttaagtcttgccaattaaccatgcatc

SEQ ID NO: 1723 - DNA, 1010 bp, Oryza sativa
  ref <308>: DATABASE ACCESSION NUMBER: AK059735
  ref <309>: DATABASE ENTRY DATE: 2001-12-06
atctctgtctcctccgctccgctccgctccttgcgccgccaagacgagtcgcggctgaacataacaggggaggggcggcgatctccctctccatctccatctccatctccatctccatctggcgagcagagcaggggaggggaggggatcctcacctggaaagtgtgggtaaagcgcagggcaacaagaaatggcagcattcctgaggtcaaaatgttcgtcagttggacgtaccttgatgggaggccttgggaacaatctatttggagccgttaactcatctgttgaaacggtgtcaagaccatctcattgtgatcctatctttcagcaaatcagaacattcatccagatgagaacaaacctaaaggtggtagacaactctggtgccaagcgcgttatgtgcatccagtccttgagggggaagaaaggagcgaggctcggggacactataattggatctgtcaaggaagcacagcctcgtggtaaggtgaagaaaggagatgtggtctatggagtggttgtccgtgctgctatgaagcgaggacgcaacgatggcagcgagatccagtttgatgacaacgcgattgtccttgtgaacaacaaaggcgagctgattggcactcgtgtatttggtcctgttccccacgaactcaggaaaaagaagcatctcaagatcctagcgttagcggaacacatagtttgagatgcttacatacctggcaacctacctgttagttctgcagaatgaaatgagcatggtgctgtctcaagagtattccaccgttgttttgatcagttctgtttgcaataatgtaccctcaaaagattaaatgagctgatgccctgcagtcagtcctagacaaatcagattctgtactactatttaacctctgtagtattgcattccattcagatggaaacgcatacattgcttatgttctcttgttaaacctgaaactgcaactgaactcttgtgctttctgatctcaaagtgtttcggttcatgtgtt

SEQ ID NO: 1724 - DNA, 1099 bp, Oryza sativa
  ref <308>: DATABASE ACCESSION NUMBER: AK104102
  ref <309>: DATABASE ENTRY DATE: 2002-08-28
atccatccatccatgtcgtgttgttagcttcgttttcttcttgtttcatcaatccaaggagtgtggaaggccacacgccaagattatatctatgctaatttgattagcagtaggattaattcagtggctagcgtagcttgattagttggtttaattagttggagagtaaagaagatgttgggagtgttcagcggcgacgtggtggaggtgccggcggagctggtggccgccggcagccggacgccgtcgccgaagacgcgggcgtcggagctggtcagccgcttcctcggcggcgccgagccggccgtgtccgtgcagctcggcgacctcggccacctcgcctactcccatgccaaccaagccctcctccgcccaaggtcatttgcagcaaaagatgacatcttctgcctgttcgagggagtcctggacaatcttggcaacctgaaccagcagtatggtctgtccaagggtgccaatgaggtgctccttgtgatcgaggcgtacaagacgctgagagacagagcaccttaccctgctagcttcatgctctcgcagctcgccggcagctacgcctttgtgctcttcgacaagtccacctccaccctccttgtggcctctgatccggagggaaaggtgtctctgtattgggggattactgctgatggatctgttgccttctctgacaacattgacctgcttaaaggatcgtgtggcaagtctcttgcacctttcccacaaggctgcttctattccaatgctcttggagttggaggcttgaagtgctatgagaacccaaagcacaaggtgaccgcagttcctgccaaagaagaagaaatttgcggtgcaaccttcaaggtggaaggatctacaatcctcacagcgctgcattaggagatttttggatctccagctgttgttgggaaaggaaaactctgtagtctgtaaatggtggtgtaacatagtcgcaaggcatgcatctgatctgtatcatcatcttccgtaaagactagtgctgccagcatggttagcacttttcagtgtttgggtgtgtgtatgatctgtatcctatgctgttcaggcggaaatgaacttcaggccc

SEQ ID NO: 1725 - DNA, 1002 bp, Oryza sativa
  ref <308>: DATABASE ACCESSION NUMBER: AK104103
  ref <309>: DATABASE ENTRY DATE: 2002-08-28
gaaaaaacagtcagaagctaaggaagaaaaagtatagacacagtgatacaatggcctgcatcaacacattccagagctgctccgtcctcaagggagcaaagatcaatggtaccaagatcggaggagggaggggatcaccaaccttccggtgccgggcatcgacgttcatggacgggagcctccggctagagatcgacgagaaccctgaagccatcatctccggtgagtggccggagaacttctccctgctcagctacgacgatctccgcgcctacctccagtcacaggaggccgctgctcaagccgacaaccagcgtgtggcgctcctgagtgaagccatgtcggcgcctgtgctggtagccactgctgagcagacgctggaggaggttgagtgccactttgagacggtctcaggtctcccagttatagatgccagcctcagatgtgttggagtgatcgtcaagagtgaccgggccagggcttctcatgggtcaaagacgaagattgcagaagtgatgacctctccagccatcactctaccatctgacaaaacagtaatggatgcggcagctctgatgctaaagaagaagatccacagattaccaattgtaaatcaggacagacaagtgataggtatagttacccgtgctgacgttcttcgcgagttggaagccctgctggaggtttagacgtgcagtggtccatatgcttcggccttgttgtatatatgtaaatatatgccatggtgtttttgaatagcaggcatctctaatctgtaagagtgttgtagcgcgaatcaccaagataagcctgagaaaataaccggagagcttttctttgtacaataagcacactatgagacctccagtgttgtatgcctgtgaaaaaatttacgttagtgaatggtctccacaacaacatagatgaatgaatatgcctagttatctttcagaacaaaaccaccaaggtgcttcaaagatggatataaaagtgaccttattg

SEQ ID NO: 1726 - DNA, 1107 bp, Oryza sativa
  ref <308>: DATABASE ACCESSION NUMBER: AK104104
  ref <309>: DATABASE ENTRY DATE: 2002-08-28
gagccaaatggtggcgctgcttcgctcgtgccgccgcctgatcccgcacctgtccgcctgcgccgccgccgcgccgtcgtcgtcatcgtcgtgcgctcctcgggctaggccgatctcgcggggactgcggctgctgccggtggtgctcgcaatggcggggtacagcagcggctccgccgcggaggggaggaggctgctgttcaggcagctgttcgagaaggagagctccacctacacctacctcctcgccgacgtcggggaccccgagaaacccgccgtgttgattgaccctgtggacagaacagttgatagagatctcaatcttatcaaggagttgggcttgaagctagtctatgctatgaatacccatgtgcatgctgatcatgtcactggaacaggattaataaagactaagttacctggagtaaagtccgtgattgcaaaagtaagcaaagcaaaagcagaccattttattgagcatggggacaaaatatacttcggtaacctcttccttgaggtacgatctactcctggccatactgctggctgtgtgacttatgtaacaggtgaaggcgatgatcaaccttcaccaagaatggcttttactggtgatgccttgcttatacgtgcatgtggaaggacagactttcagggaggaagttctgatgagctgtatgagtcggtgcattcgcagattttcacattgccaaaggataccctgctttatcctggccatgactacaaaggtttcacagtaagtactgttgaagaggaggttgcgtataatgctcgactaacaaaggataaggaaacattcaagaaaattatggacaacttgaacttggcctatccaaagatgatcgatgtagccgtgcccgcgaatttgctctgcggtattcaggatcctccaccatccaaggtctgagctgttccggctgaagctttcaagctgttgtgaactcacggtcaactcgagaagctcgcagctatgttgtacattaaataatctgttgttaatttgtaaggcactacttgggaacatttccgcttcatgagatcaacggtaataataataaacagaggctagcttgcctcttgtcttgtgct

SEQ ID NO: 1727 - DNA, 1008 bp, Oryza sativa
  ref <308>: DATABASE ACCESSION NUMBER: AK104105
  ref <309>: DATABASE ENTRY DATE: 2002-08-28
cacacaccacgcctccacctccgcctcatttgctccagttcccggagggccgcaaccaccgctagccactcacccggcacggcatggctgcgtcgctccggtcgccgccccccttccccgccgcggcgttccgccgccgccgcgccgtcgtgcgcgcctcttcctcctcgtcgtcctcctcctcggccgtgtcgtccgcacccaaggcgcgcttcgtcgcccgccgctccgagtccaccttcgtccagcagctcgcccgcccgctcgcggagtacatgagcttgccggcgagtcagtactcggtgctcgacgcggagcgcatcgagcgcgtcgacgagtccaccttccgctgctacgtctaccgcttccgcttcttcgcgctcgaggtctgccccgtgctacttgttcgcgtcgacgaggagcccaacggctgctgtattagcctcctctcctgcaagctcgagggatcaccgcttgtggaggctcaaaatgacaagttttcagcttccatggtgaataaggtgttctgcaacagtagtatgagtgattcaacatctcaacagcttacatcggatactacaatcgaggttacaattgatataccatttccatttcgagcattacctgttgaagccattgaatcaagtggcaagcaagttcttgagcaactactccgagtcatgcttccacgatttttgaagcagcttgttaaagactaccaagcatgggcttcgggtgattcttcaaggaaaccacttggcactggtgaaatatgaagcttcgcagtgtctccattaggcattatagtcttttcttgttgcattagttattgcttgatggggtatagaaaagctgtttatacgtcgttttgctcacaaaatccatttgcttctttgtggtctttgcctgaagatgttctgtagtgtgtatggatttgtgccatgcgaccagtcacatacatttgtaggttgttcattcacaatgtgttgttgtaagattaacaatatc

SEQ ID NO: 1728 - DNA, 1099 bp, Oryza sativa
  ref <308>: DATABASE ACCESSION NUMBER: AK104106
  ref <309>: DATABASE ENTRY DATE: 2002-08-28
acggccacagccgccacacccaacctcccgccgccgtcgccagccagccagccatggggagccggctgggtcgccgcgtgatccacttcgccaacctccccctcaagctcatgctccctcccgcgccgctctcctccgtccaggagttcgccgtcaagaccgtcccctccgcctccaaggtcgacatccgccgctgcctcgagtccatgtacggcttctccgtcgccgaggtccgcaccctcaacatggagggcaagaagctgcgccggggccccttcctcgccgccaagcccgactacaagaaggcctacgtcaccctccgcgccccgctccccgtctcccccgacctcttccccattgggcttgtcctcggcgagagggagcgcaaggccagcgccgccgccgccaggaggaaggcggtggagggcgccgaggtggaaggggagagcaaggggaagcactggatggaggatgagaaggtgggcttctccagggccggccgcggcaaggtggtgtacggcaaccccgggaggctggggaagaagaggaatggaggtaccaaggtgaaagacagagccggagaggaagtggggaagttcccatggagcgggacgcgtcttgctaccgagaagaaacctgctaggaaacagcagtatgcccccaagaagaagggcatagtcctgaagcagaagtcatggaagggatccgtgcatcggcaaccaaagaagaaggtggaagcttagaaccttgagtcgctgcattgcgatcatgagtgcactgtgccacagagcaggacgcgagcggtagatccatgaatcacaatgccagatcagtcttgtttttcattcacagaataaagagcaatattttggcatatgtatggctttggttactttgatatctcaggcttggttttctgacacatgaggccaggaaggtgaatggtagtcaagtttgtgccaacctgttactgatgtccttagatttcttttgagatgtctatttgtcatcaatcacaactgagtatgtacaactgatgcctcctcattttttttttgttcttgtcaattacatatacctgttattcccgtggattggt

SEQ ID NO: 1729 - DNA, 1135 bp, Oryza sativa
  ref <308>: DATABASE ACCESSION NUMBER: AK059736
  ref <309>: DATABASE ENTRY DATE: 2001-12-06
tataagtggatgctacgggaggacggttcacatgagctgcagtctgagtgtgggcatcatgggcacatattggctttgtacactcagactcgtggcgatttcattgtagttggagacttgatgaaatcaatatccttgctcgtgtacaagcacgaggaaagtgcgattgaagagcttgctagggattacaatgcaaactggatgagtgcagttgagatgcttgatgacgagatctatattggagcagagaataactacaacattttcactgtgcggaagaacagtgatgcagcgacagatgaagagaggggcaggctggaggttgttggagagtaccatcttggagagtttgtgaatagactccggcatggttcgctggtaatgcggcttccggactcagagatgggccagatcccgacggttatctttggcaccatcaacggggttattgggattattgcttcgcttccacatgagcagtatgtatttcttgagaagctccagtcgactctggtgaagttcataaagggcgtggggaacctgagccatgagcaatggcggtcgttccacaacgacaagaagacgtcggaggcccgcaatttcctggatggtgacctgatcgagtcattccttgatctaagcagaaacaagatggaggaggtggccaagggtatgggggtccccgttgaggagctatccaagagggtggaggagctgactagattgcactaggtctcgataatgatgatataattaatacgtagaagatgtttgctggaacttatttctgaaatgtatattttttttctactccagtttattaagcatgtgttggtgggttgaatgttgatgccgctggtggcacaggaagaagcattcctgttaagaagagttactaagttacccatgtggttcggttgtagattttactctgttttgttggttggatggtccagtaattaacgtttgagctgccagttttaagatgtactcctagtagtattagaaattgttttcctctgttggttgtgattgttgtggtgggcacgctgtttgaacactttgtacaaggagttgtaaagcaggtccctcggcttgattcttgatgagtatagtagtattttgattggttgag

SEQ ID NO: 1730 - DNA, 853 bp, Oryza sativa
  ref <308>: DATABASE ACCESSION NUMBER: AK059737
  ref <309>: DATABASE ENTRY DATE: 2001-12-06
atccatcgccggcgacgaggagacgctgactgaacgaagcttacctagctactcgatcgatcatccatcagtctagatagatatggcggctttgaacttcaaggcggtggccgccgtgatggtgatggcgatggtggtggcggcgccgggggcgtcggcggcgataacgtgcgggcaggtggggtcggcgatcgcgccgtgcatctcttacgtgacggggaggggtggcctcacccagggatgctgcaacggcgtcaaggggctgaacaacgccgcccgcaccaccgctgaccgccaggccgcctgccggtgcctcaagaccctcgccggcaccatcaagtctctcaacctcggcgccgccgccggcatccccggcaagtgcggcgtcaacgtcggcttccccatcagcctctccactgactgcagcaaggtcagctagatcgattaatcctgcgtagaccgaccgatcgatatatcgatcgatgctggctcgcagttgatcaactagccaaaataatagctacagtaaaaataacagctggggcatatcattcagcgctggtcatctctctctgtatctctgtatactttatgttgcacgctccgtgcgtgcatcagcatgctatcttaattttcttgagtctgtacactgctctgtgtacgtgtaatcctacgttgatgaattgcatcttgtccagacttggacctagctagctacgtactccagcttcttgttgctgaggcaatctgtagtaatttccttgttacattattcccctgtcccctctactccctccgtcccataaaaaataaacctaatatactaaatatgacacatatattctattactac

SEQ ID NO: 1731 - DNA, 1001 bp, Oryza sativa
  ref <308>: DATABASE ACCESSION NUMBER: AK104107
  ref <309>: DATABASE ENTRY DATE: 2002-08-28
agatgacctcgccgccgccgccgccgtcgtcgttgctccgccgcctcccgaccacgcgctgctgctgctttgcctccgcgtcgagcggctggagcgcgagtgcgagcgtgcggctcggatccctcggcgggaagcagcggcgggggcatcgcggcgtggcggtgatggcggcggcggcggcagggggaggaggcttcgaggcgcgcgtggcgcggatcgcgtccaccatccgcgtcatccccgacttccccaagccagggattatgtttcaagatatcacaacaatgcttctcaagccagatgcatttcgtgacacgatcgagctcttcgttgagcgatacaaggacaaagggatcactgtaattgctggtgttgaagctagaggattcatttttggtccgcccattgctttagcactaggtgcaaaatttgttccattgaggaagccaaaaaagttacctggtgaggtgatctcggaagaatattctttggaatatggtacagataaaatagaaatgcatgtaggagctgtggagccaaatggccgggccgttgttgttgatgatctaatcgctacaggtggaaccttatctgcagccgttaaacttattgagcgtgctggagcagaggttgttgagtgcgcatgtgtcattgaactaccagaactgaagggtcgggacaagctggggaacaagccagtttttgtccttgtgaaggcagactaagcggaatgaaacaactaagggcctctcaagttgtccctattaatatcagtgtccttctcgaagcatgttggaagcaactaagatatcggtcgtgacaatattagcttgttctatccagtgctctgcaataaaagtctcatctttaaatttgtaggcacatgagttatttgggaattcggacttgaatgatccttgtaatacatcaaaacacggcataattttttttaaaggagtgccaattattcatggggaatgagaatcacctattttggagtt

SEQ ID NO: 1732 - DNA, 1198 bp, Oryza sativa
  ref <308>: DATABASE ACCESSION NUMBER: AK059738
  ref <309>: DATABASE ENTRY DATE: 2001-12-06
gactcctcatcgtgagttcgccggctcgctcgtcgccgatcccatcctccccgcgagcgatccggggcgccgtcgctcgtcctgctgctgcttccgccgaatcctgtttggggggttcaatcggatccccatgtcccatgttagatccgcatccgccgctgccgatgcggcgtcggattggcagaaggtgagggcggagtggttcgccaggttcaaggaggagtacgagaggaaggtcgcggagcatcccgacgtcgactggtccgacgagctggccgtcgacgcccgccactatcgcgagagctgggaacgcatctatgcaagagcctacggccccttcgacaaatccacgtctatcccacctatgcgatatacggctgagcctgtgccattcgatgcatctgaacaatatacgctgcagatcttctgtgtaaaaatcaaagaattaaggcggggcttacagtggccgatccatgtgtttggtctcattgctgcacgggacacaattgatcacaatcgcaatatggtcttcgaccgcactagggatgactgccaaaccctcacccaagaggatccatatctactactgacaggccctacccgtgctgttgtggtgtgtgatcctgtctaccttgaggctgtgctaagagtcaagggctctactgaatcagaggatgaagatttaagctttttcactgtaccgctcaccgatgtcaaccgccctagggaaacatgcctgattactagagagtacaccagcaagcttagcacgctggagctgacgtttggctatgtcgttcgctccgtggaggccacgatcaaggcgcgtatcgttgatgggtcatggccagaagaagatggttcttcagctcggtttactgcctgtacctccagcctgaaacacaatggagttttgttgcttgattctggagataagaggaggaagatgcgtgttgatgccgatggcgtggtagggctctcgcggcgtgtggtttctgttgagtttgagggggagctggaagtttctgtggtgacatttgatggtagtaatatttgtagtaagatggaagctgagataaggttcgtgcctgaggaggtcggtgaaagctgtgttgagcttgatgttggcttttgtaaaatggagatcactgttgcctggtcatgtctttctttatcatgtcgatgatttgggggtagt

SEQ ID NO: 1733 - DNA, 1044 bp, Oryza sativa
  ref <308>: DATABASE ACCESSION NUMBER: AK059739
  ref <309>: DATABASE ENTRY DATE: 2001-12-06
atgcaaactaaacccatcaccatggcaccgacgtcgatgctccaccggagcctcctctgcctcgccgtgctcgccgcggcggccggcggcggcgctgctggttctccgcggttgcagtgcctggagaacccgccggagctgacggccgccggcgacggcgaggccggcgtggtcgtccaaaacctgggaggattcgcggcctacgtcaccggcggcgccgcccactccggccgggccatcgtcctcgcctccgacgtctttggatttgaagcaccattgctgaggaaaatagctgacaaagttggtgaagcgggatattacgtcgtggtgccagatttcttccaaaggcgaccttacaatggagacccaagtataaacattacaaaatggatcatggctcactctccggtgaaggcagctgaagattctaaaccgatctttgctgctctaaaaagagaagggaaatatgttgttggagttggaggttattgttggggcggaaagttagctgtcgaggttgcgaaaaccaatgaggttggagcgattgtcatctcccatccttcatcggtgactgctgatgatatgaaagatgtcaaatgccccattgaaatccttggagctgagaatgacgctgtaacaccaccaagattagtgtaccagtttgttaatgccttgcgccaaagacctgaggttgattactttgccaggatctttccaggagtggctcatggctttgcttgcagatataacgccagcaacccgtttgctgtcagaactgctgaacaatctcttgccttaatgcttgactggtttgagaaacacttgaaatgacaatagctaatcatgcatgtaatgcaaggccagtgcaattgtttatttccatcaaaatacattgctagtgtccatgtatatcctggtgttaagtgaaacttatataaataagcactagtgtaaagtgaaagtatgtgttgaatatggtgcgaagtgaaacaaagtgtactttatgaagtgcaaaatgcaaactctttttgttccgaagcgacc

SEQ ID NO: 1734 - DNA, 1056 bp, Oryza sativa
  ref <308>: DATABASE ACCESSION NUMBER: AK059740
  ref <309>: DATABASE ENTRY DATE: 2001-12-06
gtcttgagtctttacgaacaaatccctatcctgcataccgccatcgtctctttctcgtcgtcgccggcgacgcctcccgccgccgccgaggatgccagtgagggtggtcgacaccgcaaccccatcctcccagcccacctcaggtcaagatgcaaatgctgggcatccgtctcctcctagctgttccctcttaagtgctggaagatgttatgctggaacccagaatgtctctactatacaaaaagaagaagcttggaaagttaatgtgcggatcaatgactgtgatcttgaacagggttatttatgtggaacaatggaagcagttaatgttcccttagctgatacccctgtggtaacattctgggagggggagatagtggatgctaaaaattatacatttttcactggcaagtgggaggcatccccagaggatgatattagacactggtccaagttcccatcatttacacctcttctgagtcagatagagacagatggtggcaagtctgtggacttcagcaactatgcttacatattcatgagatggaaagagcagtactttgtcaatgttggagtggactgtgggttgaccatagctggtttctactatgtctgcttttcatgtagcgatggttccattagcgggtattattatgatccaaacagcagtccgtttcagaagcttgaactgaagtgtaccaatgagaaagattctggatttaccttttcatcctacgagctgcagtgagagactgacaggcctgttgtcattatagtatttgcggatgttaatatacacaatgtgtgtactgaactcataattttgaatggcgtcccattaaaagagctgagatggcatgtttgtaacagtgattttgagcaagatgtattttattctctttgtaatatgattataagctggtaaaatttctaatttgaacctacctgtgtgttctttttgtgctaatcacggcatggttatgtccagaataaataagacaagaatgtgagggctagttgctcgttcaaagaaatatatatacttctttccagagt

SEQ ID NO: 1735 - DNA, 780 bp, Oryza sativa; identical to SEQ ID NO: 400
  ref <308>: DATABASE ACCESSION NUMBER: AK104108
  ref <309>: DATABASE ENTRY DATE: 2002-08-28

SEQ ID NO: 1736 - DNA, 999 bp, Oryza sativa
  ref <308>: DATABASE ACCESSION NUMBER: AK059741
  ref <309>: DATABASE ENTRY DATE: 2001-12-06
atgcttagattggcctgaagggggagaagctgggggtgcactccgtcagcgggagctcctccgtggagtggggcggcgccgccggcaagcagccggtgacgtggcacagggcctacttcaacgcgccggccggcggcgcgccggtggcgctggacctcggcagcatggggaagggccaggcgtgggtgaacggccacctcatcggccgctactggtcctacaaggcctccggcaactgcggcggctgcagctacgccggcacctactccgagaagaagtgccaggccaactgcggcgacgcctcccagagatggtaccatgtcccaagatcatggctgaatcctagcgggaacctggtggtgctgctggaagagttcggcggcgacttgtccggggtcacgttgatgacgaggacgacatgaacaggaggaagaattgaagtggagatgatttgaattgtggataatttagcagggggaattgcagaattggggatttgggagcgaaggaaagtgggggcgtatagcaattatctatacatacggcgtagatacggatacggctgggtatacgtacatacgtatacgtatatgaactggtagagtactgttatttattgatggctgccgcgctggccggccgtacgccggagcggctgcaggaactgcggctccggtcacggctgccggcggccggtgtacggtcgccgtcgattatttattattttactagttatttattctgagccgtggatgatggctttgagatcagtgcacaggtgcttggagccttggatcgctttactctctctctctctccaattttcttcagttctatgagaaaatttgcaacgttgagttgtaaatgggaacagcacttagaattatgaatgataaattattgtcacctgatttataccaagagggaataattattcttttgtactatattgcaagttttctttgtccttcccagtaattaaatggtgagatttatacg

SEQ ID NO: 1737 - DNA, 972 bp, Oryza sativa
  ref <308>: DATABASE ACCESSION NUMBER: AK059742
  ref <309>: DATABASE ENTRY DATE: 2001-12-06
aattttccaaggatcccgtttccgtttcgaggtgcccatggcgctggcggcgcagctctacggatcggcggcggcggccgcgtaccggagacttccactctacggagttccttcgtcatgccggtggccgcggactcctctcgccgctctcccgaagctttccatctccaccggtggaatgggtatgaatccgtttggtgttggtgctaaagtttcaataaaatgtacaaatgggaccactcaggttgatgagttaaacttcagatcaaatcaaactgaggaattagtagaaggagatgcagatactgttacccagaagaggagtgcaaaaatccatgatttttgccttgggatcccttttggtggtcttctattctgtatggggcttctaggatacattttttcaagaagtaccataagccttgttttaggtgttgcaccagggctcaccacgctctttcttggtaccctcagtcttaaattctggaggagtggaaaatccagtttcatatttatcttgggccaagcagcaatttctgctgttctagcatggaagtattcccatgcctacatcttgacaaatagaatcctcccctgggccttctatgcatctctgagcactgccatggcttgtttctacgcttatgtgctgctctccggaggaaatccaccacctaagaagaagatggcagcaactccatcatcatagagcaggatccaggcattttcttagtgattaacgcgacaggatgatttggcctttgtgccttttaatgctttgtctgcaagtataacagaattttgagttatcatcccatttgtatattccctaatcttacattctctgtggattttggttgttgtagcgtgaagctttttgaacaaataattctgcaggatggcaatccatccttactgaacattttgctctttttttttccctccaagagcataaataaaggatatgtgttt

SEQ ID NO: 1738 - DNA, 1028 bp, Oryza sativa
  ref <308>: DATABASE ACCESSION NUMBER: AK104109
  ref <309>: DATABASE ENTRY DATE: 2002-08-28
acgaacacccgctctcccatatctcgtctttcacatagtttcatcttctcctatccacaggtataccttagcgttccattcagagatttggcatgttctcttccatgcactgctgcctcccttgatgtgcagcaggagctgttcatctttactcctttaggagttcttcagattgatcagaggcagtagccagcccattagacaaggttacgcattcaggcgccatggccacctcctcctcgccgctcacagccctatactcctcgttcctctcatatactccttccacgccatccatggcggcgctgccccggcggcgaagggccggctgccgctaccctcgtatccaggccgtcgatctcgaccagaacacgatcgtggcgatatcggtcggcgtcgtcagcgttgccatcggcatcggtatcccggtgttctacgagacacagatcgacaatgccgcgaagagggataacacacagccgtgcttcccctgcagtggctctggggcacaggtgtgcaggttttgcaccgggaagggaacagttactgtagtgatcggcggaggcgagactgaagtatcaaactgtgtcaactgcgatggggttggctcgttgacatgcaccacatgtcaaggctctggaattcaaccacgctatcttgaccgcagggaattcaaggatgacgactaagggttttgttattgctaatgatggtatgccatattattgtctgatctgacaacgccataatctggagaggtgcacatttgagaattgatctgatagttttgtgttgtattatatgtccatttttggtaaatatgtatgtatgtcttctgaagcgtctgaaaaaaatggaggccctttataattccagcagagaaaaatggctgttctccagtggacaatgccgatgactcaagttgtagtgttaaacattctgcaaggtactgtctgttttgacatgtctttatgagtgttagcctacaacaatagtgcaatacaaccttttgatgccttctttttttt

SEQ ID NO: 1739 - DNA, 1047 bp, Oryza sativa
  ref <308>: DATABASE ACCESSION NUMBER: AK104110
  ref <309>: DATABASE ENTRY DATE: 2002-08-28
atcacaagcacccacaccaaccaaagatgagcaacaccaccatggctatttccaccatccttctcttcctcctcgccggcctcgtcgccgcccacggcgacggcgacaccatgatccgtctcccaagcgacggcgccgaagcaccaccacgcccgcccaaaccctgggactgctgcgacaacatcgagatgtccccgctcgagatcttcccgccgctgtaccgctgcaacgacgaggtgaagcagtgctccgccgcctgcaaggagtgcgtggaggcgcccggcgacttcccccgcggcgccttcgtgtgccgcgactggtactcgacggtggacccgggccacatgtgcacggcgccggatcagccgacgacgaagaggccgtggaagtgctgtgacagcatcgtgcagctgccgcagaggatcttcccgccgttctggcgctgcgacgacgagctggagcccggcaagtgcaccgccgcgtgcaagtcgtgcagggaggcgccggggccgttcccggggccgctcatctgcgaggacgtctactggggcgccgacccgggccccttgtgcacgccgcggccatgggggaaatgctgcgacaaggccttctgcaacaagatgaacccgccgacctgccgctgcatggacgaggtgaacaagtgcgccgccgcgtgcaaggattgccagcgtgtggagtcgtcagagccgcctcgctacgtctgcaaggaccgcttcaccggccagcccgggcccatgtgcaaaccccgagcggagaactagctagctacagatgatcgatgatcgatctgtgtgtccatcaataaaactcgccctagcttgcagctagctgatcgttcgttcgatcattcagagttggtatagctagaggctagagcttagctccatccagatttttcagtgctctgcagcttttgtgcatcttgcatgctttgttagtttgtgtgctccatgtgtgtgggtgtgtttaatttgtccctgttcgcttgtgtggaccaagagggaaaataaaatatatatgcaacgc

SEQ ID NO: 1740 - DNA, 1029 bp, Oryza sativa
  ref <308>: DATABASE ACCESSION NUMBER: AK059743
  ref <309>: DATABASE ENTRY DATE: 2001-12-06
atccgccgcggcgccgccacactgccgtagccctcacgcacgtggagggcgacacatcggcgcacaccgccggctctccgcctcgcacaacggagcgagggcgtggtgtgcgtgcccgccggccgccgctagctccccacttcacgcccctctctttgcctcgccttctcttcttcccactcttctcgtgctctcgccggcttttctcctccgtcgtcgttggcccatcgatggtagttcgtccccaatcaagtgccattgtggcaacgtctatacaaagcatcatctcgacggtctgcgagcttgagctcgaaatgcggtgtttccccatctcatgcgaatcatttgggccttgtgaatctcaactcccgaagtgtccagggtgaatgagtgtatccgtctccatcgtcagcctgctgatactcagacaatgctgatctaccatccctcctttcaagtttcgtagttcaggtcaacattcatgacttcgacaaacagtctgccaccttcatcagctcagccactggggccatcaccatctcctacatcatgaggatatgcacaatgtgctttgtacagagggatcgtgatctaggtgtttgcaaagagcatgcgtgagggctatataccattagaggagctcttacagacaatgcacagacaatatagtatttcaagcatcaggattttttttcttccctttacccatcatcattctctgcggtgaggactactagggagggagtttctgcggtaatatatgcaacaccaagcatatccgatatacttcccgtcagtgcaggagagtagtttagaggttgcataagtgcatgtcattgctggagtgtaccagtataaaatgtgctgaaattatttcgtagctaataaagtaaatttacaaccttttgtttatacgggttactggtaattagtaagtctctctgacgtgttccggctgttatgcttaattccatgtccagtttgtagttctgttggaccttcaagcaattatattggttgttcggtgac

SEQ ID NO: 1741 - DNA, 970 bp, Oryza sativa
  ref <308>: DATABASE ACCESSION NUMBER: AK104111
  ref <309>: DATABASE ENTRY DATE: 2002-08-28
atcgagaaaccaaagctccagcaatcggcggcggcggcggcggcccgtgagaggcggtccggcgacgatggttcacgtcagcttctaccgcaactatggtaagacattcaagaagccacgtcgcccttacgagaaggagcgtcttgatgcagagctgaagctagtgggtgagtatggactgaggtgcaagcgtgagctgtggcgtgttcagtatgctttgagccgtatccgtaacaatgcaaggcatctgctcacacttgatgagaagaatccacgccgcatctttgagggtgaggcactgcttcgccgcatgaaccgttatgggctccttgctgatgggcagaacaagcttgattatgtccttgccctcactgttgagaacttcctcgcaaggcgtcttcagactcttgtcttcaaggctggcatggccaagtccatccaccatgctcgtgtcctgatcaggcaacgccacatcagggtcggcaggcaaattgtcaacatcccgtcgttcatggtgagggttgagtctgagaagcacattgacttctcactgacaagcccattcggtggaggcccccctggtagggtgaagaggaagaaccagaagaaggcaagtggcggtggcggtgacggtgaggaggaagatgaggaatgagaacagaagtttgcaactagttgtttccgtaatgatcataaaactctgtgctgagtaactaggcccaaattctgtagcttgcctatctgggattcagaattcaagcaggttgtgcttcaggtgttggtttatgttaaccctttttggcattatgttaggtatagacttgtggttaatgctgttttatggattcgtttcatggtaatcctcatcgtaccagtgcgcttgaactagtgatactcactcgtaccaatgctgtttttaatgtttttatggattcgaagttgcaacatggattatggagttgttaagatt

SEQ ID NO: 1742 - DNA, 1019 bp, Oryza sativa
  ref <308>: DATABASE ACCESSION NUMBER: AK104112
  ref <309>: DATABASE ENTRY DATE: 2002-08-28
gagagaggaggaggaggcggactcgccggagccggaggttgccggaggcggcggcggcggcggcatcgcgctcttctccttcgctgcttctccggggaaagaggcaaggttcatcaatggcaactccaaatacctattcagtccatatctcctcagaaacccacaggattgaggcctggttggcatctgatgaagctttagctaggcagttgcaagaggaggagaatgcacatgatgctattgctacaagagaatttgctggtaacgcatccttggaaccatcgtcaccagctgttgagtacagacctcccaataatgcagctcaggttgcaacggaagacaatgttgaccctgataatatgtcttacgagcaactacaagcattaggggaagcagtaggaaatcaatccagaggattatctgatgacctgatatgctatttggtgccttttaagaacaaatgcagcttcttctccaggaagaagaatgatgaggaatgtgtgatctgtaaatcgacttataaaagccgacagaaattgataagattgccctgcagccactgttaccatgcagattgcataactcgctggcttaagatcaataaggcatgcccagtctgcaatgaggaggtatttgggtgaatcacagcgcttgtggcaacgctggtgatgtttgcgttgtgttcagacacgttatgctcctacaccctatgctatacaccggtgctcaaggaaaatgcgttttggtatactcgtactactaactgaaccatgccatggcccatggctgtgatgtgtccatccaactgagttttatcacaaatagataaatctgtgtgtgtactagtactatggttgccatttttctggtaatgcaacctagcagaagcagctaaatagatactctatgtattgcgccatcttttacatgatctctgctgtggaaagaagcacaattgtgaatgttctacacccctactctgccatcttcagttaattcagcaatactgcatttgctct

SEQ ID NO: 1743 - DNA, 1021 bp, Oryza sativa
  ref <308>: DATABASE ACCESSION NUMBER: AK104113
  ref <309>: DATABASE ENTRY DATE: 2002-08-28
tgaaagctggaggagctcaggccatttcagccatggcatggggaacagtctcatgcccaaaggttgaaaaaatatttggacctggaaatcagtatgtcacggctgcaaaaatgattcttcagaacagtgaagccatggtttctatagacatgcctgctggcccttcagaagtattagtgatagcggataaatatgcaaacccagttcatgttgctgctgatttgttatctcaggcggaacatggcccagacagtcaggttgttctagttgttgcgggagacggtgttgatttgggtgctattgaggcagaagttagcaagcagtgctctgctcttcctaggggagaatttgcttcgaaagctcttggccacagtttcactgtttttgcgaaagacatggttgaggcaatttcattctccaatatgtatgcccctgagcatttgatcatcaatgtaaaggatgctgaacagtgggaggatcttgtcgagaatgcagggtcggtcttcttgggacaatggaccccggagagcgtgggcgactatgcaagcggcacaaaccatgtccttccaacctatggttacgcaaggatgtatagcggcgtgtcactgaactcattcctcaagtacatcactgtccagtccttgtcagaggaagggttgagaagtctgggtccgcatgtggcaaagatggctgaagtcgaaggactagaggctcacagaagagctgttaccctcagacttcaggacatcgaagccactgtaaccgtgtagatttgttaccatgattgttctaggggccaacttggatgcagagaacaagaatctgtgaacaccctaatgagaagggatggtccagctgtttctcgaaataaggctcatccattttgatacatctttgaatataaagtttgtttgattgtgttacactttcaagtattcaagaggacgaaatctgtgaagactgtaaggaaaagggatatgatccagctattactcgaaataaggcccatccattttgaatc

SEQ ID NO: 1744 - DNA, 961 bp, Oryza sativa
  ref <308>: DATABASE ACCESSION NUMBER: AK059744
  ref <309>: DATABASE ENTRY DATE: 2001-12-06
ttttgctgggctaatcaatctcttcctccggtccgccgcatcaccgttcctcccggcggaagcagcggccaacaccggagcgcagcaagcatgtccggggcggcggcggcggcggcgcgggcgctgcccaaggcggtgaccttcgtgacgggcaacgccaagaagctggaggaagtccgcgccatcctcggctcctccatccccttccagtccctcaagctcgacctccctgaattgcaaggtgagccggaggacatatctaaagagaaagcacgaatggctgcatcccaggtgaatgggcctgtacttgttgaggacacctgcctatgcttcaatgcactcaaaggcttaccagggccctacataaaatggttccttgagaaaactgggcatgaaggtttgaacaatttgttgctagcctatgaagataaatctgcttttgctatgtgcatcttttctcttgctcttggaccaggagaagaaccaatgacattcgttgggaaaacagcaggaaagattgtgcctgctagaggacctgctgattttggatgggacccagtattccaaccagatggttttgatcaaacctacgctgagatgcccaagtcagtgaagaatcaaatatctcacaggggaaaagctcttgctttggtgaaagaacactttgcagctgccaactataaagttcagaacgatggttcagcttgaacttggtgatgatccgactccgttgcgattcttgccacttcaccaagttgtgacaaccaattaaagatgtcaaatacattaaatacgtctcgcctagctatctgcttgtgcaacatgctcggtgcctgaatctgaatgggagaataagtatcttcttcacctatgcaaagtgtagcacaagtatcttcttcacttatgcaacgttaatcaggcagaagaacatgctgcagaagtgcagatgcatcttaatcat

SEQ ID NO: 1745 - DNA, 985 bp, Oryza sativa
  ref <308>: DATABASE ACCESSION NUMBER: AK059745
  ref <309>: DATABASE ENTRY DATE: 2001-12-06
ctatatcagctatgggatgtcgttgcttgaggaaaatgggcatgatgagattgtcatcaaagctatgggaagagccatcaataagacagtcatggttgttgaattgatcaagagaaggatcggtggtcttcatcagattacatctactgaatcaattgacatcacggacacttgggaacctttggaagaaggccttctccccctagagaccacccggcatgtatcaatgatcgccataacattatccaagaaagcactggatacgttatctccagggtaccagccacctatcccagctgaagaagtgagacccgcttttgactatgaacacgaagaatctttccccactaatcgtggaagaggccgtggtggtggcagaagaggcaggggcagagccatgagcaatggtccccccgcttatgattatggcgaggagtgggaagaggaaggagattattacaactacagaggcagagggagaggccgatttagaggacgaggacgtggaagaggccgtggtggctactacggaggtggtcgacgtggtggatatggctatgattacggttatggcggcaggggggactattgtgaagatcagggcgaatactttgaagaaccagaggactacccccctccaggccgtggacgtggcaggggaagaaggggcggaggaccgggaccattccgtggtcgcggccgtgggcgtggtcgattctaagatgaaatcaggaggaggtgcccttgaagcttgagaactcgtgtgcttaaattatctgataatgctgttctgtatgggggtttcgacatgaatccgtatgccccatcagtatgtttttacttcccgtggcggtgtgactgattgggcaaattttgtggctggatcttggttttgtagctaggcctgtcctgtcagcaaaagcaacaacaaacaaacaaacaccctgtgctgctgtttatttatcaacaacctaggtttccttcc

SEQ ID NO: 1746 - DNA, 962 bp, Oryza sativa
  ref <308>: DATABASE ACCESSION NUMBER: AK104114
  ref <309>: DATABASE ENTRY DATE: 2002-08-28
aactacctccttccctcctccatctcgacacctcctcctcgtctccggccgccgcttccccctcgccgccggcgcctcctcgagaccgtcgagatcgagatagagagagagtgatggggtgggcgacgcggttcctggcggcggtctgcttcttcgcggcgggcgtcgtcttcgcccccgacgtcctcctcggcgcccgctccggctccggctccggcggcggcgccgccgcggccgccaaggtggcccacctcctctgcttcgccacctcatggggcgccgccctctgggccaccttcatcggcggcatcatcatgttcaagaatctgccgaggcaccagttcgggaacctgcaggggaagttgttcccggcctacttcatgctcatctccgcctgcgccgccgtctccgtcgccgccttcgcctacctccacccgtggaagacggcgtccaccgtcgagcgctaccagctcggcttcctcctcgccgcccttggcttcgacctctccaacctgctcgtgttcacccccatgaccatcgagatgatgaagaagaggcacaagattgagagggacctgagcattggtgaggaggttgggtggtcgaagaatgttcaggtggcaaaaaacaaccctacccttgccgcaatcaacaagaagtttgggatgatccacgggctctcgtctttggccaacatcatgtcattcggcagcctagccatgcattcctggtaccttgctagcaagcttgagatgtgaagtgaacaaacacccttgaccaacattcagttgaatcagatctgattgcatcacaatattaatgtggcaaagcctcatttggagagcttgcaaatatatttacgtgtacaatgattcgactcgagattagttgtacttaaaataatgtacagaatccacgcatttctcgccagtttattataagttcatgaaccaaaactattc

SEQ ID NO: 1747 - DNA, 1140 bp, Oryza sativa
  ref <308>: DATABASE ACCESSION NUMBER: AK059746
  ref <309>: DATABASE ENTRY DATE: 2001-12-06
tggtgttagcgtagagcctgcagatggactggctcctgtttggaatagtgatgtcaaattttactgtgtcaaagattcttcgaatagccctgttgcttatttctactttgatccatattcaagaccatctgagaagcgtggaggggcttggatgaatgtggttttttctcgcagtcgtgtgcttgctcgcaatggttcacctgtcaggtttcctgttgcccatatggtgtgtaatcagaccccaccagttggtgataaacccagtcttatgaccttccgtgaggttgaaactgtgttccatgaatttggtcatgcgctgcagcacatgcttaccaaacaagatgaaggatttgtttctggtattcgtggagtagaatgggatgctgtagagctgccctctcagttcatggagaactggtgctaccacaagaatactcttttgagcattgcaaagcattatgaaacaggcgaacttcttccagaggaaatttatgcaaagcttgtcgctgcaaagaatttccgtgctggcaccttcagtttacgtcagatacgttttgctagtgtggacatggagctgcatacgacttacgatccaaatggttcattgtccatatatgatgtcgaccgaagagttgctgagcgaacacaggttcttgctcctcttccggaggataaattcctgtgcagctttagccatatatttgcaggaggctatgcagctggatactacagttacaagtgggctgaagtattgtcagctgatgcattctcagcatttgaagacgttggtttggacaatgagaaggcaattgaggaaactggcagacgattcagagaaacagtccttgcgcttggaggtggaaaatctccactcgaggtgtttgtgtctttccgcggacgggagccatcaccggaagctctgctcaggcacaacggcttgctacctgttgctgcattgtgataactcatgctcgattgtccccttcttttttcttttaacttgcgaaaacggcttgtaagatgttattgattgatggcatatcagcaacacgctaaaagtgccgtgtcctgcttacaacatgaaaaacaagttgctgtgcacaaccattatataatgatcatcgctgcttcttgccgttc

SEQ ID NO: 1748 - DNA, 1046 bp, Oryza sativa
  ref <308>: DATABASE ACCESSION NUMBER: AK104115
  ref <309>: DATABASE ENTRY DATE: 2002-08-28
aactttatcctcgctcactttccatctcacacgacggccacactgacgagtagtagacggtgaacagcctacagggaggaggcatgggggtagccgtgacaatggcgagctacgccgccgtcctgcgcccgcacgcctcgtcgacgaggactccgcgcgggcctcgtcgtcccgcgggcgcggtgccacctacgccgcgccgggcagcgctgcgagctactacgcggtctcctccggctgtcgctgccactccacctccgcgggagcgggtgcagcagcagcagcagccgggtgacggccagacgacgacgcggctctactcgctggcgccgtgcccgctcctgctggcggcgctgctgccgggggccgagccggtgcgcgccgtgttcgagccgttcgtcgagctggtcaagacgtggggcctccccggctggctcgtgcactggggccaccccggcaacatggccgtggtgctctttgcaatgggtggctacggaacatacctgggcttcaggatcaagctatcggatgaccctgaagagaaggccaaggccaaggacctccacccgaagctcctcgccggcatgttcttcttcttcgcagctggcgccactggtggagtcaccgctcttctcacgtcagacaaaccaatctttgagagtccgcatgctgtgaccggcatcatcggccttgcactccttaccattcagtctatcctgccgacattgttcgagggtaatccttcgctgagaaatgcacatggactcctcggcagcggcatcatgaccctgtttctaatccacgcagccttcgggctacagctcgggctcagcttctaatcctcagccacaacatccggggtttgcttctctgtgattagctctcagaggcatccctgttacacacatcgaagagaaatgaaacacagagagagttttctctctcttgttttccctttgtttcttttcaccctgcgaatgttgacaataatgtagacctggtgttggattgtgtattgacgacaacgaattccatcgtgttgcgct

SEQ ID NO: 1749 - DNA, 1227 bp, Oryza sativa
  ref <308>: DATABASE ACCESSION NUMBER: AK104116
  ref <309>: DATABASE ENTRY DATE: 2002-08-28
gcagcggcaaagcctccccgtcgtccagcccacgcagcgcaccgcagcgagcgaagccgccgcaatggccgcctcctccgtggcctcgactctcctcctctcgctctcctcttcctcctcgcccttcctctcccccacctcggtctccttcctcccatccgccgccgccgccgcctcctcctccccgcgcgtcgccgtcgccgccggcaagcagaaggcggctatctccgtcctccgcgcccttcgcgccgaggcggccaccctcccggttctctccttcaccggggagaaggtcggggaggtcgccctcgacctcaagtcggcgccgccctccaccgcgcgcgccgtcgtgcaccgcgccatcatcaccgaccgccagaacaagcgccgcggcacggcctccacgctcacccgcggcgaggtcaggggaggcggcaggaagccctaccagcagaagaagacggggaaggcgcggcgcgggtcgatgcgcacgccgctccgccccggcggcggcgtcatattcgggcccaagccccgcgactggtccatcaagatcaaccgcaaggagaagcgcctcgccatctccaccgcgctcgccagtgccgccgtggccgacgatgcattcgtcgtggaggagttcgacgaggagttcgccgcgggtcccaagaccagggacttcgtggccgcgcttcagcggtgggggctcgaccccaaggagaaggccatgttcttcgccacggattttgcagacaatgtgcggctcagcggaaggaacattggctccctcaagatgctaacccccaggactctcaacctatacgacatcctcgatgcccgcaagctcttcttcaccccggccgccattaactatctcaactccaggtatggtgccaccgtttttgatgaatatgaggatgataccaatggcgaggatgatggtgaggaggaagcagaggagttgcaagaaggagaagggagcgcagaggaggctgctcaagatgaggctgcagagactgaggctgatagcaattcctagggaaggaggtgtagatcgcgtgtttttcgtttgttggtctggtaattgcttccctgatgcagaagctttttggcttacttttgttgtaagtttataatgtttttttttcactgatgcagtatattagatcttcaaactgcacatatattttcaaatacaatgtcgtgtcaaccactgcatatttttcttcc

SEQ ID NO: 1750 - DNA, 923 bp, Oryza sativa
  ref <308>: DATABASE ACCESSION NUMBER: AK059747
  ref <309>: DATABASE ENTRY DATE: 2001-12-06
aaaatcacagacacaaatggaagcagcagtggctactccttccttgctcttctctagcccaacacccaggaggccttcctcctgcttgtcactgccgcctccttgcagcagcagctacgcctccaatggggcgaagctgcagcagccgcggctgcagttcgtcagtcagctaaccagcagaaacagcaacgggagtggcagaagaagcatttccattttgtcgctgaggtgctcttccagtggcactgacagcgcgtcttcttccgccacttcagaaagatgggttcttgagcctgcaggagacggcgattggcgtcatatcgggtaccgcgtcgcacgacccggcggcttccagatagcatccgaggcggtggtaacagacctggagagcacgaatggcacctacatcaacgagaggcgcctcagcccgggtttccccactcccatcgaccccggtagcctcctcatttttggcgacatccacctggccatgttccgtgtttccaagatggtcgtggatgtgcccagtgacgccagtggagctgagcaggaagcagctgagacggctcaagtatcagctgcagcccaacagaccaattaattagcgacctccatgtgctgcttgatgcatcaagacagctcaagaagaactagcttatcagtgctcccaaaggccgacatgaagtgcatatgttacgatcgacagtctcccttgcaaataagcgcatacatatgttgtgtgataggaatgtcacagagcaacaactctggatattaattaatagagggagcgcacataatggtagccccgtgatcaacttaaaatgcatttatcaagtaccaaagatgccaatattacaagtacaaaagtgtagcatgccaactgcgagactgcatgttgaattgaacgatatgccgactgc

SEQ ID NO: 1751 - DNA, 984 bp, Oryza sativa
  ref <308>: DATABASE ACCESSION NUMBER: AK104117
  ref <309>: DATABASE ENTRY DATE: 2002-08-28
aaaatccacactgatctcgtcatggcagctccaaatccttctgctactatggcgacggcggcggcgtccacgccggcgagggcttggtggcgggcggctgctccggcgagtgcctcaactgcagctgtaagctgcttccgagttggggccaagagcctcacagggcttcagatgacaagcacccgcgcgaacaaagttcggacagttcatgtcaaaagcggggaggcagaaggaagtccaagcacagagagcatcacccgcgacgaggaaactctgcagcgtgacttgcaaacagcgattcaggaagaaaactatgcccaggccgcgaagctcagggacgagctccgagtcctccaggaggacagcaggtcagcagtgctggcagcgaatgcgcggttctacaatgccttcaagaacggggatcttgtcgcaatgcactcggcatgggcgaagggcgaccatgtgtacgttgttcatccttcggcaggccggatatcgggctacgacatggtgatgcagagctgggagatggtgtgcgacgcggactacgagttccctctccagattgatctgcaggatgttgaggtccatgtgagaggtgatcttgggtatgtgacctgcctggagctggttaagaccaaagggagcagcagctggggaaggcaggttgcgaccaatgtgtttgagaaggttgatggcaaatggttcatttgtatccaccatgcctctcacttcgatgagtgaggctgaatttcttggagagaggaagagctgcaagtgcagatatggcgtgaggttttgcagtacaggcgtgagacatatacttcgctgttttcttaaggtccttgatatgacctttttgtagaaccctttttgtaccaatactatcatcgaatgatgctgctattttgaggagtattagtagtaggtacagacaaccagaaccctgatggaattgtaactcggcgtggctgagatattcgt

SEQ ID NO: 1752 - DNA, 986 bp, Oryza sativa
  ref <308>: DATABASE ACCESSION NUMBER: AK104118
  ref <309>: DATABASE ENTRY DATE: 2002-08-28
aaaagcaaccaccgtaccgcaaccgcaaccgcgagagccgagagagaagcctttttccccgatcgattcccttctctccgctccgcatcgccatggcctcctcagcaccgacgccgccgccgctcctcccggtgaccaacccggcagccgcggggtcgtccccggccgccaccgccgtgggatctgacgcgccgatcgcaaccccggcgttccggctcttcctgagcaagctctccgactcggcgcggcgctcgctgtccgaccggcggccgtggacggagctggtcgaccgctcggcgttctcgcggccggactccctctccgacgccacctcccgcctccgccgcaacctcgcctacttccgcgtcaactacgccgccgtggtggccttcgcgctcggggcgtccctcctcgcgcaccccttctcgctcctcgtcctcctcggcctcctcgccgcctggtgcttcctctacctcttccgcggctccgaccagcccgtcgtcctcttcggtcgcaccttctccgaccgcgagacgctgctcggcctcgtcgtcgcgtcgttcgtggccttcttcttcacctccgtcgcgtcgctcatcatctccgggctgctcgtcggcggggccatcgtcgccgtccacggcgcgtgccgcatgcccgaggacctcttcctcgacgacgctgacgccgccagcggcaacagcgcggcccagggtctcctgtccttcctcggggcgcccggatctagggtttgaggcggcggcgggcgacgagatctggtaggcttctttggctcgagtgtttcgcgttactctgtaattgatctggatctgatctcgttggatctatatcacatttgttctctaattcatcattctgcaatccgtagctacagatctactacttgtttacctatattttggatcgatgtatcactttgcgaagttgtgctgaatatattgagtctcttgacgagatttagtgtt

SEQ ID NO: 1753 - DNA, 1199 bp, Oryza sativa
  ref <308>: DATABASE ACCESSION NUMBER: AK059748
  ref <309>: DATABASE ENTRY DATE: 2001-12-06
gggtgtttcttgctctcacaatggcagcaattggggtgtcacacactagcaacctcacatcagattcttccaaggcaaaatcagctgtatcttctatattcgccatcgtagaccgtaaatctaggattgatccaagtgatgatgctggagtgagcttagaaccactaagaggcgatatcgagttccagcatgtgagcttcagatatcctacacgaccagatgttcagatctttgaagacctgtgcttaacaattcaatctggaaagactgttgctcttgtcggagagagcggtagcgggaaatcgacagcgatatcattgcttcagaggttctatgatccggatgcaggccatatacttctagatggagtggacattcaaaagtttcagctaaggtggctaaggcaacagatgggtctagtgagtcaagaaccagctctgttcaatgacacgattcgcgcaaacatcgcgtatgggaaggaaggggatgcgacagaatcagacatcgtatcctccgcgcaattggcgaatgcgcacaagttcatcagctcattgcatcagggatatgaaaccatggtcggggagcgtggagctcagctatccggagggcagaagcaacgcatcgcgatcgcccgcgccattgtcaaggatcccaagatcctccttctcgatgaagccacgagtgcgctcgacgcagaatcggagcgcgtcgtccaagatgcgctggaccgggtgatgatgaacaggaccacggtgatcgtggcacaccggctgtccacaattcagggcgcagacatgatcgcggtggtgaagaacgggatgatcatcgagaaggggaagcatgatgcattgatcggcatcaaggatggagcttacgcctccctcgtcgccctccatgtttctgctgctgccatttcgtagcagatctagcagacgccatggatgaaaagatcatggtttgttgctgaatctgtgagaggagcaagagactggtgtaactgtagcttgtgcaggctccagctcttgtcatccagcagcagcagcagaagaagaaaaatttgatgaacacaaatatgtcatgtatacatagatagataagatcatacaaagatgtgcaaatgtaaatgcaacgagttgtatgaatgaatgttcatatgatatgaagcagatgatgatgatgatatggatattcattggcat

SEQ ID NO: 1754 - DNA, 1164 bp, Oryza sativa
  ref <308>: DATABASE ACCESSION NUMBER: AK059749
  ref <309>: DATABASE ENTRY DATE: 2001-12-06
gcaaaacccacgcgaccccttcctcctccgcctcgacccgatccgatctgagccagagccagccatggcggcgactagggtttggctctccgccctcctcctcgccttcctcctcgccgccgcccccgtcgtccaagttgccagagctcagtccatggaagaagctgctacagctgaagttgttgatggggctgatctaggaatcgtcagtgatgatacacaagtttccagcgatgggcctctaagtccggctcctggtgtggagacagtatgtgtttttcccaaaaacgctggcaaaattgtgctagcaggtgaagaaactgaactactggttggcctgcaaaacgagggtgaatcaactttgaatgttgttgctatccattcaactctccatcttccttttgaccataagatgtatggacaaaaccttactgttcagaacttcttcaatgcatcagttcctgtctctgtacaagcaacctttccgtatacattcgccgtgagcaagttcttgcagcctggagcatatgatctagttggttacatagtgtatgagattgatcagaacccataccagaatgtcttttacaatggcactgtagaggttgttgaggctggaggtttactcagcgttgagtctgtgttccttattacccttggagttgcccttcttggtctcttcggattgtgggcatatggtcaagtacaacagctctcaaagaaaacaaagaaggcccccaaggtggaactgggaactggaactactgatgccaacatggatgagtggctggagggcactgcatttgcacagggaagcaaatccaagaagaagaaatagattggaggcccttgaactctagttaatcattttcaggatctagaatgagacagttgagggtagcccttcacaagtaacttttgcagacgatagatgagaaaatggaggtgttttaaaccgtagtttcgtggctgctgcacatgtttgttgacaccaaatttcgaccttgttgtgtacttttacatgaaagttttttcttgaaaaacacagttttgttcaaggtatatgctatggatgtgatctctgatcttatttgatctgtgacatgccgaataacataagttcgatctgagagatgctgaatcacataaatttttattagttgc

SEQ ID NO: 1755 - DNA, 985 bp, Oryza sativa
  ref <308>: DATABASE ACCESSION NUMBER: AK059750
  ref <309>: DATABASE ENTRY DATE: 2001-12-06
agttgccaagaaggctgtttcacatccattttttttggccgggagagagagcatctagctagggagagaaaggaagagacgagaggagagagatggccactgcttatgctcccatggcgagccagctgatgaagagcagcttggtgtgctccaagccgagggggctgtctggtgcttcgctgacaaggaggccccgcttcacagtcaaggccatccagtctgagaagccaacgtaccaggtggtgcagcccatcaatggcgaccccttcatcggcagcctggagacgccggtgacctccagcccgctggtcgcctggtacctctccaacctcccggcgtaccgcaccgccgtcagcccgctgctccgcggcatcgaggtcggcctcgcccacggctacctcctcgtcgggcccttcgcgctcaccggcccgctccgcaacacgccggtgcacggccaggccggcgccctcggcgccgcaggcctcgtcgccatcctcagcgtctgcctcaccatgtacggcgtcgcctccttcggcgagggcgagccgtccacggcgccgacgctgacgctcaccggccgcaagaaggaggccgacaagctgcagaccgccgacggctgggccaagttcaccggcggcttcttcttcggcggcatctccggcgtcctctgggcctacttcctcctctacgtgctcgacctcccgtacttcttcaagtagatcttttgtttgtaagtgcatgaccgggtgatgcatgtgtagatcgatcgatgatggaacatgtgtgtgttcatgtggtggctgatttgagtgccttctacttgtataaatgaaatgcatctgcacaagggcacaaacaggctgcctgcatggatatatggatggtgtgctgttgtaacttgggagtgttactttcttactttgcagataatttaaaatggaaagaaaaagttttaacaatgataattaatcagtttgttgtaatt

SEQ ID NO: 1756 - DNA, 1096 bp, Oryza sativa
  ref <308>: DATABASE ACCESSION NUMBER: AK059751
  ref <309>: DATABASE ENTRY DATE: 2001-12-06
aattgcctcagcttggtcttatgaagaagagttggagttgttcttggatttgtccacttgaggtcattgttcagataaggaaattgttcttctcgagcaaggaaaagatggcgccgtcgtcgccaccggcgatgaacatggcttgtgcgagacagggacgcctccggcagcgttatgaaggatgctatcgccttgtctctggatgcatcccttacatgatcaaggaggatggagaaaacagcagcagctcccttcaagatgatgatcatgtgctggaaaggctgcaagtgctcatgatctcgacgccgaagcgaagcgatctcatcttcccaaagggtggatgggaggacgacgagagcatcggcgaagctgcctgcagagaggccttcgaggaagcaggcgtcaagggcgttctaagtgggacaccactgggagaatggatcttcaagagcaagagcaagcagaacagctgtggcctgcaaggggcctgcaagggctacatgtttgctctccaggtgacagagttgctggagtcatggcctgagcagaccacccatggcaggagatgggtgccggttgaggaggcgtacggcctctgcaggtacgactggatgcgagaagcgctggacaagctcaaggagcagctcctgttcgccgccggcgatgacctccgcgcctcgccgtcgccggagctggactcgtcggccggcctgtacatggtgatgccaccggtggctgaaggagctgtggcattgtgctgattaatgctcctgatctgctgctgctgctgctcatgatgctgatgatccctgagaggcagagaacctgaacttccaggaggcaaagtttcagatgttgagtggtgatggttcaggctttctctcacctgcaggaagggttgcagacctgcagtcatgcaacaatttaagatgttaattctgcaatcatcaaaatgatgtccaatctaataactgttccttaatccttactgctgagaactaatgggaagaaagtagctaaccatcttctggactggatgaaattgtaacattgcgacatgttcattaaaagtttgagaaatctcccgtgttccaag

SEQ ID NO: 1757 - DNA, 1255 bp, Oryza sativa
  ref <308>: DATABASE ACCESSION NUMBER: AK059752
  ref <309>: DATABASE ENTRY DATE: 2001-12-06
gcttgatgcttcgcacgcgcgtgacggcgccgccgttcctcgcctctctcctctctcctctctccgccactccgcctctcccccatcccatcgtccacccggcccgagctgcggaggcgcagacctccgccgctgcgcccgcatcggcacagctacagaccaacgcggccgccggcgctgggagctcgggacgcgaggacagcggtacagccggacccccggctgactgacgcagtgccgcctgcctctgcccgtcgcggcgtcgccgttagcctcttctcttgctctctgccctctgcgctacggctgccggctcgtgtgactcagtggctgtgaagtccttcccagcgggcgagacggcgacccggctcctgcagttgagttgccatggatattgagcgacaagttcaagagacatttagtaaccactataaaagcgtggtgctaatcagaaggggatcagatggcatcggcactggctttattattggtaaaacaaggaaaagttatgttgcgatgacatgctaccatgtcatctcagggttatgatcttgcaattattaaagttaatggagtgagtggagaatgcccaattcttcaatttggtgatttagaaggtgtggcgcatagggccaatgtcgttcagcttggatatatccttgggtcacagtttgctttaaacttggacccctcagtatctcctggatcagtcataagaccggcaaaccaaaatggaatgatgggcagccaggatgttgtctacagtgccgctgcaagacatggcgcctcaggatctgcagtgatgtttgatgataaagttattggagtactatattcaatgtctacaaatagccaagttgcgtatgctcgatcaagtactactgttcacatggccttgaagaattggttgcatccaaatgatgctgcaataaccactgagaagatgatagaacttgtagtaaaacctctaaatgattcagagttagacgattgattggactggctatggattgcaagggcatgtggactcaatgggtgtagactctattaatgtaatcgcccatggttgtttgttatttttattgatgtcctctttccatgggaatatgttgtctatgtaatttttaatgtttgaaattatcaatagttagctagctattagatcttgttcttttcagctgatggacagcttacggatagttattgcatgcttttaaagctagaattcctttcaaaaaaaaatgttatcgttgac

SEQ ID NO: 1758 - DNA, 1135 bp, Oryza sativa
  ref <308>: DATABASE ACCESSION NUMBER: AK059753
  ref <309>: DATABASE ENTRY DATE: 2001-12-06
gattcgatgcctcatatgtatcgtcaaaactcgatagttggaaaaccatggcaccagcgttgctctacccgaccatcctcttcctcgcagcggccgccgtcggcgccgccgctccgccgcactcgcagtgtctcgacaacccgccggacctgacgacggccggtggcggcggcgaggccggcgtggtcgtccacgatcttggaggattcgaggcctacgtcaccggcgccgtccattccaggcggaccatcctcttggccaccgacatcttcggattcgaagcgccattgctgaggaaaatagctgataaagttggtctagccggatattacgtcgttgtgcctgatttgttccatggacaaccctacacatttgaccagaaccgtacagaatggctcagtgctcattctccggtaaaagcagctgaagatgctaaaccaatctttgctgctctaagcaaggaagggaaatctattgttggagttggaggttactgttggggcgggaagttcgcagtggaggtagcaaaaactaacgaggttgaagcaattgtcatctcccatcctgcagcggtgactgctgatgacatgaaagaggtcaaatggcccattgagatccttggagctcagaatgacacagttacaccaccaagattagtttaccagtttgttcatgccttgcgtcaaagaactgatcagattgattattttgccaaggtctttcaaggagtgaaccatggcttcgcttgcaggtataacgccagcaaccctttcgaggtcaaaaaagctgagcaagcacttgcgttaatgcttgactggtttcacaaacacttgaaatgaagattgctaattaatcatgctaggaagaccagtgcaattatttcatcgaaataaaactctcgttctcgatataaaagtttgcatatcaagcagccatgcatttgatgtacactattttctttaaattatatggagtgaattaatagtatgttgtcgagttgatgttcgttatttatctataaataattatacggatgtacttgtgccattgatgttcattgctggctataaattacatgtggatgtacaactcaattttcacaagggtactatatatatactttagcaaaaccatc

SEQ ID NO: 1759 - DNA, 1069 bp, Oryza sativa
  ref <308>: DATABASE ACCESSION NUMBER: AK059754
  ref <309>: DATABASE ENTRY DATE: 2001-12-06
ccgaccgagactcctccatttcagcggcgcacgcggagagcacgcgacgcgagttcgtcgacgaacaaggctagtgcagtagttgttgctgcggagatggcggcgaacctggaggacgtgccgtcgatggagctgatgacggagctgctccgccgcatgaagtgcagctccaagcccgacaagcgcgtcatcctcgtcggtccacctggctgcggaaagggaacacagtcaccgctgattaaggatgaattttgcttgtgccatttagccactggtgatatgttgagggctgcagtggctgctaaaactccacttgggattaaggctaaagaagctatggacaagggagagcttgtttctgatgacttggttgttgggattattgatgaagccatgaagaaaacttcatgccagaaaggttttatccttgatggtttccctagaactgttgttcaagcacagaagcttgatgaaatgttggccaaacaaggtactaagattgacaaggttctaaattttgcaattgatgatgcaatactggaagaacgaattaccggtcgttggatccacccatcaagtggtagatcttatcatacaaaatttgctcctcctaagactcctggacttgatgatgttactggagaacccttaattcaaaggaaagatgacacagctgcagtattgaagtcaaggcttgaagccttccacgtacaaactaagcctgtgattgactactacaccaagaagggcatagtcgcaaatctgcatgccgaaaaaccaccaaaggaagtgactgttgaggtccagaaagccctatcataaactgccagttcttcagcctataaacatgacatgtgccgaaaaccccttacactgggttttctagatgtttaaactgctgccaacaccatgtggttttcattttgatttgctgtatggcgcaattgctccattttatcacagttttcgcttcacagtctgaaatttgtcaaaataatttgttggaatgaggaaagaagttttgtataccaacaccgatataattacatcaagtcaatcttgacagggt

SEQ ID NO: 1760 - DNA, 1145 bp, Oryza sativa
  ref <308>: DATABASE ACCESSION NUMBER: AK104119
  ref <309>: DATABASE ENTRY DATE: 2002-08-28
acagcacagcacacatctcgtccagtccatccatggcgagcctgagcgtgccgccggtgccgacggacccgcggcgcgacgcgatcgacctccacagggcgttcaaggggttcggctgcgacgccacggcggtgaccgccatcctcgcccaccgcgacgcctcccagcgcgccctaatccggcgccactacgcggcggtctaccaccaggacctcctccaccgcctcgccgccgagctctcgggccaccacaagcgcgccgtcctgctctgggtgctcgacccggcgtcccgcgacgccgccgtcctccaccaggcgctcaacggcgacgtcaccgacatgagggcggccaccgaggtggtgtgctccaggacgccgtcgcagctgctcgtggtgaggcaggcctacctcgccaggttcggcggcggcggcggcggcggcctcgagcacgacgtcgccgtcagggcgtccggcgaccaccagaggctgcttctggcgtacctgcgctcgccgcggtacgaggggcccgaggtggtcgacatggcggcggcggcgcgcgacgccagggagctgtacagggccggcgagaggcggctcggcaccgacgagaggacgttcatccgcgtcttctccgagcgcagcgccgcccacatggcggccgtcgccgccgcgtaccaccacatgtacgaccgctccctcgagaaggctgtgaagagtgaaacttcagggaactttgggtttggcctgctgacaatcctcaggtgcgccgagagcccggccaagtacttcgccaaggtgctccacgaggcgatgaaggggctgggcaccaacgacacgacgctgatcagggtggtgacgacgagggcggaggtggacatgcagtacatcaaggcggagtaccaccggagctacaagcgctcgctcgccgacgccgtccactccgagacctccggcaactaccgcaccttcctcctctccctcatcggccgcgaccgctaacgtcgattggtttcggtctctttgagcgtgtgttaagggacgcatttgttccatagcgcacaaacatggcaattatttatgtgcgtgtgtagtggtgtgttcgaacgttcgtttttcgtgtaataaaaaaaattgagtttgctgtct

SEQ ID NO: 1761 - DNA, 1109 bp, Oryza sativa
  ref <308>: DATABASE ACCESSION NUMBER: AK104120
  ref <309>: DATABASE ENTRY DATE: 2002-08-28
agaagcaagaattcgatcgagaatcaccatgatgacaagtagaatgttttcggcaatgcagatgctgatcatggtggtggtggcattggccgggctagctgccggagcgcgcgccggcgacatcgcgatctactggggccagaacggcaacgagggcacgctggcgcagacgtgcgcgaccggtaattacaggttcgtcatcgtggccttcctgcctgtgttcggcaagggccagacgccggtgctgaacctggccggccactgcgacccggcgtcgaacggctgcaccggcgtgggcgccgacatcaagtcgtgccagagcctcggcatcaaggtcatgttctcgatcggcggcggcgtcggcaactacggcctgtcctcccgcgacgacgccaagcaggtcgcggcgtacctgtggaacaactacctcggcggcacgtcgccgtcaaggccgctcggcgacgccgtcatggacggcatcgacttcgacatcgagagcggcgggggcatgtactgggacgacttggccaggtacctcaaggcgtactcgcggcaggggagcagcaagaagccggtgtacctgacggcggcgccacagtgccccttcccggacgcgtcgctcggcgtcgcgctcagcaccggcctgttcgactacgtgtgggtgcagttctacaacaacccgccgtgccagtacagctcgtccaacggcgtgggcaacctggcgagcgcgtggaagcagtggacgtcgatcccggcgggacgggtgttcctcggcctgccggcggcggcggaggccgccggcagcgggttcgtggagacgagcgacctggtgtcgaaggtgctccccgtggtgaagaagtctcccaagtacggagggatcatgctgtggtcgcggtactatgacgggctcacggggtacagcgacaaggtgaagtccagcgtttgagctagccagggtaagctcgtgtcaggtcggcgttcgcgtagaatcacacgtgccgcgcgttccctgcaagatggagtagtttctacacatttcagaacaaagcaaacatgtacaataagatggccggcttgtatactcatttagaagcagaaaaaattgtgag

SEQ ID NO: 1762 - DNA, 1151 bp, Oryza sativa
  ref <308>: DATABASE ACCESSION NUMBER: AK059755
  ref <309>: DATABASE ENTRY DATE: 2001-12-06
catcgatcatcagagctcgatcgggcgccatggatggggaggaggacagcgagtggatgatgatggacgttggagggaagggcgggaagggcggcggcggcggcggcgcggcggacaggaagaagcggttcagcgaggagcagatcaagtcgctggagtccatgttcgcgacgcagaccaagctggagccgaggcagaagctgcagctcgccagggagctcggcctgcagcctcgccaggtcgccatctggttccagaacaagcgcgcgcggtggaagtccaagcagctcgagcgcgagtactccgccctccgcgacgactacgacgccctcctctgcagctacgagtccctcaagaaggagaagctcgccctcatcaagcagctggagaagctggcggagatgctgcaggagccacgggggaagtacggcgataatgccggggacgacgcgcggtcgggcggcgtcgccggcatgaagaaggaggagttcgtcggcgcgggcggcgccgccacgctctactcgtcggccgagggtggcgggacgacgacgacgacgacggccaagttgatgccccacttcggcagcgacgacgtcgacgcggggctcttcctccggccgtcgtcgcagcatcatccgccgccgccgcacgccggtgccggcttcacgtcctccgagccggccgccgaccaccagtccttcaacttccactcgagctggccgtcgtccacggagcagacctgcagcagcacgccatggtgggaattcgagagcgagtgagcatccacactgttactactaggctactcatggatgatccatcgatcgccacagatcatgcatgccacgatcagaatttcaattcgccgcgaggacggatcaaacctgtactagatcggatcagagcaaacatagcagagaagatgatcaaaccaacagtgatgtgtacatagctttctgtagatcaaaaccccaggcagtctcctctccatccagccatcagcatgcgaaaattctctctctctttttttcccctccaagtcttactcgacttcgatgttgttatcacaacaccacatcatgtaatccagcaacacgccgagatgaaaaaaaggttaaaaagcttatagagttcgttcatttgatggatcc

SEQ ID NO: 1763 - DNA, 948 bp, Oryza sativa
  ref <308>: DATABASE ACCESSION NUMBER: AK059756
  ref <309>: DATABASE ENTRY DATE: 2001-12-06
acagatcgctcccagccattctctccgcgacggtctcgtcttccccacccctcgcctcctcgcgcgctcggtgagagaagcgaagaagaagaagaagaggaggaggaagaagccaggctaagcccagcggcatggcggaccagctcaccgacgaccagatcgccgagttcaaggaggccttcagcctcttcgacaaggacggcgatggttgcatcacaaccaaggagctgggaaccgtgatgcgttcgctggggcagaacccaacggaggccgagctccaggacatgatcaacgaggtcgacgcggacggcaacggcaccatcgacttcccggagttcctcaacctgatggcacgcaagatgaaggacaccgactcggaggaggagctcaaggaggcgttcagggtgttcgacaaagaccagaacggcttcatctccgccgccgagctccgccacgtcatgaccaacctcggcgagaagctgaccgacgaggaggtcgacgagatgatccgcgaagccgacgtcgacggtgacggccagatcaactacgaggagttcgtcaaggtcatggtggccaagtgaggcaccacttcccctgccgatgatggcatagtaccctgggaggaggaaaccgtgcattgccgtattagtaaggggatgcaaacactggtttcagtcgtcttccctgatgaagaaaaccgaaccgtactagttgtagttgctgaacatttttctatctctccagtctctccggtgtgccatggaacttcttgcttgatttttctgtgtgaatctgttaaggcttgctctgatctctccgaaccctgaattgcattgcagttgagtcccgtctttttgtagcactgtttttcttttccgtcagatctgatcggatcatttttagcatcatccatcaatgaacaggcagttgctttccgttgccgttatc

SEQ ID NO: 1764 - DNA, 1331 bp, Oryza sativa
  ref <308>: DATABASE ACCESSION NUMBER: AK104121
  ref <309>: DATABASE ENTRY DATE: 2002-08-28
agtgcaagtgctcctactacccaactggcaactgctgctgccgctgtacacgcgcggacccaagaacgcgcctcctctcaccgcccgggaggaagaaggaagaatctctcgcgaagcatctccagagtctcccccgctgcctccgtctccggcggctcaccccgtttctgtggagcaatgcagctatatcaccacccgtattcgctggatagtcagaaagtgcggatggcactggaagagaagggtattgactacacctcataccatgtcaatccactgaccgggaagaacatgaacgtggccttctttcgcatgaacccttctgcgaaactccccgtcttccagaacggcgcccatgtcatttatcgggccttcgatataattcagtaccttgacaggctttcggtgcatttaagtggtgaaatcgtccctgtgaacactgaggtttaccaatggatgcagaaagttgatagttggaatccgaagatgttcactctcactcacaccccgatcaagtaccgcacgtttgtctccaagttcatacggcgagtgctgattgctcgcatggctgaagccccagatttagccagcatgtaccatgctaagctccgtgaggcttatgagaccgaagacaaattgaaggatcctgacattatgaagcaaagcgaggaggagctgagcaaactcctcgatgatgttgaagcacagctcaacaatggcaaataccttgctggcgatgaattctcgcctgcggattcggtgttcattcctatcctcgcacgcatcactcttttggaccttgatgaggaatacatcaactgcagacctaggttactcgagtactacacattggtgaagcagaggcccagctacaaggttgcaattggcaagttcttcggtgggtggaagaagtaccgaactctcttcaagacctcgttcttcctttgtgtccgaaccttgttcaggaaatactaggtggttcagcagacagcaatgtgtacagtgaattcaacctgaatatacgaccactacatcttgatgtgttttctgccgaggggttgtggttgatggctcctgatagttttcgttttagtttgtgaaatcaaatgcgtttgtttccttatatgtctctctgcttgcatgctcctgtccacagctcagaacttgtacatcataatgcttacacaatacatatacattttggttttgtttatttagctcatatggaattggaatatctctaatcagggttgtttcttgaaacaattcatgtcttgagtaccttgtattctgttctattttctgctatcaaaaggggtaattttcactgc

SEQ ID NO: 1765 - DNA, 1020 bp, Oryza sativa
  ref <308>: DATABASE ACCESSION NUMBER: AK104122
  ref <309>: DATABASE ENTRY DATE: 2002-08-28
accacgcacgcaccgcacagacgcaagctcacctcagctcagctcacaattcggctgtatccaagatcgccatgggcttcccggtgggctactcggagctgctcctcccgaggctgctgctccaggtgctcctcctcctcggccacctccatcgctttctcctctgggccttccacgcagtcggcctcggcgacctcatcgacaacccgcccggcctggcggccacggagcaggacctgatgctgcaggggcgcggcggcgggatggcggagggttgggcgtcgtcgtcggcgctccagcaccgccggcccgagttcagggcgattccgccgatggccatcgaggaggccctccccgtggtgcggttcgacgagctggtggcgtccgccccggcggcggtgtgcggtggcggcgactgcgcggtctgcctcagcggcatctgcgggcgcgacgaggtgcggcggctgtccaactgccgccacgttttccaccgcggctgcctcgaccgctggatggcccacgagcagcgcacctgcccgctctgccgcgcgccgctcatccccgacgagctcttgcccgccgcctccggcctgcctgacccctccgactacgacctctcgtactacccatccccgctgccgctggcgcccaccccgacgctgctgcgaccacacgagctgctgctcaacggcttgggcggtttccagtgagcccgccaatccaccgccccggtcaatttcgttgcaaccggcatgacagagctgcctcaactacggcacacgggcacataggcgtcctgatttgtacataggcgccaaggagaactccccccaaaaaaacacaagtaggaatagtttgctgctatataggtcgattccaccttccaagcctgcgaagttgtgaatccttttttttttgcagattactagtagtatattaaatttgttgaagcagagcagtgccacagtttggtgcttgctaatttggcaagccgtttaatccaatctccccacgctattc

SEQ ID NO: 1766 - DNA, 1034 bp, Oryza sativa
  ref <308>: DATABASE ACCESSION NUMBER: AK104123
  ref <309>: DATABASE ENTRY DATE: 2002-08-28
gcaccacacaggcagccacacacacaccactccatttctgagctcttctagtttgagtgagagagcagcagaagggagtagtgcaagatgccgatccgcaacatcgccgtggggagccaccaggaggtgtaccacccgggtgcactcaaggcggcgttggccgagttcatctccaccctcatcttcgtcttcgccggccagggctccggcatggccttcagcaagctgaccggcggcggagcgacgacccccgccgggctgatcgcggcggcggtggcccacgccttcgccctgttcgtggcggtgtccgtcggcgccaacatctccggcggccacgtgaacccggccgtgaccttcggcgccttcgtcggcggcaacatcaccctgttccgcggcctcctctactggatcgcccagctcctgggctccaccgtggcgtgcttcctcctccgcttctccaccggcgggctcgccaccggcaccttcggcctgaccggcgtctccgtgtgggaggccctggtgctggagatcgtcatgaccttcggcctcgtctacaccgtgtacgccaccgccgttgaccccaagaagggcagcctcggcaccatcgcccccatcgccatcggcttcatcgtcggcgcgaacatcctcgtcggcggcgcgttcgacggcgcctccatgaacccggccgtctccttcggcccggccctcgtcagctggtcctgggagtcccagtgggtgtactgggttggcccactcatcggcggtggcctcgccggcgtcatctacgaggtcctcttcatctcccacacccacgagcagctccccaccaccgactactaagctcatcgccgccgccgccgcttgtccatgatcgcctcgtctccgactccgatccaaccgtttagtttctcgcatcagtgcatcatcaaacctgtttcatttgcttggatcagttgtacgttgaacgtactgtaagtgtggacctttgggaacccgttgctttgcttctgtaaaactgtgcatgcatttgcctg

SEQ ID NO: 1767 - DNA, 1080 bp, Oryza sativa
  ref <308>: DATABASE ACCESSION NUMBER: AK104124
  ref <309>: DATABASE ENTRY DATE: 2002-08-28
aactcgcacggcctatgcgtacgtagcaccaggagctagcaaacactactctttttttctttttttgcggggaagctagcaaacagtactactaaccttctgcttatatatcaccaacaaatactatgtcggtcacgcctaccaacgacgtcgtgatgactggccctgtagctggcgccggcgacgtgcaggccgctgagacgttccgcgtgttcgtcgggtacgactcgcgcgaggacatcgcgtaccgcgtgtgccggcgctccctgctgcagcgctcctccgtgccggtggccgtgatcccgatcgtgcagcaggagctccggtctgcggggctgtactggcgggagcgcgggcccacggagagcaccgagttctccttcacccgcttcctgacgccccacctggccggctaccgcggctgggcgctcttcgtcgactgcgacttcctcttcgtcgccgacgtcgcggagctggcgcgcatggccgacccgcgctacgcggtgctgtgcgtgcaccacgactacgcgcccaaggaggccaccaagatggacggcgccgtgcagacggtgtacccgcgcaagaactggtcgtccatggtgctcttcaactgcgcccacccaaagaaccgcgccgcgctgacgcccgaggccgtgagcacgcagagcggcgcgtacctgcaccgcttcatgtggctggacgacgccgacatcggcgaggtgcccttcgtgtggaacttcctcgtggggcacaaccgcgtcgaccccgccgacacggccgggacggcgccgcgcgccatccactacacttccggcgggccgtggttcgagcagtacaagaactgcgagttcgcggagctctgggtccaggaacgtgacgcgtatgaggccgaggcggaggaggacgaggagaaggaagagcacgagcccaaggccatcctgcatgcccctgctgcgccgtcggcagttcccgtggacgcctgagcctcacgtgcggtgcctactgttttctaataatatgattggaataaactcatgacggccacacctcaagaatgataagttctatatattgttgatc

SEQ ID NO: 1768 - DNA, 1173 bp, Oryza sativa
  ref <308>: DATABASE ACCESSION NUMBER: AK059757
  ref <309>: DATABASE ENTRY DATE: 2001-12-06
atcgcagcggcgatttctcatctgaattgcaggccaattccagttgagtttctccacagaccacagatatggcttccggcaggatagctctgctctgccttcttggcttgctgctggtagcagcctcaccggctgccattgctgccaaagatgacaaaatcttctaccagattactttcatgtggccgggagcgtactgcgcgcagacgaaggccggatgctgcatgccgaagaccgacgtcgcgccggcgtccgacttctacgtcgccggcttcacggtctacaacgccaccaccaactcttccctgtccagctgcagcaacactccattcgacatgaaccaaattggggatgtcacgaggctgatgcagtactggaacaacatcaggtgccccagcaagagcggccagaagggctggaagaacgcgtgggagacgtccggcgtctgctccgacctcaccgagagcgcctactttgacaccgccctcgccctccgcgacaagatcaaccccctttctcgcctcgtcagcaacggtattaagccggactttgggctgtacagcgtgaagaagatcaaggaggtgatcgaggaggggatcggcgcgccggcgctgatccagtgcagcaagggcccgttcaacaagttccagctataccagatatacgtctgcgtcgcggaggacgccaagacgttcgtggagtgccccagcccgaggaagccgtacacctgcggcgacgacatcctcttccaccctttcaagaagtggatgctcaagaccaactccaccaaatcctacgccgccgccgacgccatcgaccagctgctcgaagcggtcatggaaatctgagctcgatcgatcgatcgatcaagaagacaaattaacccttgttgtgatatgcgatttgtgcgtgtgtgttgtctgtttcgatcgtgatgttttctgcgtgtttatttcgtgatgttctctcatcgcgcccgcgcgcggttgggtacgatccgggacacctacgtagcactgaatccgtctctgtgatgcattcagagaataagtccgaatatgtgcggccttgttaatgttttcatgaataactcgtgtagtgggattactttgtcatcggacatttcatgatttccgatgcacaccttggctatgttcttccccccattttcct

SEQ ID NO: 1769 - DNA, 1202 bp, Oryza sativa
  ref <308>: DATABASE ACCESSION NUMBER: AK104125
  ref <309>: DATABASE ENTRY DATE: 2002-08-28
aagctcaagctcagcctcagcgatcgacaagtaagtagatccaaatccatccatggaagccaccggcacacggctgacgcgctccgcctccctctccccacgcctccgccgctcccccacagccttgtgcgtctccccgcgcagcatgcatcatcatcatcagcagcagcagcagagcctccgccgcgccacctccgacgccgacatcgccagatccgcgcccgcgacggcatcatcgccgctgcccctcctcctccgcgacatcctggaggaggacgtggtcgtggtggtggacggcgccgggcgcggcaagggcaacgacgacgacgacaagacgtccgggcgcggcggaggcggcggcgggcacatggacatgggggagtactaccggcgggttctgagggtggagccggagaacccgctggtgctgcgcaactacgggaggtacctgcaggaggtggagggcgacctgggcggcgcggaggagtgctacgccagggcgctgctggcctcccccgacgacggcgacctgctcagcctctacggccagctgctgtgggagacgagtcaggacaaggaccgcgccgccgcctacctggagcgcgccgtccaggccgcgcccgatgactgctacgtgcttggatcgtacgcgagtttcctgtgggacgcggaagaggatgaagacgacgaagcagaggatgagatgaaaccgccgctggtgccggcgtcctgctaacccaacccggcgtttgcctttgcttgtgtacatatgagagcttgcttttgtcaaaggcagatcgagacacgatccatcctggtgtgcctgcctgcctgcctgcgcttgtacaaattaattactagcacatcgatccttgctccatcagtttgcttcttctgtacatactccagtagctagcgccttcttgatgatggatcgttggctacatccatcgtcaatacacacactgatgaacaccagagatcaattcaactgcagtgcaagccagggcgcgcggcggcgagcagatcgagcaatttggaagatgcaaatcaggccgccgagcagagcagagcagctcagttcaagtgcggacggacggctggatgattcatccacaccgtaccacactttgcacatggataaccagacttgttgcttctttatgtaacacctcataataaattcactctgctaattaatt

SEQ ID NO: 1770 - DNA, 1221 bp, Oryza sativa
  ref <308>: DATABASE ACCESSION NUMBER: AK104126
  ref <309>: DATABASE ENTRY DATE: 2002-08-28
ctctgaagtctgaaccattacactatctcctttctctctctctctcatataatctcttggcagtattagtattagtgccgaattgcacctcttctaatctgtttccaaagcaaaattacagccaaatcgctcctcttcgtatatacttagtgccaatagaaggtaggaaagaccacatatccaggtttccttgctaggctctgctcatatcccgcaaattgagggttcagacttcataagttcgagctctgtccacaagaaaggaacaagagattgttcttggcagttggaagaagctaagaacttggcgagttggtggccaaggtgctcttggagggttcttggagcagtacaatgttggccaaaagattgaaaagatgcagcattcttctgttcgcctttctcctcgcagacgcatccgggagtcttcttgagagcagcggcggccaggccgaggcgatcggtccacagatctccccggcgacagagggcgagggcaagaggcggtcgctggcgacggggatgttctgcgtggcgctgccgaacgcggacccgacggcgctgcaggaagggctgaactgggcctgcggccagggccacgccaactgcgcggcgatccagccggggggcccgtgctacaaggcgaacaacctgccggcgttggcctcctacgcctacaacgactactaccagcgcaactccggcgccggcgccacctgcagcttcaacggcaccgccaccaccaccgccaccgaccccagttcagggcaatgcgtcttctcaggaagctccatggccggaggcaccacgccggcggcgaacgcgccgtccgccgtcggcccgttcacgccggggttcggcaacgggtcgtcgccgacgttcccggggacggggagccccggcggcgcgctgacccccttcgacgccgccgacagcgtcatgtccggcgctcgccgggcgctctgcgcgctgctgctggcgtcgccgatcttcctctccctcgttctctgatcagcagttcagcactagttggagtttgtccatgtaaattatgcatatggcattatgtcattcgttataaattcactcaccagagagagtcagtgacgactcaggagtcagagtcaccttgacatgttttattcccgagtaaatgaccagtgtttatatgtcagatgtcagattggatcatgaaattattttatttagaccattttgtgg

SEQ ID NO: 1771 - DNA, 980 bp, Oryza sativa
  ref <308>: DATABASE ACCESSION NUMBER: AK059758
  ref <309>: DATABASE ENTRY DATE: 2001-12-06
atgcaaattaaccatatggcaactgcttcgttgagcctcctgatcctctgcctcgccgcgctcgccgcggcggccggcgccgccgccgcggctgctccgccgcgcttgcagtgctttgagcacccgccggacatgaaggccgccggcggcggcgaggccggcgtggtagcccactccgaccgggccgtcgtcctcgcctccgacgtctacggtttccaagcgccgttactgaggcaaatagctgataaagttggtgatgccggatattaattacgtcgtggtacctgatttgtttcatggagatccagcaaccacatctgtgaactttaccgaatggctcgagtctcactctccggtgaaagaagctgaaaaggctaaatcaatatttgcttttctaagaaacgaaggaaaatcagtcgttggagttggaggatattgttggggtggaaagtttgctgtgacggtagcaaaaaccaatgaggtagaagcggttgtcatctctcatccttacgctgtgactgctgatgatatgaaagaggttaaatggcccatcgagatccttggaggtcagaatgacacagttacaccaccaagattagtctaccagtatgtgcatgccttgcgtcaaagaaacgatattgatttctacgccaagatttttccaggagtttcccatggatttgccggtcgatataacaccagcgacccgtttgctgtcgaaaccgggaaacaagctctcgccttaatgctggactggtttcagaaacacttgaagtgatgaaacttaataaatactacatgaaagaacatgcaaatgtttcttcagaataaattaccggtgtccatgtacaaatttgcataaacagccatgcatgcaggctgaatacaatgagtgtctgcaatctggtggcttggacccagaatttggttgctaatttctttatacccactcaatgcctgttgggctttactgtttttcc

SEQ ID NO: 1772 - DNA, 1061 bp, Oryza sativa
  ref <308>: DATABASE ACCESSION NUMBER: AK104127
  ref <309>: DATABASE ENTRY DATE: 2002-08-28
atcaccacacgcgcacacgacacgacgcaccaatggcgctcgtctccgcctcctcctccaccaccgccgtcgcggcgctccccggcgccgccagggcctcctccttcctcggcggcgccggcaggagcggcaggctgctgctgaggcaggccgagtcgtcgtccgcgcgggcgtcgttcgccgtgcgcgccgcggcgcccgacaggccaatctggttccccggcagcaccccgccgccgtggctcgacggcagcctccccggcgacttcggcttcgaccccctgggtctcggatcggacccggagagcttgcggtggaacgtgcaggcggagctggtgcactgccggtgggcgatgctgggcgcggcgggcatcttcatcccggagttcctgaccaagatcggcatcctcaacacgccgtcgtggtacaccgccggcgagcagcaatacttcaccgacaccaccaccctcttcatcatcgagctcatcctcatcggctgggccgagggccgccggtgggctgacatcatcaagcccggctgcgtcaacaccgaccccatcttccccaacaacaagctcaccggcaccgacgtcgggtaccctggtggtctgtggtttgacccgctcggctggggcaccggctcgccggagaagatcaaggagctgcgcaccaaggagatcaagaacgggcggctcgccatgctcgccgtcatgggagcttggttccaggcagagtacaccggcaccggccccatcgacaacctcttcgcccatctcgccgaccccggccacgccaccatcttccaggccttcacccccaaatgaggagttcttcaggtgttggagtgttagcaatggctgccaatggaggaagatgaaaagactgttcgtcgacgcgacttacctctcttttttgggatcggagtaggctgtgaatggtggtggtgtattgggatgtaattgtggatggagcactgcatgccttgttgattgtgtacctgtactatgatgtaaccgatgtaaaaaacaagttgatactcttttagaagtgaagttctcttc

SEQ ID NO: 1773 - DNA, 1114 bp, Oryza sativa
  ref <308>: DATABASE ACCESSION NUMBER: AK059759
  ref <309>: DATABASE ENTRY DATE: 2001-12-06
atgaacccgctcccatggcgcccctccgaacactcgttatcttcctcctcctcctcctcgcgctcgtcccggcactctcgcgcccggatggcggcggcggcggcttctatgacccggcgcgcgtcacccagctatcctggcgccccagggcgttcctgtacagcggcttcctctcgcacgacgagtgcgaccacctcgtcaatctggcgaaggggaggatggagaagtcgatggttgcagacaatgattccggcaagagtatcatgagccaggtgcgcaccagctccggcaccttcttatcgaagcacgaggacgacattgtttctggaattgaaaagcgtgtagctgcttggacatttcttcctgaagaaaacgccgagtcaattcagattctgcattatgagcttggtcagaagtatgatgcccacttcgattatttccatgacaagaacaaccttaagcgtgggggtcatcgagtcgccactgtgcttatgtacttgaccgatgtcaaaaagggtggagagactgtatttccaaatgctgcgggaaggcatttacaactcaaggatgaaacttggtctgattgtgcaagatctggcctggcagtgaagccaaagaaaggcgatgcgctactgttcttcagtctccatgttaacgcgacaacggatccagccagtcttcatggaagctgtccggtgatcgaaggcgagaaatggtctgcaacgaaatggatccatgtcagatcatttgataatcctccggatgtaagcctggatttgccgtgttccgatgaaaacgagcgctgcacgagatgggctgctgttggagagtgttacaggaacccaaaatacatggttggcaccaaggattcgctcggattctgccgcaagagctgcggggtttgcgatgcttaaaccctgcacccgccaaactgaagatctgaaaatcaaagtgtcatgttaggctgttagctattttcgcccactttacttacacagttacactacttgagaagttgagatgtacataacagacaaagcaggtttattagtatgtgtttctgtgtagtttaaccttgaacgatattgattgaaagtaattggaactttttttc

SEQ ID NO: 1774 - DNA, 1049 bp, Oryza sativa
  ref <308>: DATABASE ACCESSION NUMBER: AK059760
  ref <309>: DATABASE ENTRY DATE: 2001-12-06
ataagcaaaccaaacaaaaaaacctcaccatcatcgacccacttgttcctagcgatctagaacgagagacttggcaatggcgggaagcggcgagctgaagctgctgggcgtttggagcagcccgtacgcgatcagggtccgcgtcgtcctcaacctcaagtcgctgccgtacgagtacgtggaggagaacctgggcgacaagagcgacctcctcctcgcctccaacccggtgcacaagagcgtccccgtcctgctccacgccggccggccggtgaacgagtcgcaggtcatcgtgcagtacatcgacgaggtctggccgggcggcgccgggggacgcccgtccgtgatgccctctgacccctacgagcgcgcggtggcgcgcttctgggccgcctacgtcgacgacaaggtccggccggcgtggctggccatcctgttcgggagcaagacggaggaggagagggcggcggcggtggcgcaggccgtggcggcgctggagacgctagagggcgcgttcggggagtgctccaaggggaagccgttcttcggcggcgacggcgtcgggttcgtcgacgtcgtgctcggcggctacctcgggtggttcacggcgatcgacaagctgatcggtcgcaggctgattgacccggcgaggacgccggcgctggccgcgtgggaggagcggttccgcgccaccgacgcggccaagggagtcgtgccggatgacgccgacaagctgctcgagttcaggcagaccctgcttcgctggagcgcatccaaagcaaagtgagatgacatgacacgactgttttcgccatggtgatgctgaatctaagtatgctgtacgtgtgtttgtataataacaaggagaaatgctgctgcacgattgagtttccttgatcgattcctcagcatagtttctttttttttttatctagctatatatttaatatatagcgccatgttcttcataataaaagggctattttaagctgtaaattgcatacatttgtatttacataataaaaaaatgaatcttacgttgtgttgtt

SEQ ID NO: 1775 - DNA, 1043 bp, Oryza sativa
  ref <308>: DATABASE ACCESSION NUMBER: AK104128
  ref <309>: DATABASE ENTRY DATE: 2002-08-28
taaaaacacaaagcagacaaggtagtagtacaggcttttgtacgtacgtagcagagggagttcccaagatggctggggcctctgccaaggtcgtcgcgatgctgctctccgtgctcgccacgtacggcttcgccgccggcgtcgtctacaccaacgactggctcccggccaaggccacctggtacggccagcccaacggcgccggacccgacgacaacggcggtgcgtgcgggttcaagaacaccaaccagtacccgttcatgtccatgacctcctgcggcaacgagcctctgttccaggacggcaagggctgtggcgcctgctaccagatacggtgcaccaacaacccgtcgtgctccgggcagcccaggacggtgatcatcacggacatgaactactaccccgtggccaggtaccacttcgacctgagcggcacggcgttcggcgccatggcgaggccggggctgaacgaccagctccgccacgccggcatcatcgacatccagttcaggcgcgtcccgtgctaccaccgcggcctctacgtgaacttccacgtcgaggccgggtccaacccggtgtacctcgccgtgctggtggagttcgccaacaaggacggcacggtggtgcagctcgacgtcatggagtcgctccccagcggcaagccgacgcgggtctggacgcccatgcgccgctcctggggatccatctggcgcctcgacgccaaccaccgcctccagggccccttctccctccgcatggtcagcgagtccggccagaccgtcatcgcccaccaggtcatcccggccaactggagggccaacaccaactacggctccaaagtccagttccgttgatccatcgatcgatctacctatgtgcatgcaatgccttcgtcgtcttgtgtcgccggtcaagaacgaattttgattctaccgatcggcagttcggcactagtactgtactacgattctgtgtgtgtgtgtgtgtgtgtgtgattgcaatgcaaattgcgaacggatcaattaagagcgtttttttctctc

SEQ ID NO: 1776 - DNA, 1037 bp, Oryza sativa
  ref <308>: DATABASE ACCESSION NUMBER: AK059761
  ref <309>: DATABASE ENTRY DATE: 2001-12-06
aatcaacccaaccccaggagaagaagagaacacaccgttcagttcatcctcacctcttgttctccacaattgcagataagttgcttcctctttttttgcagagaggagtggtggttttggtggtgcagatgatggctggcttgcaaagatcagcgacaacattcagaaggtccggttcgtcaggcctggtctgggacgagcggttcttgaccgaggacgcagaggcggccaaggccggcgatggcgatggcggtggcggcacggaggagccccagccggagctccggcattccaagagcgtcgggagcatcggcatgatgcgccgtgtcgctgccgacgacggcgacgacagcgagaagacgacgaagcagcagaggaagaagaagaagaagaagaagaaggacggtcagaaggaggacgacaaccgcagccagcaggtgttcaggaccaaggacatcgccccggacgtcgacccgccgtcgccgagggtgtccggctgcatcctctgctccatcttctccggctccggctcgtcgtcgtcggcgacgtcgcgccgcgccaagccgaggaagaagtgaaacaaacggggtgacatataaaaaaccatacataccttcccggtggtgctgcatcatctgttactgtaaagccgtgtgagccatggatctggggcatgtctatacactcgagtgacacatgagtttgtactgcttataaacacatatatatttgtcaggttagttttttttttcttttttttaccttctcttttgttcatcagctcctcgatccagatccatggctcaaacccatagttattagagcttattagtactagcaaccagcagctattgagatttgggttgttcttcagttctttgtctggtacaattcttctctcatttcttcagctgctgagtgagcctttggatctctgtgattgatcgattgattgcgttgcatgtgagtgagcttgaggtgtgctgtgttgtcgcctgtgtggagcaaaaactgctataaagaatttggcatgattc

SEQ ID NO: 1777 - DNA, 1084 bp, Oryza sativa
  ref <308>: DATABASE ACCESSION NUMBER: AK059762
  ref <309>: DATABASE ENTRY DATE: 2001-12-06
atcgttgggagcctctctgccttccgacctccatcgaattgggtgcagaccagcagcagccaataattaaggtcgtcggccgtatatatgatgatggagaatagcagggagcagcagccggagtcgtcgccggcgaacaacaatagcaagaagaagaagaagaagacggcgtcgcggttccggcgtgtgtgcgtgttctgcggcagcagccccgggaagaaggcgtcgtaccaggtggccgccgtgcagctggggcagcagctggtggagcgcggcatcgacctggtgtacggcggcggcagcgttgggctgatggggctggtgtcccgcgccgtccacggaggcggcgggcacgtggtgggcgtggtgcccaatggcgtgctgccacgcgagctgatcggcgagacgctgggggaggtgagggcggtgggaagcatgcaccagcggaaggcggagatggcgcgggagtcggacgccttcatcgccctccccggcggctacggcacgctggaggagctcctcgaggtcatcacctgggctcagctccgcatccaccacaagcccgtcggcctcctcaacgtcgacggctactacgactccctgctcgccttcatcgacaaggccgtccacgaaggcttcgtctcgccgcccgcccgccgcatcatcgtcgccgcacccaccgcctccgacctgctctgcaagctcgaggaatacgtgccgccgccgcacgacgccaccgccctgaagctcacctgggagatgtccaccgtatcggagcagcacgccggaagcatctactcccccaagcccgacatggcacgctagctagctagctagctactcgatccacttcattattacttatcttgtttcttctcatataatcttgctgctaattatttcttccatatattaattccctatatatatgtatatatactcgatcgtactatattgtatacatcatcaattacttgtaacttcaattaatcctagctacatcgaagaggcaggcggccctagttagttttcctgtactagaagctagttaattttcctctatggagtgttattatgagttgat

SEQ ID NO: 1778 - DNA, 1184 bp, Oryza sativa
  ref <308>: DATABASE ACCESSION NUMBER: AK059763
  ref <309>: DATABASE ENTRY DATE: 2001-12-06
attctggaatctgctcgcaagtccgaacctgcaaccatggccgcccccgcgcacaacatgaagtaccgcttcctcggcgacagcggcctgctcgtctcgacgctctcgttcggctcgtgggtcacgttcgacaaccagctcgatgtcgagaaggcctactccattatggagcacgcctacaagagcggcatcaactttttcgacaacgccgaggcctacgccgctggcaagtcggaggagatcatgggccaggtgatcaagatgggtgtcgagcgtggtgtgtggacccgcgaagacctcgtgctctcgaccaagatcttctttggcaccaagcccggcccaaacaactgcggcctcagccgcaagcacatcattgaaggtaccaaggctgcgctcaagcgctttgaccagagctacgtcgacctcgtcttctgccaccgtccggacccgcgcacgcccattgaggagatcgtccgcgcgatgaacttcaccatctcgcagggctgggcattctactggggcaccagtgagtggagctcggccgagatcattgaggcctgcgagatcgctgaccgtctccacctcgcgcgtcccgtcatggaccagccagagtaccacatgctcgagcgctcgcgcgtcgactacgactacgtcaacctgtacaagaagtacaagtacggtctcacgacgtggtcgcctcttgcgtcgggtgtgctgacgggcaagtacaacaagggcatcccggagggctcgcgtctctcgctgccggcttacaaggacatgctctcgcggggcctcgatgaaaaggttgccaagtgcatcaagtttgaggagatcgccaaggagattgggtgctccatggcgcagctcgcgatcgcctgggtggcgtcgaacgagaacgtgtcgaccgtgatcttgggcgccacgagcattgcgcagctggacgagaacctcaaggccatggagttcattgacaagatcacgcccgagatcaaggcgcgcatcgacgagatcgcgcagttcaagcccaaggcgtggattacgcccgagagcttcgtctacaccatgcgcgagaagtggctgtaaaccaccagcgtctgagctgcggtgggaaggaggacgaagctcgcctcctgcctgacctactgatttagtgccgctgcataagaaaaacatttgttcct

SEQ ID NO: 1779 - DNA, 990 bp, Oryza sativa
  ref <308>: DATABASE ACCESSION NUMBER: AK104129
  ref <309>: DATABASE ENTRY DATE: 2002-08-28
attttcgagtctatccaggaatagaagagaactatcgagaagctgctttcctctccatccttatcattcccccgccgcatataagaacgccatcccctcctcgacagatatccaagcaaagcgagaaaagaagccagcaatcgaaagcccaagcttccaaaaatccgcttccaattcgcgaaactacactagtcgtaagcgccaaatccaaccgacgatgtcgctgatccgccgcagcaacgtgttcgaccccttctccctcgacctctgggaccccttcgacggcttccccttcggctccggcggcagcagcagcggcagcatcttcccgtccttcccgcgcggcgcctcctccgagaccgcggccttcgccggcgcgcggatcgactggaaggagacgcccgaggcgcacgtgttcaaggcggacgtgccggggctgaagaaggaggaggtcaaggtggaggtggacgacggcaacatcctgcagatcagcggcgagcgcaacaaggagcaggaggagaagacggaccagtggcaccgcgtggagcgcagcagcggcaagttcctccgcaggttccgcctccccgacaacgccaagccggagcagatcaaggcgtccatggagaacggcgtgctcaccgtcacggttcccaaggaggaggccaagaagcccgacgtcaagtccatccagatctccggctaggcatcgccggcgtgccgcgtgcgcgacggagaggagcacggcggggttttcgctttggcctggtttgtctgtcgtgaaggagcaaataaaatcgggtccggttgagtccagtgtgtgtccgtgtctgtcttgaacagtcgtgtgtcgcgtcgtgtcactgggtcagtgtgttgttccagtgcgccgttcatcagccgatcagcgtctgtaccggtcttttgcaactagttaagtgatgaatactataatctgttaatacgtgatctgtctgatgcattctgtgcttt

SEQ ID NO: 1780 - DNA, 1221 bp, Oryza sativa
  ref <308>: DATABASE ACCESSION NUMBER: AK059764
  ref <309>: DATABASE ENTRY DATE: 2001-12-06
ttttttggttggtggtgccgtgtagagggggaggcgacgagacgagacgagaggaaggagacgagacgatacgcggagatccgggcggcgacccgcggaggaggaggagcccgcggcgccatggattccgaccactggatctcccgcctcatggccgccaagcgccagtacgcgctgcagcgcgcccagaatcaccaccacgccaccgccaccgccaccgccaccgccgcgtcgcactcccacctcgatcggtatgggtacgatgatgttgagccagaggacgaggtacggccagacttcccatgtccttactgctatgaagatcatgacattacatctctttgtgcccatttagaggatgagcacccctttgagtctaaagttgtggcttgcccggtttgctcggctaggatttcaaaggacttattggatcacataacccttcagcacagctacctgtttagactgcagagacatcacagattacgcagagttgctgttcctagcaaccatgctctctcccttggagggagagatctacaggagacctacttaaaggttcttcttggaaacagtagtcgaagcagtggtaccaatgcagcaagttcagtcactgattcactactatcttcacttgttttaaatttatcttcatccgaagccgaagatacagcgaaattttctgctctagctgtggtagaaaataattggtttaaaagaacactgccttcaaagacttggaaggcaagctctgattctaatcttagtcaggaagaaagggagagaaggcggaggcgagctgcagtgagatcatcttttgtacagcacctgcttgtctctaccctttttgatgactagcagaagaaaaaaagagcagctccgtgcactggaatctcgagtgggccttttgtccacacatttctggatgaatgatgaagtaaagcatcttccaaatcctgaagcagttcatccaaccggaggctggttcctgatcctttcgacattgatgatgaaccgatgtggctggcctcttacttgtcatggaagcagttctgaacatttatgttcgaaatccaattcagattgctaggctatcgactagcgttactgtattgattgtgttattccatatgatttcattatgtgcttaacaatacaatgaacattacccccaatttgattcttactataaacatttcaaaattgaattccatgtttggt

SEQ ID NO: 1781 - DNA, 929 bp, Oryza sativa
  ref <308>: DATABASE ACCESSION NUMBER: AK059765
  ref <309>: DATABASE ENTRY DATE: 2001-12-06
gtggaggagttcgagcccaccgggctcgccatgctccggcgaaccttcaggctcccggtaattccaatcggcccactcgtgcgcgcctccaccaaaacaacctcgccggagacggacgccaccgccggcgccatcaccagttttctcgactcccaccctccgtcgtcggtgctctacgtatcgttcgggtcacagttctccatccaagcagagcacatggcggagctggccgccgcactggaggccaccggccggccgttcgtctgggccgtgaagccgccggacgggcacaacataaacggcgagatccagccgaagtggcttcccgacggattcgaggagagggtgacggcgaccaagaaaggcctcctcctccatggatgggcgccgcaggtggggatcctggcgcatcactccacaggagcgttcctgagccactgcgggtggaactcggtgctggagagcatgacgcacggcgtgccgatcatcgggtggccgctcgccggcgatcagtactacaacgccaagatgctcgacgaggagtggggggtgtgcctccgcgtggagggggcacggggggacatggacatgagtgccattattgtggacaaagcgacgctggttgccgtggtggagacggtgatgtctccaacagcgaaggcggccgagatgcggcagcgggcgagagcgatcaaggagatcatggaagctgcacgggagggtggacatggctcgtcggcaaatcaggcattggaggagttcttcaaaacaatgaagctgaacggctgaagttggaacaaaatccaaggttacttatttactatgctagccgctgtgttattctgaatcatttgttattacttaccacatccacaatgttgcatgtaaaatgatcttaaggaataaagtaatatatttgttttacctct

SEQ ID NO: 1782 - DNA, 1134 bp, Oryza sativa
  ref <308>: DATABASE ACCESSION NUMBER: AK059766
  ref <309>: DATABASE ENTRY DATE: 2001-12-06
aataagtgatcgggcggcgaggcgaggcgaggtgagtaacagatcgatcgatccatgtcgccagtcgggtggttggtcttgttgttgccggcgctgctgcggcggggcagcagcggggtggctgcggcggggaaggtgccggcggtgattgtgttcggcgactcgtcggtggacacgggcaacaacaacttcatcccgacgatcgcgcggagcaacttctggccgtacgggcgcgactacgctgacggcctccccaccggccgcttctccaacggccgcctcgccaccgacttcatctccgaggccttcggactccctccctgcatccctgcctacctcgacaccaacctcaccatcgaccagctcgcctccggcgtctccttcgcctccgccgccaccggcctcgacaacgccaccgccggagtcctatccgtgatcacgattggcgagcagcttcagtacttcagggagtacaaggagaggctgaggatcgccaagggggaggctgaagccggcgagatcatcggcgaggcgctctacatctggagcatcggcaccaacgacttcatcgagaactactacaacctgccggagcggcggatgcagtacacggtggcggagtacgaggcgtacctgctggggctcgccgagtccgccatccgcgacgtgcactccctcggcggccggaagatggacttcaccgggctgacgccgatggggtgcctccccgccgagcgcatcggcaaccgcgacaaccccggcgagtgcaacgaggactacaacgccgtcgcccggagcttcaacggcaagcttcaggggctcgccgccaggctcaacaaggacctccccggcctccaactcgtctacgccgacacctacaagatcctcgcctccgtcgtcgacaagccggccgactacggttttgaaaatgcagtgcaaggttgctgtgggacaggactcttcgaggccggttacttctgcagcttgagcacctcgttgttatgtcaaaatgccaacaaatacgtcttctttgatgcaatccatcccacggagaaaatgtacaagatcattgccgatacagtcatgaacaccacacttaatgtgttcctataaagtttattaattttgtggatt

SEQ ID NO: 1783 - DNA, 1069 bp, Oryza sativa
  ref <308>: DATABASE ACCESSION NUMBER: AK059767
  ref <309>: DATABASE ENTRY DATE: 2001-12-06
atgcgccgcgtccacagctcgatcgctagccctactcgctagctagatcggcggccatggtgaacggctacttgttccgggagtacatcggcgcgcagttcaccggcgtgcgcttctccgacgtgcccgtcaacccgggcctcagcttccacttcatcctcgccttcgccatcgactacttcatggcgacgcagtcctccaagccggcgccagccaacggcgtgttcgccccgtactgggacacggccaacctgtccccggccgccgtcgccgcggccaaggcggcgcaccccaacctcagcgtcatcctcgccctcggcggcgacaccgtccagaacaccggcgtcaacgccacgttcgcgccgacgtcgtccgtcgacgcgtgggtgcgcaacgccgccgactccgtctccggcctcatcgacgcctacggcctcgacggcgtcgacgtcgactacgagcacttcgccgccggcgtggacacgttcgtggagtgcatcggtcgcctcctcaccgagctcaaggcgcggcacccgaacatcgccacctctatcgcgccgttcgagcaccccgtggtgcagcgctactaccagccgctgtggcggcgctacgccggcgtgatcgactacgtcaacttccagttctacggctacggcgccaacaccgacgtggcgacgtacgtgatgttctacgacgagcaggcggcgaactaccccggcagcaagctgctcgccagcttcaagaccgggaacgtcaccgggctgctctcgccggagcaggggatcgccggcgcgaaggagttgcagcggcaggggaagctgccggggttgttcatctggtcagcggatagctccatggtcagcagctacaagtttgagtacgagaccaaggctcaggagatcgtcgccaaccactgatcgtccatcgaacggtcgtgataatacttatgaaataagagcaaataaattgcgaaataatggtcgtattatatatcgagcgtcattatgcacgacttacgtgctaaataagaaatggacttatgtgccgattggtaatcggcgatatatgg

SEQ ID NO: 1784 - DNA, 998 bp, Oryza sativa
  ref <308>: DATABASE ACCESSION NUMBER: AK059768
  ref <309>: DATABASE ENTRY DATE: 2001-12-06
tctggtgctagaggtggatatcgtggtggaggtgatgcagttccctctgcaaatgatgactgcttcaaatgtggccgtgcgggacattgggctcgtgaatgtccttattccagtggaggtgggggtggtagaactggaaggtactcacccccttccagatatggcagtggaactggtggtggacgtggtgaccgctttggaggatcagaccgttttgctaaccgctatgttgatgaccgatatgatggtgggcgctatgttgatgatcgctatggtggtggtggacgtgatcgatatgccactgatcgctatccaccaactgccgatcgttttacaggtgacagatatggtggttctgatcgttatgcatcaagtggatttaccagggaaagaagctatgaaagagatggaggacggtccggtggaagttactatcgtgatgaacctagaggctctggtggttatgacagaggtggcatgcgcatggggagtggtgacagatacgggaccggtggacctgctcgctttgctgggagttacagagataggcctgccccatatgatcgtcccagccgggcagcagcacgcacttatgatgaccgctactgatggaggttacttcggagcattgcagaagaccagaattacaaatatatgttccagttcgcagttcctactttatttgccttcctgtattagtacatcgactctttgagtgttgttcttccatgcagtttgtttaattactagtgagacaataaggcagttcttgaattgttagtatgttggcacattaagctccaggcagtgggtgattctgattccctgttatcgtggtactgtgtaattaccctccagtgtaataatcgtgttccgagtgtgctgtcttatataattttattctggatagcattgaagattactgtgacacatgtggtttctggaacctggatagatgttacatctgctggaaagaaaattcatactgttcttatctg

SEQ ID NO: 1785 - DNA, 995 bp, Oryza sativa
  ref <308>: DATABASE ACCESSION NUMBER: AK059769
  ref <309>: DATABASE ENTRY DATE: 2001-12-06
gtgctctgcctccctctcccttcccacgccgtctcgccgcaatcgctcgctcggtcgcctcctcttccgccgcgagacacgaagagcagcagctcacaggtaggcctgcgcgtcggcggccatgggagacagccagtactccttctccctcaccaccttcagcccgtcggggaagctggtgcagatcgagcacgcgctcaccgcggtcggatccggccagacgtccctcgggatcaaagctgctaatggtgtagttatcgccactgagaagaaattgccttctattttagtcgatgaaacatctgtgcaaaagattcagtcattgactccgaacattggagttgtctacagtgggatgggtcccgatttccgtgttcttgtgagaaaaagtcggaaacaagcacagcagtattatcggttgtacaaggaaactatccctgttactcagcttgtccgagaaactgctgctgttatgcaggagttcacacagtctggtggtgtaagaccatttggagtatcattattgattgccgggtacgatgacaatggcccacagctgtatcaggttgatccctcaggatcatacttctcctggaaagcatcagctatggggaaaaatgtctccaatgcaaagacatttcttgaaaaaagatacacagaagacatggagcttgatgatgccatccatactgccattttgactctgaaagaaggatatgagggtcaaatctcagccaacaatattgaaattggagttattcgatctgaccgtgaattcaaagttctaaccccggcagagatcaaggatttcttggaagaggtggagtaaattgtctgttgacatttgatagtttactgttctaagtgacactcttgagccgtagtcatgaggcttcttgtctcttaccatttgtcacttaaacctattgtaaactgatttgcttcagtgatatgcatgagatgaagtggtggacctacttttgaatccccatcgt

SEQ ID NO: 1786 - DNA, 1264 bp, Oryza sativa
  ref <308>: DATABASE ACCESSION NUMBER: AK059770
  ref <309>: DATABASE ENTRY DATE: 2001-12-06
aaagcatcggatcacaccactgacgcgcagagacattacgaagagagcgcgtgcaatggcggatcaggctaacacaatagaggttcccactgacgctgagctgctgcaagcgcaggccgatctgtggcgccacagcctctactacctcacctccacgggactccgctgcgccatcaagctgggcatccccaccgccatccaccgcctcggcggcgccgcgtccgtgcccggtctcatgaccaagctgtccctcccggcgagtaagcagccgttcctccgccgcctcatgcgcgtcctcgtcacgaacggcgtgttcgccgcagagcacaacgacggcgaggtcgagcggtactgcctcaccccgctgtcccgcatcctcgtcgatggcgtcgtcgccgacgagcaccacagccagacgtccttcgtgctcgccgcgacgtcgcggcactacctcgaggcggcgctggggctggacgagtggttcaggaaggacgtggcgccgccgctcccgtccccgttcgaggacgtgcacggcgcgtcgctgttcgacgagagcactgcgctgctggacccggagctcgacgccgtcgtcaacgaaggcctggcggcgcacgacaacctcggcatcggcaccatcctgagggagtgccgcgacctcttccgggggctccgttcgctgaccgactgctgcggcggcgacggcacgacggcgagggccatcgccaaggcctaccctcatgtcaagtgcactgtgctggaccttcccaaggtgatcgacaaggcgcccaatgatggtgtcgttaactatgttgcaggtgacttgttccacaccgtgccaccggctcaagccgtgatgctcaagcttgtattgcaccactggagcgatgatgattgcgtgaagatcttgactcagtgcagaaaggccattccatcacgagaggagggagggaaggtcatcatcatagagatactggttggaccttcactaggaccagtaatgtttgaagcccagctgatgatggatatgctgatgttggtcaatacaagaggccggcagcgagatgaaagggattggcgagatctgttcttgaaagcaggattcaatgactataagattgtgaagatgcttggagctcgaggagttttcgaggtctatccctaagattgagctacctagctcctaaatgatcttatgtgtaatgtgtgcttcgtgttgggatgtgtgccgtaagaaggtaaataaagagagtgccctactatctgt

SEQ ID NO: 1787 - DNA, 1335 bp, Oryza sativa
  ref <308>: DATABASE ACCESSION NUMBER: AK059771
  ref <309>: DATABASE ENTRY DATE: 2001-12-06
tggctccctcctcctcacctccacccatcgtgcgctaaactctagccagatctcgcttgctcgccgctcgccgccgccgccgcgttccaccgagcggagagtagagggaatggcgtccgagggcgtgctcctggggatgggcaaccccctcctcgacatctccgccgtcgtcgacgacgccttcctcaccaagtatgacgtcaagctgaacaatgcaattctcgctgaggaaaagcacttgcctatgtatgatgagttggccagcaagggcaatgttgaatatattgccggaggagccacccagaactctatcagggttgctcaatggatgcttcaaactcctggtgcaacaagttacatgggttgcattggaaaggataagtttggtgaggagatgaagaagaatgcccaagctgctggtgttactgctcattactacgaggatgaggctgctcccacgggcacatgtgctgtctgtgttgttggtggtgaaagatcactggttgcaaacttatcagcagcaaactgctacaaatctgagcatctgaagaaaccggagaactgggcactagtggagaaagcaaaatacatctacattgctggctttttccttacggtctccccagattctattcagcttgttgctgagcatgctgccgctaacaacaaggtgttcctgatgaacctctctgcaccctttatctgtgagtttttccgtgatgcccaggagaaggttcttccgtttgtggactacatcttcggtaacgaaacagaagcaagaatctttgctaaagtccgtggatgggagactgagaatgttgaggagatcgcgttgaagatttcccagcttccattggcctctggaaaacaaaagaggattgccgtgattactcaaggtgctgatccagtagttgtcgctgaggatggacaggtgaaaacattccctgtgatcctactgccaaaggagaagcttgttgacaccaatggcgctggtgatgcctttgttggaggcttcctctcacaattggttcaacaaaagagcattgaggactctgtgaaggctggttgctatgccgcaaatgttatcatccagcgttctggctgcacttaccctgagaagcctgatttcaactagggctaacccaaccacatattgaggaacaattattcgcacatccaacctactagtggtttggtgtgttctacctgtaccatctcgaggctttccatatgatccggccaatatttttttgccgtgatttttgtttcactgctgcaaaccttactttattctcggtataaggcacaattgccaatcggtgtgttgttttggtc

SEQ ID NO: 1788 - DNA, 1098 bp, Oryza sativa
  ref <308>: DATABASE ACCESSION NUMBER: AK104130
  ref <309>: DATABASE ENTRY DATE: 2002-08-28
atggccgccgccgcctccaccctcgcctccctctccgccaccgcggccgcggccgccggcaagcgcctcctcctctcctccccctcccgctccctctccctctccctcgcctcccgcggccgcatcgccgtcatgccccacctccgcgctggcatcctctccgccgcaccgaggagggcggtgtcggcctcggccccggccgcggccaccatcgcggtcggggacaagctccccgacgcgacgctctcctacttcgactcgcccgacggggagctgaagacggtgaccgtgcgcgacctcaccgccgggaagaaggtggtcctcttcgcggtccccggcgcgttcaccccgacctgcacgcagaagcacgtcccggggttcgtcgccaaggccggggagctccgcgccaagggggtcgacgccgtggcctgcgtctccgtcaacgacgcgttcgtgatgcgggcgtggaaggagagcctcggcgtcggcgacgaggtgctcctcctctccgacggcaacggcgagctcgcccgcgccatgggcgtcgagctcgacctctccgacaagcccgccggcctcggcgtgcggtcccgccgctacgcgctcctggcggaggacggcgtcgtcaaggtgctcaacctcgaggagggcggcgccttcaccaccagcagcgccgaggagatgctcaaggcgctctgaagcgtgaacaactcaagccatcctccacttttcatctcaaatctccatagctcggttcgttgcctacttctctcaagtgttcgcttcttttcctgaataataaatcatggcaacaatggtggaccgtgcagagtagtgttgtcgttttgatgtgtgaagcttctatagcgaacatagtgtgcaatttttaggtaacatatatgagtcttggccttgcactgtttgtcaggtagtaacaacttggcacagctatagactgtagtaacagagttcctttcatgttgaatggtgaggctgtgatgtgttctagagctgaataaacgtgctctggtaaatactgtcaccagatcagactatggagtagtagtaagattttgcttggttaattgggcaatggct

SEQ ID NO: 1789 - DNA, 1019 bp, Oryza sativa
  ref <308>: DATABASE ACCESSION NUMBER: AK059772
  ref <309>: DATABASE ENTRY DATE: 2001-12-06
atccatcactccatcatctatctgctcacacattcactgctgctcatcgcgtgcagagcggttaactgaaatttgatttggatcatagttagggattgaattaggatggcaacgacggtgactcgtgcacacctggaccagaggcttgccctcgccaagcgctgctccaggggtacgtacgttaattacgtgtgttttacaaaagaaaactagctagtactactgtaataacattcatgttctttttgcgtcaaatcttcttgcattccatggcgctaataactgaatatatacaaactgatgtatgcttcgtcgatctgcagaggcgaaccttgcaggggttaaggcggctgctgtcgcgaccatcgcctctgccgttccaaccgtcagtagtctctcttctttctcaaatgcttcttctttcttgtgtcaattaattctttatcagaagagtaggttttctaacttagctgcatatgcttgtgtgtgctgtttatttcagctggcgagcgtgaggatggtgccatgggcgaaggccaacatcaacccgacgggacaggcgctgatcatctgcacggcggccgggatggcatacttcgtcgccgccgacaagaagatcctctcgctggccaggaggcactccttcgagaacgcacctgaacacctcaagaacacctccttccagggcaccggccgcccccaccctgccttcttcaggccctgatcaataattacaagaacacaacatatgctatattatatatacttctagctacctggctagctagctgcatatgatcagagtagtatctgtatcatgtagtagtagtagtagtagtaatacaatacaagtactacgcccctgcagagatcgaaccgtttacaacagctagctgctcatcctggcctcttgccattaggcattatctagccacacctgaatatgaatacatgcatgtactcctatcttgtactaataacttcatgtaacactgctgcagtaataatgttcagaaatc

SEQ ID NO: 1790 - DNA, 1128 bp, Oryza sativa
  ref <308>: DATABASE ACCESSION NUMBER: AK059773
  ref <309>: DATABASE ENTRY DATE: 2001-12-06
atcatcctctaaccccatccagctcgagaagaacaagacgaacacgctctcttccaaagctgaaagcatgggttcgactcgcctcctcgtactgctcgccgccgcttccctcctcctcgccaccgccgtcccggcagccagagcacaggaagaaactgatcacgagaaggagttcacgtacatcagcggggacgagaaggggccggagcactggggcaagctgaagccggagtgggcgcagtgcggcgccggcgagatgcagtcgccgatcgacctctcccacgagcgggtcaagctggtgcgcgacctcggctacctcgacgactcctaccgcgccgccgaggcctccatcgtcaaccgcggccacgacatcatggtcaggttcgacggcgacgccggcagcgtcgtcatcaacggcaccgcctactacctccgccagctccactggcactcccccaccgagcacagcgtcgacggccgcaggtacgacatggagctgcacatggtccacgagagcgccgagaagaaggccgccgtgatcggcctcctctacgaggtcggccgccccgaccgcttcctccaaaagatggagccatatctcaagatgattgcggacaaggaggacagggaggagaaggtgggcatgattgatccgaggggtgcaaggggtagggccagcgtgtactaccgctacatggggtcgctcaccacgccgccttgcacgcagggggtggtctggacgattgtcaagagggttcgcaccgtgtcgaggtatcagctcgaccttctcagggaagctgtgcatgatgaaatggagaacaacgcgaggccccttcaggcggtgaacaacagagacatctccattttccggccttaccctcataaacgctattaattagcggcggatttgtcgtctgatgtggattggtagcctaaaataaatatacacatgcagataggatcacacgtagggctcattttgccgttcgttcgatccttctatcacccctccttttcttttgagaggactgatctctcacatttcgatatatagctgagatttttgtaattctttccattactgttcctggttgattggattggaataaaacactgttcattaatttc

SEQ ID NO: 1791 - DNA, 1262 bp, Oryza sativa
  ref <308>: DATABASE ACCESSION NUMBER: AK059774
  ref <309>: DATABASE ENTRY DATE: 2001-12-06
aactaacgctaaaaaagtaacagtttctgtactttattgtttccgagcaaacatgtccgcccgccccaccgtctcggtgtactccggcagccaggataaggttgtgggctccagccccctccccgcggtcttcacgtcgccgattcgcagcgacattgtgcagttcgtgcacaaggagatggcgaagaacggccgccaggcgtacggtgtgaaccgtctgtccggcatgaagcactccgcggagtcgtggggtaccggccgcgctgtggcgcgtatcccgcgtgtgaagggtagcggcacgcacgccgcggctgctggtgcgttcggcaaccagtgccgcaacggtcgcatgttcgccccgaccaagacgtaccgccgctggcaccgccgcatcaacctgcaccagaagcgctacgccgtgacgtccgcgctcgccgcgactgccgtgcctgcgctgctgctggcccgtggtcacaagatcgagaacatcgctgaggtgccgctcgttgttgaggacgcgatccaggcgtaccagaagacgaaggacgccgttgcgttcctggaggcgatccgcgccaacgacgacgtgaaccgcgtgaacgactcgaagacgctgcgcgctggccgcggcaaggcccgcaaccgccgcttcgtgcagcgccgtggccccctgctggtgctgcccgacaacaagggtgtgcgcgccttccgcaacatcttcggccttgacatcggcaacgtgaacgcgctgaacctgctgacgctggcccccggtggtcacctcggccgcttcgtgatctggacccagggtgcgttcgcgcagctggacaagatcttcggcaccttcactcaggagtccgccgtcaagaagggcttcgtgctgccgcccctgcagctgacgaactcggacgtgacccgcatcatgcgctccgacgaggtgcgccgcgcgctgacgccgaagaagctgcaggcgaagaagccgacgcgctacgccaagccgtcgaacggcatgaagaaccgccgcctgcgcctgcgcctgaacccgttcgaggtcaagcgctcgatcgcgtcgaagggtctccgcaacccgaagactgtgcgtgcgcgccgccaggcccgcaacgagcgtctgcgcaaggcgaagaagggcgtgcgcgcgatggtcgcggcgaacaagtccaagccggcgaagaagaccgcgaagaagtaagcagcgccgctgaacgagaaacaacccatttccctctcacacttctacaacc

SEQ ID NO: 1792 - DNA, 1009 bp, Oryza sativa
  ref <308>: DATABASE ACCESSION NUMBER: AK059775
  ref <309>: DATABASE ENTRY DATE: 2001-12-06
accttcactcactccgcccatttccccactcctcctcgcccgcatccggaaccctagctaagcttcgatggcgatggcggcggcctggtccccggcgctcgcggcggttttgctggcggcggccgtggcgtcggcgtccaactcggagggggacgcgctgtacgcgctgcggcgcgcgctggcggacccccggggcgtgctccagagctgggacccgaccctcgtcaacccctgcacctggttccacgtcacctgcgaccgcgccggccgcgtcacccgcctgtgagtccacctcccccccccccaccgccgccgccgcctcgccgactgagctggctactaccggccggttttgctccctccgttgtgtactgcttttgtttgcttcggtgtactgacctctgccgtagtattggaaatgcgagggctttgtgctaggccgctaatgcttaaatacagtttcaaatggatctgtgagttaattgacaccagttggtgaaagggatatggtgatttagttgttcattcggttctggtgagaccgtgatctactggcaaagaacgtgatttgtagattgtcatttaattttttttaaaagattttgttctgcccatgtggaatcatcgttgcaatacagtttgtctgtaatagtaaatgttactagttagtttgtagcaacagtaaagctactcactatataatatctactaattacttgcatgtagtagtttgatatcaatactttgcacgttagctatgtcatcatgtatttgcataattatgctgatgatagctataaatggaaccggggagtactccttgatcctgcatggaaatatcgctgatgcaagctatattctctatgtgcgcaattgatccacgtaaaaccaaaaagcaattatccaatgatgattgtcgcgttacccattggctgcacagttcgcacgtgagttactccgctagcacgccatgcatctcgggaacaatgcatcgcctgctaatggtcag

SEQ ID NO: 1793 - DNA, 1084 bp, Oryza sativa
  ref <308>: DATABASE ACCESSION NUMBER: AK059776
  ref <309>: DATABASE ENTRY DATE: 2001-12-06
ccgcctcatttgctccagttcccggagggccgcaaccaccgctagccactcacccggcacggcatggctgcgtcgctccggtcgccgccccccttccccgccgcggcgttccgccgccgccgcgccgtcgtgcgcgcctcttcctcctcgtcgtcctcctcctcggccgtgtcgtccgcacccaaggcgcgcttcgtcgcccgccgctccgagtccaccttcgtccagcagctcgcccgcccgctcgcggagtacatgagcttgccggcgagtcagtactcggtgctcgacgcggagcgcatcgagcgcgtcgacgagtccaccttccgctgctacgtctaccgcttccgcttcttcgcgctcgaggtctgccccgtgctacttgttcgcgtcgacgaggagcccaacggctgctgtattagcctcctctcctgcaagctcgagggatcaccgcttgtggaggctcaaaatgacaagttttcagcttccatggtgaataaggtgttctgcaacagtagtatgagtgattcaacatctcaacagcttacatcggatactacaatcgaggttacaattgatataccatttccatttcgagcattacctgttgaagccattgaatcaagtggcaagcaagttcttgagcaactactccgagtcatgcttccacgatttttgaagcagcttgttaaagactaccaagcatgggcttcgggtgattcttcaaggaaaccacttggcactggtgaaatatgaagcttcgcagtgtctccattaggcattatagtcttttcttgttgcattagttattgcttgatggggtatagaaaagctgtttatacgtcgttttgctcacaaaatccatttgcttctttgtggtctttgcctgaagatgttctgtagtgtgtatggatttgtgccatgcgaccagtcacatacatttgtaggttgttcattcacaatgtgttgttgtaagattaacaatatccgaccaaaaactcttctgcctccatacacattacaaattatggtcctgtgatataaggattgtctatgcaaggaaggggtcggatatggttttctg

SEQ ID NO: 1794 - DNA, 948 bp, Oryza sativa
  ref <308>: DATABASE ACCESSION NUMBER: AK059777
  ref <309>: DATABASE ENTRY DATE: 2001-12-06
ctctctcgcctcgcctcgcctcgcctcgtctagttgagcagccgcgacgagcacggcggcgacgacgacctccgccgcgacgatggccgcgcgcctcctcctcctcgtacttttcgccgtcgtggcagcgcgcgtaggcgcagcggcggcctatcagcccggatctgctgaggggcacacgatcgcgggccgcatcaagatcgatgctgcaagtgcaattgcaaagggctttggtcttccagccaagacatcaaacacaaaagtgatacttaacggtggtcagagggttacatttgccaggccagatggctactttgcattccacaatgtgccagctggtactcatttaattgaggtctcctcattgggctacttattttcaccagttcgggtagacatcagtgccaggaatcctgggcacattcaagcagcattgactgaaaacagaagagttctaaatgagcttgtgttggaacctctcagagaagagcaatactacgagaaaagggagcctttctccattatgtcacttttgaagagccctatgggtatgatgcttggttttatggtcataatggtcttcgttatgcccaaaatgatggagaacatagatcccgaggagataaagcaagctcaagaacaaatgaggaactcccctgttccatccttctctggcctattagcaagagcaaacagctagacatactacacggggatactgcatggtttaagttaagtttatgatgggatgaagagcagtactgaacaccacacttgaatagaatctttccctagcacaaggtggaaactctttctccatttttattgtactttaagatgtaataggtttgtgggggtagaaccttctgaatctaactgaagtagcgatgcattattgaattattatagcccagactgagttaagtgtgttgaattttggatgttcgt

SEQ ID NO: 1795 - DNA, 1275 bp, Oryza sativa
  ref <308>: DATABASE ACCESSION NUMBER: AK059778
  ref <309>: DATABASE ENTRY DATE: 2001-12-06
gcggctcgattgcaacccgcggcccgcaacaaatccgacgccaaatcggacacggccggcgactccggcgacccaccaccacacaccaatcctcctcctcctcatcgccgcctgcgacggcgaggcggcgagcgatggattccctgggcgtgctgctggtggcgccgatgaacgcctacctggagcaggagctggaccggcggtgccgcctcttccgcctctgggagtcccccgccgaccgccgcgacgactacctccgcgcccacgcctcctccatccgcgccgtcgtcccctacgccctccagggcgtcgacgccgccatgatcgacgccctcccctccctcgagatcgtctcctccttctccgtcggcatcgaccgcgtcgacctcgacgcgtgcctccgccgcggggtccgcgtcaccaacacccccgacgtcctcaccgacgacgtcgccgacctcgccgtggggctcgccatcgccgcgctccgcaagatcccccaggccgaccgctacgtccgcgccggcaagtggaagtccaagggcgacttcacgctcaccactcggttcagtggcaagagagtcggcatcatcggtttgggcaggatcgggctcgccgtcgcgaagcgagtggaggccttcgactgcccggtgaactactaccagaggacgaagcaggatcaccccggctacacctactacccgtcggtggtggagctggcggcgagcagcgacgtgctggtggtggcgtgcccgctgaacgagcacacccggcacatcgtgaaccgggaggtgatggaggcgctggggcccaggggcgtgctgatcaacatcggccgggggccgcacgtcgacgaggcggcgatggtggcggcgctggccgacggccggctcggcggcgccgggctggacgtgttcgaggacgagccgaacgtgcccgaggcgctgctcgggatggacaacgtcgtgctggtgccgcatgtgggcagcgcgacgcacgagacgcgcacggccatggccgacctggtgctcggcaacctggaggcgcatgtcgccggcaagccgctgctgacgcaggtggtgtgagctaattgagtgactggatgattctgatttgattgattccaaagcaggtgcaattcgacaaaatgtagtatgtactgtttcaggatgtgaaaaatctgttttccctttttgtaaacacggtcggtctgggacgatccagtaataacgatttaatatttgtcattggaaatgtgaaaagtgtgttgggttg

SEQ ID NO: 1796 - DNA, 1078 bp, Oryza sativa
  ref <308>: DATABASE ACCESSION NUMBER: AK059779
  ref <309>: DATABASE ENTRY DATE: 2001-12-06
ctcgaagctctcgtctcccacatccccccttcgcctcgcggggcgggggccggaggaggaggaggagggcggcccgacgcgacggcgtacgggcggaggaggacggagagggaggggccgacggctcgccgccgtcatggagaaggttagccatctgatgaacggcggctgcggcggcgtggggaagaggaggggccttccggcggcgggggtggggctagggctgcagaagcagaactcgtggtcgccggacatggagagggacgaggcgtgggagcggcggcgcgggatgaacaagggatcgtcgtcgtcgtcggcgctgcggcgggtgaggagcgtcacggacgacgacctcgacgagctgcgcgggtgcatggatctcgggttcgggttcgaggcggccgggtgcccgctgtgcggcgccgggaggagccgcctggtggagacgctccccgcgctggacctctactacgccgttcacggcaacgccggcggcggcggcggcggcgcgggcgaggtttgcgccgccgcgagcccctgctcgtgcggcgcctcctcgtcggatgtgtccgaggagtcgccgctcgggagccccatgtccatactctctccaggagacacgccggagacggtgaagatgaggctgaagcagtgggcgcaggtggtggcgttgtccgtgcgcaaccgttgctgaactcgtcggcgacgccacgccattgacatcttctcttgcatcgagaagaatgcaagaacgaaaacttagaaggataagaaaagaatatcccctgcctcgatgcgtcggatgcgggaaaaaaaaaaggaaaatgaaaggaatttagggtttggtgggccgccgccttccaccctccggccggctcccctcctcctatctatcctatcttgaacagttcaagttcatttaacattatcataatatcattcagtcattcagccatcctttttctttactttagcagatttcttgcttattcccctaattcagatctttatcaatcatcaatgtaaatccatgaggtagactaattttatttccaaaaaaatgattattgctcatgct

SEQ ID NO: 1797 - DNA, 1063 bp, Oryza sativa
  ref <308>: DATABASE ACCESSION NUMBER: AK059780
  ref <309>: DATABASE ENTRY DATE: 2001-12-06
cgcaaagcaccatcctctcgcatcaccaattctaaccctaacgacaaccctactctctctctccaacaatcaaagattcgatggccgtgctggtggcgaggcaggggcgggagctgcagcggtacacgagcgccgggggccgcatcgtggtgggttgcatcccgtaccgggtgcgcagcggcggcgagatggaggtgctggtgatcacgtcgcagaaggggcacggcatgatgttccccaagggcgggtgggagctcgacgagtccatggacgaggccgcccgccgcgaggcgctcgaggaggccggcgtccgcggcgacaccgagacgtccctcggctgctggtactacaagagccgccgctacgacaccacctacgagggcttcatgttccctctccgcgtcaccgacgagctcctccagtggcccgagatgtcctcccgcaagcgcacctgggccacggtgcagcaggcgatggatggatgccagcacggttggatgcgtgaggcgctcgagcggctcgtctcccggcacgccaccaacaagctgcagtctgcgctgtaaacccaaccaaaatcaaagcgagctgagtcgcgcgagaagggaaacgggcgggctacgagcacagcacgggcggcggcgcgaagtcgccggcgtcgtgttcgctctcccggtgaagcggcaggccggccgggctcgatcacatctcgatcgagcaccatatattttggccgccctcaccggagagcgagacgacggcggacgaatgccccgcgcggagatcggagcacgccgacgacgacgactcttcatttggggttgcaggggtcgtcgtcgtgtatacgtacgtcgcggcgaaataacggcgcgagaattttagaaagtttgaagattcggcatcttgtaaaaaaagatcgaagctggaacaagccaattaatttaaaacaccacattgcgaaagcaattcgagattcttcctttgaagcaacaaaaagtgtcaaaatgaaccgcagtaattaccagtgccatttcgtgtcggtacaattaatgagctgattgatggt

SEQ ID NO: 1798 - DNA, 882 bp, Oryza sativa
  ref <308>: DATABASE ACCESSION NUMBER: AK059781
  ref <309>: DATABASE ENTRY DATE: 2001-12-06
gataaacacagggagagagagagagaaagaaattcaatggcctcctcttccttatttctgctagcttctcttcttgttctggcctcatggcagcaggccatcgcctttgatcctagcccgctccaagatttctgcgtcgccgacatggcctcacctgtgcgagtaaatgggtttccttgcaagaacccaatgaatgtcacatcggacgacttcttcaacgcggccaagtttgacatgccaaggaatactatgaataaagtcgggtctaatgtcaccaacctcaacgtcatcaatttcccgggcctcaacactcttggcatctcactagctcgcatcgactacgcgccaatgggtgtcaacccaccacatgtgcatcctcgtgctactgagcttctcactgtgcttgagggaacactttatgttggttttgttacatccaaccctaacaggctcttctccaaggtggtgcataagggtgatgtgttcgtgttccctaaggcaatgattcactttcaaatgaacctagaccacaataagcctgcggttgcccaatcagcactcagcagtcaaaacccaggagttattactattgctagtgccatatttggatcaacgccaccaatctctgatgatgttttagtcaaggcatttcaagtggagaagaaggtgattgattggctgaagtctcaattctcggagaataaccactactgattatatcatgtttcttgattgttcctttgtgcgttataatatgtataataaatgggcttttgcctagttgatgtcatggtatgctaaaacagtatgtttgatcgtccatgtttaataaatgtaatgcaatatggacacagtacggcgtccttttcctaattatatatt

SEQ ID NO: 1799 - DNA, 1229 bp, Oryza sativa
  ref <308>: DATABASE ACCESSION NUMBER: AK059782
  ref <309>: DATABASE ENTRY DATE: 2001-12-06
gttcgattcgacacgacgacactatcccctcccacttccccgactcatcgtcttccacggcctcaccgcgaagccgccggaaaaccaccaccgccaccaccgccaccgctacactcgcgtcgaggtgatcggcgatgttcacctgccggccgctggtgtcccctccgctgccgcggcgcctcgccgtcgcgtcccctctggcgcccgcgcggccgcctccctcgtcggcgtcgtcgctgcgcgtggtgcggtgcatggcgaaggagcggcgggtgcggatggtggcgaagcagatccagcgggagctcgcggacatgctcacccgcgaccccgtcctccagcgcgccgtcctccccgaggccgcgctcggcgccgaccagtacctctcctccctcaccaccatcgccgacgtcgagctctccaacgacctccaggtgtgcaaggtgtatgtctccgtgtttggggacgagagggggaagaaggtggccattgctgggctcaaggctaagactaagtacgtcaggagccaaataggcaagcggatgaagctgcgcctcacgcctgagatacggttcatcgaggatgagtccatggagcggggaagcaggattcttgctatactggacaaattaaaggaggaaagggagcaacaagaaggaaatgaagaagaggaagatggagaaggtgcaaatctatcagaagaagaagaaggtgactgggatgcagatgagccagatgaggaggacatcatatatgtaaaataacctgatgtgccttcttacttgcccatgattcatccaacccccgaatgcagcagctatcttagattttagtcctacaaagatgagaactctctgctttgcaaagtgttccaaagttcctcaacactaggagagcttgtctgttgccaattagaagcagatcatatccttttttacatcgccggtcaaagctgaagctattttggcgcagagttctgaaggaagatttcccctttttctgttcactagaccatggtcttcgaccgttggtgaaagatgctttaacttaagttcatccttgtcgtatgctgactagcacctgttatatgtctgcttaccttgctgaatttcagttctcattttctgttttgtttgggaatggttgtatacctttcagtaaattatgccatacagcagtacctttagttctgtactgtgtattgataaaggcacattttctgatttacg

SEQ ID NO: 1800 - DNA, 1080 bp, Oryza sativa
  ref <308>: DATABASE ACCESSION NUMBER: AK059783
  ref <309>: DATABASE ENTRY DATE: 2001-12-06
ttgaagaaattagagtgctcaaagcaagccatcgctctggatacattagcatgggataacatcataggattccggtcctattgtgttggccttcgggatcggagtaatgattaatagggacagtcgggggcattcgtatttcatagtcagaggtgaaattcttggatttatgaaagacgaacaactgcgaaagcatttgccaaggatgttttcattaatcaagaacgaaagttgggggctcgaagacgatcagataccgtcctagtctcaaccataaacgatgccgaccagggatcggcggatgttgcttataggactccgccggcaccttatgagaaatcaaagtctttgggttccggggggagtatggtcgcaaggctgaaacttaaaggaattgacggaagggcaccaccaggcgtggagcctgcggcttaatttgactcaacacggggaaacttaccaggtccagacatagcaaggattgacagactgagagctctttcttgattctatgggtggtggtgcatggccgttcttagttggtggagcgatttgtctggttaattccgttaacgaacgagacctcagcctgctaactagctatgcggagccatccctccgcagctagcttcttagagggactatggccgtttaggccacggaagtttgaggcaataacaggtctgtgatgcccttagatgttctgggccgcacgcgcgctacactgatgtatccaatgagtatatagccttggccgacaggcccgggtaatcttgggaaatttcatcgtgatggggatagatcattgcaattgttggtcttcaacgaggaatgcctagtaagcgcgagtcatcagctcgcgttgactacgtccctgccctttgtacacaccgcccgtcgctcctaccgattgaatggtccggtgaagtgttcggatcgcggcgacgggggcggttcgccgcccccgacgtcgcgagaagtccattgaaccttatcatttagaggaaggagaagtcgtaacaaggtttccgtaggtgaacctgcggaaggatcattgtcgtgaccctgaccaaaaaaaat

SEQ ID NO: 1801 - DNA, 907 bp, Oryza sativa
  ref <308>: DATABASE ACCESSION NUMBER: AK104131
  ref <309>: DATABASE ENTRY DATE: 2002-08-28
gtgcttaagttgagttcaatttcatttccaatcacacagatttgctctcttcttcttcttcctccattcaatctctcggaatccgaaccctagcctggtagggtgggggcacgatggggtgggcggcgcggttcctcacggcagtgtccttcctcgccgccggcgtgctcttcgcgccggacgctctcctcggtggctccggccgctccggcgccggggtcgcggcggcgaggctggcgcacgtcctctgcttcgccaccgcctggggcgccgcgctctgggtcaccttcatcggcggcatcgtcatgttcaagtatttgccaaggcaccagtttgggagtctacaaggaaaatgttcccagcctacttcatgttgatatcagtatgctcggctatatcagtggcagcttttgcgtatctacatccttggaagacggcatctaccattgagcgctatcagcttggattcttgatctccgcccttggttttgacctttccaaccttctggttttcacgcccatgaccactgagatgatgatgaggcggcacaagatcgagaaagacctcggcatcggcagcgaggtcgggttttcgaagaacgcggaggtggcgaggacgaacccaacgctggcggccatgaacaagaagttcgggatgatccatggcctgtcgtctctggccaacatcatggcgttcggtagccttgcaatgcactcctggtacctcgccagcaagctccagatctgacggcatcatcaccactgcttctcccatgtctccatgttctgtgcctctgagttctgaagcttgttgccgtaagctgctgatcaaaagttgtatactaggtttatgtaacagataaactgatgaaggaacttgtgatagaaactttgcaataatttggag

SEQ ID NO: 1802 - DNA, 1098 bp, Oryza sativa
  ref <308>: DATABASE ACCESSION NUMBER: AK104132
  ref <309>: DATABASE ENTRY DATE: 2002-08-28
ccgtctcccccgcttcctccgcctccaaaacccccccatcccaacccgacctcctcactcgccctcccctcgcgcttcgcttcgctccgatccgaccgccgccgccgccgccgccacagcgagaagagagagagggagatggcgggcggggagaaggtggactacgtgttcaaggtggtgctgatcggggactccgccgtcggcaagtcccagatcctcgcccgcttcgcccgcaacgagttctccatcgactccaaggccaccatcggcgtcgagttccagacccgcaccctcctcatcgaccacaagtccgtcaaggcctagatctgggacaccgccggccaggagaggtatagagctgtcacgagtgcatactacagaggagcattgggagctctcctagtctacgatatcaccaagcgccagagctttgatcacatccctcgctggctggaggagctccgtggccatgcggacaagaacatagtcatcatgctggttggcaacaagagcgatcttgaagacgagcgggccgtgagcaccgaggatgccaaggagtttgctgagaaggagaacctcttcttcctggagacctccgctctgcaggccaccaacgtcgagaacgccttccagaccgtcctgtcagagatattcaaaattcacagcaagaagaacatggcagcggacccaaaagcaaacggcgctgccccatcgctagcagggaagaaggtcgtcgtcccgggcccagcgcaggagatccccaagagcaagtgctgcagttccatgtgatcttactctactcagattcagctgtatttgtgtgcctctttttgagaattttcacgcgatctttctggatgtacatccctgctcaaatagctctaggctgcgagtattgttggactattggttgtttcggtgatcaggtggacgggatagcttagaatttgtgacattttgtcacttctctcagctggagtagggtgcgagcagaggagctctatttttcataggagtgggttaatttgtgggggttaattaccaatagccatgtatgccgattgttttacatttcttaaatcctttatgtattgttac

SEQ ID NO: 1803 - DNA, 948 bp, Oryza sativa
  ref <308>: DATABASE ACCESSION NUMBER: AK059784
  ref <309>: DATABASE ENTRY DATE: 2001-12-06
tattttggcattgtgtcgtgtcttgtcttgtgtgctgcaacggcgacgttgcacccgtcggcgttcctcctctctgttggtttgtgtggtgatatatgcatacacgtgacaaacgagcgaggcgagtactgcacaaagcttagcagttatgtatggcccgataagcagcatccaccgctgccatgcaggggccctcctaattcatacttgcgctaaggttcacgtacgaacagaggggtagagccgtagaggtcaagcgaacatggaattcagcggtgtccggttcggacgcgtctggctcatacgcaattatgcatccaaattccaaggtaagctgtaggcacttgggctgaaacacttattccattttaatactaggccatagctcatggtcagtcacaggcctgaaaaatgagtttcataactaggctgggcctgtttccaggcctaacagtatacccatttgaagcccagctcatctattcctcggtgttattctttctgatcttccttaaccaatacaccacatcgacacgctgtgttatatgcaggattcacaaacgcgctggggtcttgctgcgggaaccagagcgtgccgtgcggcaaggcagggtgcaccgtgtgcgaggacccatcgacgtacgtctcgtgggacgggacgcacccaacggaggcggtgtacaagctaatcgccgacggggtgctccacggcccgcacgcctcccctgtccctctcgccaagacctgcccgcccacctgaccaaaccgctcctcctccaccggtagaaagaagatcgatccatccattctttgtgctatggttttattacttgctcatggaaacattgtagtacattgtgtaggtgaagttcaattacaggattcgtgtagagaaagagctagtacaaagtttgcatgctatgatccatgattcaatggacgaattgc

SEQ ID NO: 1804 - DNA, 1653 bp, Oryza sativa
  ref <308>: DATABASE ACCESSION NUMBER: AK059785
  ref <309>: DATABASE ENTRY DATE: 2001-12-06
ctttttcctcccccttccgaaacgacgaaaagcaaccgccgaggcggaagcggggagaggagaattcgccgccgccgccccccgatcggtggaagaacaactaacaactagattgatccatccctgcgccgccgcctccgcctgccgtgggggctctctccgctgtggatgataggacagggaggctcgacgatgggagggaagaaggccaagacggttgagaggaatgaccaccgcctgctctgcagtgacgtgctcacggaggtcttccacaggctgccggcgcgcaccctcgcgtcgtgcaggcttgtctgcaagtcatggatgtcggagctcaccgatccccatttcgtccacgagcacctcaagaggagccagcagaagctcctgctctttgcgaacgacaaggcgaacgataggtccctcgcgatggtgctcgccgacgacacgggggctacctaccagctgaccaggcccatggcttcgaggagcctctttgtgcacaattcttgcaatggcctgctctgcctaggtgacagcacaggagccgtgcagttgctcaacccgacgaccggcgaatcggctactctgccgatgccgatgtataccgcagggagcagccagttctcgtcgtgtaattggcactgcttggggttttgcccgtctacgaaggagcacaaagtggtacatttctacctgggagctcattttgattctttcaatgtgtgctgcgagatattcactattggagataaatcctggagacagattgggagtttccatggagcaccgacagatagaggggtgcatgtgaatggagcagtgtactatctgacaaagttccgttacattgcttcgtcacgtatcaattgtttgaatcttgagagcgaaaattttgatgtgatgatgcttcccccacgcaagtcgtatggagggcattgctctttggcggagcttgagggaaagctatgcttgctagttgtggagggtggacatgataatccacctcgtacaatggacatattgatgcttgatagtggtgataagacaacctggacgcacagataccacatctcattgccatggttgatgccttcatgttattttactccaaaacacactttgttccatgagggaaaaatttgggttcagttgttggctcggaacctctactgttatgatccaagttcaagctccactgaactgaagatggcatgtccagaatctgagtttccttttagcacacatactttcattgaaagcatagttcctctgcgcaaagattacttcatcaagcagatacagtgataatggtgttcatcacttgttttccagatgttccgcagttcacagaattacaaaattgtgcccctttttccttttccgttgatgaattttagctggtcaatgacttagagtggcctattttaccgtgaattgtaattagctaaaataaatgcagtattgaaacctccttacagcacatgcttgtctgacttctaattgatgtgcttgtttctaacttcctattatgatgctaaattgatatgacgagttgagaaagagaggttgttcagtttttactttactttgaattattgttgccattttaggtgaccttttttacataacagtgaagcatgcatttctaat

SEQ ID NO: 1805 - DNA, 1067 bp, Oryza sativa
  ref <308>: DATABASE ACCESSION NUMBER: AK059786
  ref <309>: DATABASE ENTRY DATE: 2001-12-06
agttcagttccctctcgatcgcttcccgtgctctcgctctctcgcttgctagatcagagattcccctctgcggcggttgtgaggtttccgcttcggctcgctagctagctctgctgtttctgtgagagccgggagcaccaaccgcgcgtggggtgggtgcccggagctttgatgcgcgtggccgccggtttctccccgtcgtttgatgggcaacgcatgcggcggttcccttagatccaagtacctgagcttcaagcagaccgcgtcgcagcgccacgacaccgacgacaacaacaacgccgccgcggccgactcgccgaagaagccctcccgccctccagcagccgccaagacggacgaccacccagtctccgcgtcggcgccggccgccgccatgaggcgcggccaggcgcccgccgacctcggctcggtgctcggccaccccacccccaacctccgcgacctctacgccatgggcaggaagctcgggcaggggcagttcggcaccacctacctctgcaccgagctgtccactggggtggactacgcctgcaagtccatttccaagcgcaagctcatcaccaaggaggacatcgaagacgttcgccgcgagatccagatcatgcaccatctctcgggccacaagaacgtcgtcgccatcaagggcgcctacgaggaccagctatacgtgcacatcgtcatggagctctgcgccggcggcgagctcttcgatcgcatcatacagcgcggccactacagcgagcggaaggccgccgagctcacgcggatcatcgttggggtcgtcgaggcctgccactcgctcggggtcatgcaccgggacctcaagccagaaaacttcctgcttgccaacaaggacgatgacctctcgctcaaggccatagattttggtctctcagtcttcttcaagcccggtaagctacttatgcagaacacaaaggctttaaactgtgttttaatccactattccgatgcaaaattggtgttgcgattcgcaaatattgtagcgtcacattagagttaacatgcatcggttaatccattgtctg

SEQ ID NO: 1806 - DNA, 961 bp, Oryza sativa
  ref <308>: DATABASE ACCESSION NUMBER: AK059787
  ref <309>: DATABASE ENTRY DATE: 2001-12-06
acagcgcggaaaattgatcaccaaaaaaaaaaaaaatcccaaactccccaaccgccatgtctcctcaagctctcctcctcgccgccgccgccgccgccatcgtcgtcgccggcgccgcctccgcggccggcggcggcgtccagccgaacggcgcggcgaacgacctcctcccgaagtacggcctccccaggggcctcatcccggactccgtagcctcctacagcttcgacgaggccacgggggagttcgagatccacctggcggggacctgctacgtctggttcggctcccacctcgtctactacgagaggagcgtccgcggccgcctctcgtacggcgccatctccgacctctccggcatccaggccaagaagctcttcctctgggtctccgtcaccgggatcgtcgcgcacccggaccagggcaccgtcgagttccaggtcggcttcgtctccgaggcgctcccggcgtcgcagttcgacgcggtgcccgcctgcggcgccggcgcgcagctccgcggcgctgccggggttatccgggagcttggcctgctccccgtggctgaggcatgagcttctgagttgggaatcgacctgcagcaaacttgagcacctccggttcgatgttgttacaaaataaagaagacgcgcccttgagctcaggaggctgtgcaaggtttgctgtttagtgtgtatgttttgtgtggttatttatttatgaacatggatgctatccacaagtctaagatcaatatatttctaccgcgcccgggtagagctatagattaaagtcggaccgtgttgtcgtcggattcatgtgagttctgatggcatagggggtccgaatgcagtgaaaatttgcatggaacttcatatatgtagtgtatttatgtgtatgtaaatggcaagtacctggctacctgctcccatgttttaaggagaagagttggatcttgaagttt

SEQ ID NO: 1807 - DNA, 1464 bp, Oryza sativa
  ref <308>: DATABASE ACCESSION NUMBER: AK059788
  ref <309>: DATABASE ENTRY DATE: 2001-12-06
aaaaaatggcggcggccagggccctcctgcccgtcggcggcgccgccgccgtcgccgttcctcgacggctgcgctccggggaagcctcgtcgacgtcgctcagcggccccgtatcggatggcgcccgcctcgtccgccggatgcagctccgccctgctcccctcctcggttcgtcaacttgcgcgctgccttccctgcggggtaagcggctcatccgcaccccggctgcttcctcctcctcctcctcgttggactccaccggggaagcaaagcctgtgggatttgcagagagataccctgctcttgtcaccggtttctttttcttcatgtggtattttctgaacgtgatatttaacatccttaacaagaagatcttcgactacttcccctatccatattttgtgtcggtgagccatcttttggtaggagtcttgtactgccttgtcggctggagttttggtctcccaaagcgcgcgccgatcaactcaacggttctgaagctactgttcccagttgctgtctgccatgctattggtcatgtaacaagcaccgtgtcctttgctgctgtagctgtctcatttgcccacaccattaaagctcttgaaccatttttcaatgcggctgcttcacagtttatccttggccagcaagttccattgacgctgtggttatctcttgctccggttgtgataggtgtttcaatggcatctctcactgaactttcattcaattggactggtttcgttaatgccatgatttctaatatctccttcacattacggagcgtttattccaagaaggctatgactgacatggatagcaccaacctgtatgcgtacatctcaataattgctctccttgtctgcatccctcctgcaattattattgaaggacctcaactagtgcagcatggattcaaagatgctattgctaaagttggattagcaaagttggtttctaatctccttgtggtgggcttgttctatcacctttataaccaggttgctacaaacacattagaaagggtgacccctctaacacatgctgttggcaatgtgttaaaacgtgtcttcgtcattggcttctcaatcattgcattcggcaacaagatcaccacacaaacaggaattggcacttgcattgccatagctggtgttgcactctattcttatatcaaggctaagattgaagaagagaaaacgcaaatgaagagcgcataaggagttgaatctgtggatatagttgggtagctgctttgatcgatctgtattgcctccgagaaataaaatgagctgtaagatttataacaatctaggtgcctgctgtatctcatcttgtttgttattgtcgatttcgctttgaacagcaaaagctaccgatgcatttttttttttttgtaaattataactgctaaaaacccgcagaaacaaagcctccatcatcccattttccccttccttggct

SEQ ID NO: 1808 - DNA, 1328 bp, Oryza sativa
  ref <308>: DATABASE ACCESSION NUMBER: AK059789
  ref <309>: DATABASE ENTRY DATE: 2001-12-06
ctctgaccccgatagaaagggaggaaaaaaaaaagagaaggcgaaaccccaaatccgccgcgatggccgccgccgccctcctccgccgctcgccggcggcgcgcgccctcctctccccggcgctctcctcccgcctcgtcgcctccaagccccactcgtcgtcccccgcgccgccgccgccgccgtcgaaggcgggggcgaacaccaagacgttctcgatctacaggtgggatcccgactcgccgtcgacgaagccccacctcaaggactacaaggtggacctctccgactgcgggccgatggtgctcgacgtgctgctcaagatcaagaacgagcaggacccgtcgctcaccttccgccgcagctgccgcgaggggatctgcgggagctgcgcgatgaacatcgacggcgacaatggcctcgcctgcctcaccaagatctcgtcggcgtcctcggcctccacgatctcgccgctcccccacatgttcgtcatcaaggacctcgtcgtcgacatgaccaacttctacaaccagtacaagagcgtggagccgtggctcaagcgcaaggacgcgccgccgcagcccgggaaggagatcccgcagaccaaggccgaccgcgccaagctcgacggcatgtacgagtgcatcctctgcgcctgctgctccacctcctgcccctcctactggtggaaccccgaggagtacctcggccccgccgcgctcctccacgccaacaggcttccgctgttggggacgctaatcaaaccaaaacccaacatgttcatgcacatccaagctcgaggatatcacggggtatcggagaagagaaacttgctggatcacaaacgtagattgcttgcagcaaaatatgaactgaaaggaaagctttataaggctgtttgtagggaccctgatcttccagcagatatgcaggaccagtttcgctataagctgtccaagttgccaagaaatagctccatgacacgccttagaaaccgctgtatcttcacgggccgctcgcgcgctgtttacaagaaattccgcatgtctcgtattgtgttccggtcattggctaataagggtgaattgttgggtgttaagaaagcgtcttggtagatgctaacaaccagtagatcaaagcactagctctgcagtagtccagcacaataagtttgcctccatgcagtttttcagtgtttgcaacctgaaactatatttcaatcttatgaccagcagccaatctggcactctttcaattatttagttgaaccaatgtactgtactgtttttctgcctattgagcatttatgaagttaaaagttttggacc

SEQ ID NO: 1809 - DNA, 1145 bp, Oryza sativa
  ref <308>: DATABASE ACCESSION NUMBER: AK104133
  ref <309>: DATABASE ENTRY DATE: 2002-08-28
attcctcctcgcttcgacaaacaaaaccccccaaaaccctagcctccgccgcccgccgccgccgccgccgcgcaacccccgagctcgagcggcgcgatgaacatcaagggcggaggccgggtcccggtgcccccggccggcgcgggcacgctcgtcaagctggtggtgctcggcggcacggccgtgtacgccgccgtcaacagcctctacaacgtcgagggtggccaccgcgccatcgtcttcaaccgcatccagggaatcaaggacaaggtataccctgaggggactcactttatgattccatggtttgagaggccaatcatttatgatgtccgtgctcgtcccaatcttgtggagagtacttctggaagcagggatctccagatggtgaaaattggtctccgtgtccttacaaggcccatgccagagaagctaccaactatctacaggactctgggggagaacttcaatgagagagttttgccttcaattatccatgaaacacttaaagctgttgtcgcacaatacaatgcgagtcagctaatcacacagagagagaccgtgagtagggagataagaaagatactgactgagagggccaggaattttaatattgcccttgatgatgtgtccatcacaagcctgagcttcggaaaggagttcactcatgctattgaagccaaacaggttgctgcacaagaagctgagcgtgctaagttcattgttgagaaagctgagcaagacaagaggagtgcgattatcagggcacagggtgaagctaaaagtgctgagctgattggtcaagccattgcaaacaaccctgctttccttgccctcaggcagatcgaagctgccagggagatctctcatacgatgtcatcttcagctaacaaggtgttcctggactccaatgatctcttgctcaatctccagcagctcaccgtggcaaacaagtcgaagaaatgaagtcattctcgcaccatgttctaggttattagcagatgtcagtctaccagacaatgtgaggaacacttggtcctctctgtagttgcactagtgatcatctgtgatacagaactcgacgagtgactcaacttttggcaaccggcaatctttttgcaaattgcagctaaactttgcaggct

SEQ ID NO: 1810 - DNA, 1152 bp, Oryza sativa
  ref <308>: DATABASE ACCESSION NUMBER: AK059790
  ref <309>: DATABASE ENTRY DATE: 2001-12-06
taaacccaaatactccagtataggtttctaactctgcgtcgcacgcagcaagggccgaaggccgcatcttcgccgtccccaactccttccaccgcgacttcgccgccgtccacggtccgccctcgccgccgtcgatggccgatccctaccgcgcttacgcccctccctcctctctcggccgagatccgcagggtgattttcctaggcatcctccatccgagggctcttattatgcttcaagaatggctgctctccatggaacatcagatatacttagacatgatgtaccattacagccaagagcttatggtttggatggtgcagcaggagcaagtcatcctgctttggctggtcttggtggactggctgctggaactacagctcgggggcctagtccactggaagacccagctttagtaaggagaagttcttctctaggaaaaactgctagtattccagatgttgagcatcccagaccccttctgaaccttgatggtccaagagaagatgaatccaacattctctttgttgatggtctccctactgattgcacaaggagagaagtggcccgtatccttcctacttagtgttcttatgctctgtgtttatatctctttcttagtttcctttcgtgagccttaacttcccatggaagatttgttccgtccttttgttggcttcaaggacatcagactagtgcataaggagccaagacatagtagtgatagggcctatgttctatgctttgtggagttcagtgatgcaaaatgtgcaataactgctatggaggctctccaagaataccgcttcgacgagaggaaacccgacgccgctgttcttaatatcaagtttgcaaggttccctttccggccggccgctgccccccatgatgatcggagacgccttaccttgcactgattagttcctaacttcctatcatccttagttagctgtgcccaacctgaccttatcattgcaacttgtaaatcttgtaccatctctgtcccataatacaagggatttagctcaatcctttatattctgtgatggaggtagtaacaacctgttgtcagtcgaaactggctagcaggaatcttgaacagcagcaaaacaaggaatgtacatttgtgggttcgaaacaccttcagattt

SEQ ID NO: 1811 - DNA, 1107 bp, Oryza sativa
  ref <308>: DATABASE ACCESSION NUMBER: AK059791
  ref <309>: DATABASE ENTRY DATE: 2001-12-06
gctaatctccttagccctctcctccattggagctatagctagcaaacttttttttttactgagcaaattcagttagcgaagcgaaaaccatgaagaaggagatcattatcaggatttccgtgaaaaccgacaaatgccagaagaaggccatgaaagaggctgctactgtcagcggggtgcagtcggtgacgctggccggcggcgaccggaacctgctgctggtgatcggcgagggcgtggacacgaacaagctgaccaagaagctcaagaggaaggtgggctccggtgagatcgtcgagctgaggaccgtcgacacgttcgaggcggcggcggcgatgttcccgggcgggatgatcatgccgccgccggcgccggggagcaaggacgccgccgccgccagggcgatggcgacgacgcgggcgtcgccgtaccactaccagccgtcgccgtacggcccgtaccaccagcagcagcagtggcagccgccgtacgccatggcgcccagcccgtacgcgtacccgtaccagtaccacccgtcgccgatggcgatggccgccggcggcggcggctacggctacggcggcagcagctactcccgcgcggtggcgctcagccacccggccatctactcgccgctggtggagaagcacgactaccaccccatgaaccactccaccaccaccaagaagaagaccaccaccaccaccaccaccaccggcgccggcaccggccgcgccgccgccgcagccgccggcggcaagaccttcaaggcggtgtcccgctcccgccgccaccacgagagcgacagcaacgcctgctgcattctctagcaccaaattaatctcgatccataaaattacctatatatgtgcatgcatgtacatatgtgtgattttgcttgttgctttcttgccttgttcttttccatttttgaaggtcgttaaccttttgctgctttcttttgcggttaattaatttggcagcttttgctgcacaacctagtgaattaaccatgtataataataaaactgtatatcgtaaaaactgtacctgtaaaactctgttactgcttggatttcttcagagattatctgaagttcttgcaag

SEQ ID NO: 1812 - DNA, 951 bp, Oryza sativa
  ref <308>: DATABASE ACCESSION NUMBER: AK104134
  ref <309>: DATABASE ENTRY DATE: 2002-08-28
acgccattccaccggagcagccgggagcgcggaggccatggcgatgtgggtgttcgggtacgggtccctggtctggaaccccggcttcgcgcacgacgcccgcctcgtcggcttcgtcagggactaccgccgcgtcttctaccaggggagcacggaccacaggggcacgccggagttccccgggaggaccgtcacgctcgagcaccagcccggcgccacatgctggggtgttgcttacaaaatttcaacggaacaagataagcagacagctctggagcatctggaagtaagagagaagcaatatgatgagaagatttaccttgatttgtatatggactcctcaccaaaaacaccagccgtcaaaaatgtgatggtatacttagccacaacaaacaagcagagcaaccaaaactaccttggtcctgcaccgctggaagaaatggccaagcaaatttacctagctgaaggcccatctggacctaacaaagagtacctgttcaaacttgaggatgcattgaacaaaataggagttgttgatccacatgtccaggatctggcaaatgctgtgcgcaagtatccagacactgcggtatcttgctgaaggatggcatttccctcctctttgggagggtaaaaatataactgaaggaagttagatcaattcatgctcaaacatcttgaatcttgtaaatgtggacagcttctgccgatattcttgtccatctgtagatggcagtagaaaattcgcaataaggatttaagttgggggtatgaaaactgccacattactgcgttgggaatcaaacccttcttttttactttcaaaacaagattgttctctacttctcttatattgaagcataatcactgtgcatggtctagttagctgcagcctgcaggcttggtcactcgaccatgctttgtcgtataaaatgttttatgattcaagct

SEQ ID NO: 1813 - DNA, 1132 bp, Oryza sativa
  ref <308>: DATABASE ACCESSION NUMBER: AK059792
  ref <309>: DATABASE ENTRY DATE: 2001-12-06
caatagtaaatcatcattttgtacagaggaaaaaatgctgcatttttctgaacctctttgttttaggttgccagcatggttcctgctcaaccagcgaatgccccactgccaaatccatcatcagcatcatcattaccttcagtgatatccacacccagcaaggaggatgctgagttagcaatggccatcaatgcctccatcctgtcagctatagccgagggagtgcccgatgttcagccaataacaacgactactgcgaccaatgattggggaaaccctccaagcaactccctcaatggatggggcccaccagatacttctgcgccttcaaagacaagtggccaagtaccagttgttacatcaagcagtagcacatacaatgggtgggacgtgcctggaacaagctctggccaaagttcgtccaaacacaacaaaagccagaacagcactttcgtggttccgcaggaggcgcttccatctcttccagtcccaactgcgcctccacttgccgtgggaaccttctacgatggtcctattcagtatccgtcaatagattccacgccagtcgacgtaaccatgccttctgctgacggtggtacagcggtaagctctgcaaaacctgcagagaacgaaggtgatgcaaaacctgcagaaagtgatgctaatgcaagcaacagcggtaacactccaccgggaacctgtgttatttgtttggatgctcctgtggaaggtgcctgcattccgtgtggtcacatggctggttgcatgtcctgcttgaaggatatagaatcaaagaaatggggatgccccatttgtcgagccaagattaaccagattatccgcctctatgcagtttgagcaattccaacaatcaaatagtagacatgggaatgaacaatgggtgtttgttcttcgttacaagttctgatggaaaaagaaaagctccatctgtaaagtatgtcatgctgtcagctgtgattttgatgttccaattgtactgaaaaaattatacattctgtgttatgtgcattacgtgaagctatgaacggtagtacgatacattactatagggaacttgtgtacatatatatctatgagaactatacagtatacataagattaattgttggct

SEQ ID NO: 1814 - DNA, 938 bp, Oryza sativa
  ref <308>: DATABASE ACCESSION NUMBER: AK059793
  ref <309>: DATABASE ENTRY DATE: 2001-12-06
gcatttggcctccatctgccaacaaactcgctagctaccaggagaggaccattaacgatttaatacactgacacacacacacatatgtgcaagttcgatcgatacaagacaggaagagatcaccatgtctagctagctaaattaataagctagctagagctggttgcatggttgattagctacgacgtgcagttgattagagatggaagagatcgccggtggtggctcgccgccggcgatggaggaggaggagaggtatgtggaggtggcgtcgaggttctaccgcgtgaagcccggtgccggcggcggcggcggcggccgccgtctccacttcctcgagtcgtgcttcctctgcaagagcagcatcgccggcgaccgcgacatcttcatgtacagaggggatgcagcgttctgcagcgacgactgcaggcaggagcagatggacatggacgaggcgctgcaggcggtggcgcgccgccatcgcctccgttcgtcggcggcgccggcttccgccgaggcagcagcggcggcgccggcgaggtctccgatgatgcaccgccggccgaccatcgccaacttcgcggcacgcactccagtggccgccaccagctagtgttgtgtactcctatactaacatggtcgagagatgaatctgccgctgcgttcatgatcaactgcatgcatgcacgcatcgctcatcatcatcaaacgccaaagttaaattaaacagtgtggattggcatatatatatgtatgtagcctaggtagttgtagatccatggaatattacatagatccgtgtttttttgccatcttcattttgtttgttttgtggttttcacacggttccatgtgtgatcagttgaggctagctacggccatggattggtaaattgttaattagattttgggatcagatcttgcatagttgcatatac

SEQ ID NO: 1815 - DNA, 1374 bp, Oryza sativa
  ref <308>: DATABASE ACCESSION NUMBER: AK059794
  ref <309>: DATABASE ENTRY DATE: 2001-12-06
atatagcgaggacacaaactcgctgagcgacagcgcgttcacgaaggatggccttgttgagcagctgagcatgacatgggacaagtcagactacctgtggtacaccacatacgtcaacattggtacaaatgacttgaggtctggtcagtctcctcagctcactgtctactccgctgggcactcgatgcaggtgttcgtgaacgggaaatcatatggatctgtttatggtggttacgacaacccgaagctgacatacaatggacgtgtcaagatgtggcagggcagcaacaagatctccatcctaagttcagcagttggcctccctaatgttggcaaccattttgagaactggaatgtcggagtgctcggaccggtgaccctctccagcctaaatgggggcacaaaagacctcagccatcagaaatggacctatcaggtcggcctgaaaggcgaaacgctgggtctccacaccgtcaccggaagctccgcagtcgaatggggtggccctggcggctaccagccactgacttggcacaaggctttcttcaacgcgccggccgggaacgacccagtggcgctcgacatgggcagcatggggaagggccagctctgggtgaacggccaccacgtcggccggtactggtcgtacaaggcctccggtggctgcggcggctgcagctacgccgggacgtaccacgaggacaagtgccggtccaactgcggcgacctgtcccaaagatggtaccatgtgccgagatcatggctgaagccgggcggcaacctgctggtggtgctggaggagtacggcggcgacctcgccggcgtcagcctggcgacgagaaccacatgaacgaattgcagcgagagatcatcaccaccatttgatacagtcgtcgacggccgcgtgaacagcttcctcctgtagcacgcagaattcgtcgatggtatttacacacacagacgaacaccttacaagtaaaaaaaaaaaacacaggagcagcagcaacaggtgtgtatttattggggagtcggagaggtggttgtctcgctcgccggtggccttcactgcggctgcagcgacggcagtggcatcaccggccaccggccggcatgcagacgctgttcagttgtttgcgttgctcgggaatttgttacggtgcatagagcatttgttattgtaacttgtaatctttgtcgacattataaattactagtattactagttgtgagaattgattatgcaggaaatcacaaatagttttgtcaatccgttattgtctgtagctatccatttttaggaaaactgtttgatgtgttggagattttacgagaagttgaagttgttaaaagctctctagagggccaatttaggat

SEQ ID NO: 1816 - DNA, 819 bp, Oryza sativa
  ref <308>: DATABASE ACCESSION NUMBER: AK059795
  ref <309>: DATABASE ENTRY DATE: 2001-12-06
agaatgagccggcgactcataggcagtggcttggttaagggaacggaacccaccggagccgtagcgaaagcgagtcttcatagggcgattgtcactgcttatggacccgaacctgggtgatctatccatgaccaggatgaagcttggatgaaactaagcagaggtccgaaccgactgatgttgaagaatcagcggatgagttgtggttaggggtgaaatgccactcgaacccagagctagctggttctccccgaaatgcgttgaggcgcagcagttgactggacatctaggggtaaagcactgtttcggtgcgggctgcgcgagcggtaccaaatcgaggcaaactctgaatactagatatgacccaaaaataacaggggtcaaggtcggccagtgagacgatgggggataagcttcatcgtcgagagggaaacagcccggatcaccagctaaggcccctaaatgaccgctcagtgataaaggaggtgggggtgcaaagacagccaggaggtttgcctagaagcagccaccctttaaagagtgcgtaatagctcactgatcgagcgcccttgcgctgaagatgaacggggctaagcgatctgccgaagctgtgggatgtcaaaatgcatcggtaggggagcgttccgccttagagggaagcaaccgcgaaagcgggggtcgacgaagcggaagcgagaatgtcggcttgagtaacgaaaacattggtgagaatccaatgccccgaaaacccaaggtttcctccgcaaggttcgtccacggagggtgagtcagggcctaagatcaggcagatccatatat

SEQ ID NO: 1817 - DNA, 1076 bp, Oryza sativa
  ref <308>: DATABASE ACCESSION NUMBER: AK059796
  ref <309>: DATABASE ENTRY DATE: 2001-12-06
aaaaaaaaaaaaaagtaggctttgggatcgccgccggtgacgatgaagccactgaaggacgcggacgcgcaggagaaggcggcgccgccgccgacggagtggtacgacccgctgtcgtcgccggggcggccggtcagggtgtacgccgatggcatctacgacctcttccacttcggccatgcccgcgccctcgagcaggccaagaaatcattccccaacacatatttgctcgtgggctgctgcagcgacgagatcaccaacctttacaaaggcaagaccgtcatgactgaagacgagcgctacgaatcgcttcgccattgcaagtgggtggatgaggtgataccagatgctccatgggttatcaatcaggagttcctagacaagcaccgcatcgactacgtcgctcatgatgctcttccgtatgcggacaccagtggagctgccaatgatgtctatgaatttgtgaaggccgttgggaagttcaaggagacgaagcgcaccgagggcgtctcgacgtctgacatcatcatgaggatcttgaaggactacaaccagtacatcatgcgaaatctgacccggggatactcccgcaaagacctcggtgtgagctatgtcaaggagaagcaacttagagtaaacatggggatcagcaagctaagggagaaggtgaaggagcatcaagagaagtttcacagcgcggcaaagatagctggaagcaatcctgtggagtggatggagaatgccgaccgttggatcgttgggtttcttgaaaagtttgaggaaggttgccacatgatggaaaccgcgattaaagatcggattcaggaggggctgaagaggcaaagcaggtcggaccccaacctttctggggaggattccgactcataatggatcctgtaatatccagatcaaactgggaagagaaaaaattgtggagatcatttctagccttgtgtgagattagcctcatgttgtaggacaattaaagtgaccgtgcatggtttgtttgtaccaaaaggttttgtacttctgagaacaataataatagttcgtgcaattactgctcaaggttatcc

SEQ ID NO: 1818 - DNA, 1290 bp, Oryza sativa
  ref <308>: DATABASE ACCESSION NUMBER: AK104135
  ref <309>: DATABASE ENTRY DATE: 2002-08-28
aaaccaacctcaccgtcgacgaggaagaaggcggcggcggcggcggaggcgaaggcggcgaagatgcagtacaagaacctggggaggtcggggctgcgggtgagccagctgtcgtacggggcgtgggtgacgttcggcaaccagctggacgtgaaggaggcgaaggcgctgctccaggcgtgccgcgacgccggcgtgaacttcttcgacaacgccgaggtgtacgcgaacgggcgcgccgaggagatcatggggcaggcgatgcgggacctcgggtggcgccgctccgacgtcgtcgtctccaccaagctcttctggggagggcagggccccaacgacaagggcctctcccggaagcacatcgtcgagggcctccgcggctcgctcaagcgcctcgacatggactacgtcgacgtcgtctactgccaccgccccgacgccaccacccccgtcgaggagaccgtgcgcgccatgaactgggtcatcgaccacggcatggccttctactggggcacctccgagtggtccgcccagcagatcaccgaggcgtggagcgtcgccaaccgcctcgacctcgtcggacccatcgtcgaacagcctgagtacaacctcttctcgcgccacaaggtggaatctgagttcttacctctttacagcacgtatggcctgggtttgactacatggagccctctagcttcgggagttctcactggaaagtatgccaaaggaaatatacctgctgatagtaggtttgccctagaaaattacaagaacctggccaacagatctctggttgacgacacactgagaaaggtgaatgggctaaaaccaattgcttctgagcttggtgtttcgttagcccaacttgctatcgcgtggtgcgcatcgaacccaaacgtctcatctgtgatcactggagccacaaaagaaaaccagattgttgaaaacatgaaggccctcgatgtcattccgctgctaaccccagaagtcgtcgacaagatcgaagcggtggtccaaagcaagccgaagcgcaccgagtcatacagatgaagcggtacagggggtgtgcagagtgtgctccagggatttcaggatttacccggtgggattcttttagacgatattattatcttccattgtcttatgtttggaagctgctttatgtgcctgggtttgtgtagttgggaaatggtgtccagtggtactctgctctatatacattttgtcatgtggaccactcacttgttgctgtcggtgatatatataccttggtcttttccgtgtgcatct

SEQ ID NO: 1819 - DNA, 1057 bp, Oryza sativa
  ref <308>: DATABASE ACCESSION NUMBER: AK059797
  ref <309>: DATABASE ENTRY DATE: 2001-12-06
atggatcctgacacttggtccgagccttgggatcgttcgggtgcctggaatcggtctcatctacacagagctggtcaccggggtgccttccatcttctcgcactttgtcaccaacctgcctgctttccatcaggttctggtcttcgtttgcgtcaagtccgtacctgtgccgttcgttccagaggacgaacggtacctcattggacggatcggccccagggaataccgtatgtaccggtgcatcgtgaggtatggctacaaagatgtgcagaaagatgacgagaactttgagaaccacttggtgatgagcattgccaagttcatccaaatggaagccgaggaggcagcctcctctgggagctacgaatcttcggaagggaggatggctgtcatacacacagaggacacaaccggcaccggtctggtgatgagggactccaataacgaggcttcaggcacgtccctgacaaggagcagcaggtcggagacgctccggagcctccagtccatctacgagcaggagtccggtagtctcagccggcgtcgcagagtccgttttgagattgcggaggaggagcggatcgacccccaggtgcgggacgagctggctgatctcctggacgccaaggaggccggcgtgacttacatcatcggccactcctacgtgaaggcaaggaagaactccaacttcctcaagacgttcgccatcgactacgcttactcgttcctccgcaagaactgcaggggtcccgcggtggcgctgcacataccccacattagcctcgtcgaagtcggcatgatctactatgtctaaatcgatttttctgatcatgcttgccgtactacccagtaatactagctttgttttgagctgaatcttctgttggtcatcctcaactgtgtacgtcattttgtttgctcttttatacatgtaatgtagttgccgagttaccatgtgatgtaaagatgctggcagaactagctttagctgctaccatctgaactccggggcttcggtgatcttgtgaatacatccagttcaactgttaaaatgttc

SEQ ID NO: 1820 - DNA, 1196 bp, Oryza sativa
  ref <308>: DATABASE ACCESSION NUMBER: AK059798
  ref <309>: DATABASE ENTRY DATE: 2001-12-06
aagccacacgtcgccgaatccgaacagctcttccacgaaccacttgcccctcctcacgccctctcctcgtcggtttcgaaccatctagaagcgtcgccgccgactcgccatctcctctctaggtcaccggatttcctagccggcggcgagctcgtcggctcaggcggcggcggcggcggcgatggactggagctccgtgactgcggaggatctggtggacgcgctgcgggaggtggactggtcgacgccgccgcgccccgtctccgagttcttctcccgcttcaccgccccgcgatcctactccaagtggaccagccgcctcaagtgcaacctctactactacaggacgaactacttcatcttgatcatgttcattcttgggatgggctttctccggaaaccagtttccatccttgcagctttttcaacaggcctcagcattgcatttctcaatgacagttttgcagttacattcaatgagaaagtcacaaggacagtcagacaattttcaccacatttagcagcaaagatgaggccacccttaagacctgtcattcgtggccgaccaagctcaaaaagatcaattcatatttgtggccggcctcgatgggtttttgttgtattattttctgtcgtaagctgcttcctctggatgacctcatgtagtctccttacggttctgtgggcactaattgttggtctgcttgcaaccttgcttcacgccagtttcagaacacctaatctgaaagcacgcctgaacacattcagggaggaatttcgagcagtatggcggaattatagcgagttttaaacgccctttttgtctaccccattgcatcattgtggagctgcttattggatgtctctgcggtggtgcaatgtagaaggacctacttcagtgtgctttcgaatttcttgattttctctgcagatttatgtggtaaaaatgttaccaagttccatatctctgctacctcttgcgactctttaattgtgggagattaaaaataggcatgctattttctccagtttatggatttggctttagattgtggattattctagtcccccaccacatggatctccatagttttagcttctggtccaaaacttctactgtattttgatacattggggaaggaacagcatgtaaaagagacagctatcctgaagagaagaaaaaagatattgttgtg

SEQ ID NO: 1821 - DNA, 1023 bp, Oryza sativa
  ref <308>: DATABASE ACCESSION NUMBER: AK059799
  ref <309>: DATABASE ENTRY DATE: 2001-12-06
gtccacgtaaccctcctctcctctcctcgcctcgcctccctcccgacgaaggaaatcccaccctctccccgccccgcgaatccgccgcggtaaaccaccccccgcgccgccgccgccggtgcgggccgaggcggcgaagatgtcgtacgcctacctcttcaaatacatcatcatcggcgacacaggggtgggcaagtcgtgcctgctgctgcagttcacggacaagcggttccagcccgtccacgacctcaccatcggcgtcgagttcggcgcccggatgatcaccgtcgacagcaggcccgtcaagctccagatttgggacacggcaggccaggagtcattcagatcgataactagatcgtactacagaggggctgccggtgctcttttggtttatgacattacaaggagggagacattcaatcatcttgcgagctggctggaagatgcaaggcaacatgcgaatgctaacatgacaataatgcttgttggaaataaatctgatctatctcataggcgtgctgtgagctatgaggaaggcgagcagtttgcaaaagagcacggtctgatatttatggaggcgtctgcaaaaaccgcgcagaatgttgaggaggcttttgtcaagactgctggagcaatatacaagaaaattcaagatggtgtctttgatttatctaatgaggctaatggaatcaaacttggttacacggtcccgggccaatccggaggtgctggttcctcgtcttctcaagggggtggctgctgcagtagctaatggaacgatatactcgggtgtctatcgtgtgtcacactgccacttacccttggaatcatcttcttgatgctgactgaaacgtagttgctccagtgttaacatgccaaaagactcggttcatttatgtctgctgtgcataaacagtagtctctagatttttttttacagcttcatgccacttggcatctaggaattcttattgtctgcatgtgtaattacaatagcaatgcatggtttgaatatttggt

SEQ ID NO: 1822 - DNA, 1281 bp, Oryza sativa
  ref <308>: DATABASE ACCESSION NUMBER: AK104136
  ref <309>: DATABASE ENTRY DATE: 2002-08-28
ccatcctcttctcctccgcattttgctcttcattcatttgtgctgtgctctccacgcgccctcgcctctctttcctccgatcctccgcttcgttcgaatcccacaggtcagtttgtggtgttcatatggatccctttttccgcagagcttccagtgaccccttgtgcttggaagacaactccgtccaacatggaattgaaagatgcccattcctaaggaacatcaatgagcctacaagtttttcattctcgtccgttaattttcctgttcctgcaagaggagacaagggtccaatttttgaagatggacccaattttgacatggcatttcgagttttccatggccaagatggggttgttccactttcacatggatcatttgagcgatttgagaagccaatgccaaagcccaatcctgaatttaaccccttggctgctaaagcagctaccatcagtctctctgcatttggaggttttttcagctttggtgatttctcaaataagcgcaataagaagaatagtaaccaaaagaagcccaacaaccttccccagaacggaggtcagcctaataaccatgaagcactgagcaatgagtggctggaaatgggtcaatgccccctggcaaagtcgtacagggcattaagtggtgtcgtgcccctcgtcgcaaagatgatgacacccccggctggtatgaaactgagatgcccacctgcagtagttgccgcccgtgcagcactatcacgcacagcctttgccaaggggcttcgtcctcagcccctaccgacgaaaatactggtgatggcgttgcttggtatggcagcaaacgttccccttggcatctggagggagcacacggagaaattctcagtgcagtggtttgccgcagtccatgcggcggtacctttcataggcatgctcaggaagtctgtgctgatgccaaagacagccatggcgcttaccatagctgcctcaatattgggtcagacaattggttcgagagctgagcgtatcagattgaagagggcagcaaaggttgctgctggtagccagggtgatgctagcaccagaatgagcctgaaaaccgggagatacactgatgatgtccagttctgggatccgcttgccctcagagttgagagtaccataggaacaggaactccggttcttgttccaactttccattgatgatgtgccttgggtttgtttcttcggtcgattattgttgtattcattgtgttgtgccttagtctttatactaaatattacgttggatgcttctccc

SEQ ID NO: 1823 - DNA, 1189 bp, Oryza sativa
  ref <308>: DATABASE ACCESSION NUMBER: AK059800
  ref <309>: DATABASE ENTRY DATE: 2001-12-06
tgtgcagagggagatcatcaatcataggtcgctccggcatcccaatatcattcggtttaaggaggtttgtttgacacccacacacctagccattgtcatggagtatgctgctggtggagaactctttgaacaaatctgcaccgcagggcgattcagcgaagacgaggcaaggtacttcttccagcagctaatatcaggtgtcagctactgtcattctctggaaatttgccaccgtgatcttaaacttgagaacaccctcctggatggaagcccaacacctcgtgtgaagatttgtgactttggttactcaaagtctgctttgctgcattcgaagccgaagtctacagttggtactccagcatacatagcgccagaagttctttcaagaaaagaatatgatggcaaggtagcagacgtttggtcctgtggtgtgacactgtacgtgatgcttgtcggttcatacccgtttgaagatccaggtgatccgaggaatttccgcaaaacgatcagcagaattcttggcgtgcaatactccatcccggactacgtgagggtgtcttccgactgcaggcgccttctatctcaaatatttgttgccgatccttcaaagaggatcacgatccctgagataaagaagcacacgtggtttctgaagaatctgccaaaggagatatcggagagggagaaggccgactacaaggacacggacgccgcccctccgacgcaggccgtcgaggagatcatgcggatcatccaggaggccaaggtccccggcgacatggccgccgccgacccggcgctgctcgcggagctcgccgagctgaagagcgacgacgaagaggaggccgccgatgagtatgacacctactgaccatccatgatccatatgcatccatggtcgttgtgctgcagctgtaaatatgatccggaatatacgtgatcgccagaccaaatgatatgcgtattctgatgcattttctgccgtgtatactctgcaccggattttcctgcagcgtaaataataaagaaaaaaaataattatttgtttgcagtttcgtgtgatcatttggcaaggactattcagtttgcatggtcattttcccagtttattcattgaattatgtaattggattatttgtgctacacttccttgtctttggattatttaaacatattatttgcgcttctc

SEQ ID NO: 1824 - DNA, 1007 bp, Oryza sativa
  ref <308>: DATABASE ACCESSION NUMBER: AK059801
  ref <309>: DATABASE ENTRY DATE: 2001-12-06
agcatcgagtcggctttgttggcctactggaattcgatgcagccgcggtagcaattcgcatcgccccgccctcctcgccgcgcggattcgctcgccgcccccgccaccgcacccccatggacgcctccgccggatccggcaatgcctccggtggcgccggcgccggcgcgtccgcgtgctgctactactccctgctcggcatccggaagaacgcgtccgccaccgacgtgcgcgccgcctaccggaggctcgccatgaagtggcacccggaccggtgcgtgagcgaccccggcgaggccaatcggcggttccagcggatccaagaggcgtactccgttctgtccgacaaggggaagcgagccatgtacgacgccgggctgttcgatcccctcgacgacgacgaccaggatttctccgatttcatgcaggagatgctggtgatgatggataacgtgaaaaacgagaagccggacacactcgaggacctgcagaagatgctgcaagacatcgtcagcggcgacggcggaagccgcggcggcggcgtcggtggccgcgtgccgtcggacggcacacggaggacgcgcgtcgcgccctacccggcgcagtcgcgcaggtgaccggcgcgccggtgtacgagacgtgcacacgcctctaagtgatgaaaagagagacaagcagaagaagagaggaagcaaacgggaaagaaaaaccaataaaatttggcagaatttgtttcccttttttttaggtcatcagatgattgactccgtttagttcgctgggttgggttgggtcgggtgtgccgttcgattccggccgcgtcacccaagaattggtgcgtgcgtggccaaagattccaatatcttgtcgacatttcgtcctgaatttcactctcttgttgatgtgttcatcatgcgtcctcttctgccttcctgtgtcattgtccctgtcctactcccacagtgtattcccaatttgttacactactggtgctactattgatgtgt

SEQ ID NO: 1825 - DNA, 1021 bp, Oryza sativa
  ref <308>: DATABASE ACCESSION NUMBER: AK059802
  ref <309>: DATABASE ENTRY DATE: 2001-12-06
aacaaagccacagccttcatcatcatcagagagagaaggagagagaggaagagattgcagtgagtgagtgagtgagtgaagcagccatggcggcggcggcgagggcaacggcgcgggtcgggcttgcgctgctgctcgcggtggtgggcgtcggcgcgcaggactacgacttcttcttcctggtgctgcagtggcccgggtcgtactgcgacacgaagcagagctgctgctacccgcgctccggcaagccggcggccgacttcggcatccacggcctctggcccaaccgcgacgacggcagctacccgcagaactgcgaccctgacagcgagttcgacccctccaaggtgagcgacctgctggggagcatgcgctcggagtggccgacgctggcgtgcccgagcaacgacggcatccggttctgggcgcacgagtgggagaagcacggcacctgcgccgcggcggcgctcggcgacgagcacggctacttcgaggcggcgctccgcctccggtcgcggctgcccgtgctcgccgcgctgcgcgacggcggcgtgtcgcccgacggcggctactacacgctgtcccagatcaagggcgccatccagcgcggcgtcggcgccgagccgttcgtggagtgcaaccgcgacgagtccggcaacagccagctgtaccagctctacttctgcgtggacgccgccggcgagcgcttcgtcgactgccccgcctcccccggcggccgcccctgcggcaatcggatcgagttcccggcgttctagagctctgagctctctctctctaaccagcctcttctcctagctctacggggaagactctaccttcgaagcatgtcctttgtcactgacacgtgggttcgatgaaccatgggttcacttgttcagtgataaatgtatggtgtctttgaaggtataggatctcaattcgggaaaacgtcgacgacaaagaattgatgatgatttaatccatttcagtaatccatgttattgattacggagtaattatt

SEQ ID NO: 1826 - DNA, 1126 bp, Oryza sativa
  ref <308>: DATABASE ACCESSION NUMBER: AK059803
  ref <309>: DATABASE ENTRY DATE: 2001-12-06
ccacttccacttccacactgctctccccctccccttcctcccgctccggcgaaggcgagcgcgcggatcggcgtgatggcggcggcggcgccctctcccccacccgtcgcggcgctggagcagatgagcaggaccaaaatgttcggcggccacaacctccgcttccgccaccacagcgccacgctcggctgccccatgaccttctccgtcttcctcccgccgtcgccggcatccgacctccccgtgctgtactggctctccggcctcacgtgcaacgacgagaacttcgtcaccaaggccggcgcgcagcgcgccgccgccgcccacggcatcgccctcgtcgcccccgacacctccccacgtgggcttaatatagagggagaggcagacagttgggattttggtgttggtgctggattctatttgaatgcaacaaatgaaaagtggaaaaattggcgcatgtatgactatgttgtgaaggagcttccaaaagttttaagtgacaactttgaacagctgaacacttcacgggcatctatttttgggcactcaatgggagggcacggtgcactaacaatctacttaaagaacactgataaatacaagtcggtgtctgcattctctccggttgtcaatccaatcaactgcccttggggtcagaaagcattctcaaactatttgggcccagctaaatcagattggaaggaatatgatgcaacctgcctgatcaagaagtgcaacaaaatttcaactcctattctgattgaccagggagaggatgacaaatttctggcaaagcagcttctacctcgcaactttgaggaggcgtgcaaggctgtgggagctcctttgactctccgcatgcaacctggatacgaccactcctacttttttattgctacattcattgatgatcacattgctcaccactctcaatttctgaagagtgcctgactaccaagccacatgtaattgaagcaatggagagacaggggaggctttcaatctttctacttactatgccctagcattatttctcagcccggacaatgtcaggtgcctttgatagcctgagtcgaacagtatctccagctggatataagatgaatgatttggttttgcaggc

SEQ ID NO: 1827 - DNA, 1103 bp, Oryza sativa
  ref <308>: DATABASE ACCESSION NUMBER: AK059804
  ref <309>: DATABASE ENTRY DATE: 2001-12-06
tttgtattgtggtatctgccatactgacatccaccaggccaagaaccaccttggtgcttccaagtaccccatggtccctggccatgaggtggtcggcgaggtggtggaggtcgggccggaggtgaccaagtacagcgccggcgacgtcgtcggcgtcggcgtcatcgtcggctgctgccgcgagtgccatccgtgcaaggccaatgtggagcagtactgcaacaagaggatttggtcctacaacgacgtctacaccgacggccggccaacccagggcggcttcgcctccgccatggtcgtcgaccagaagtttgtggtgaagatcccggcggggctagcgccggagcaggcggcgccgctgctgtgcgccgggctgacggtgtacagcccactgaagcacttcgggctgatgtcgccaggtctccgcggcggcgtcctggggctcggcggcgtggggcacatgggcgtgaaggtggccaagtcgatggggcaccacgtgacggtgatcagctcgtcggcgaggaagcgcggcgaggccatggacgacctgggcgccgacgcctacctcgtcagctccgacgcggcggcgatggcggccgccggcgactcgctggactacatcatcgacaccgtgccggtgcaccacccgctggagccgtacctggcgctgctgaagctggacgggaagctgatcctgatgggggtgatcaaccagccgctgagcttcatctcgcccatggtgatgctcggccggaaggccatcaccggcagcttcatcgggagcatggccgagacggaggaggtgctcaacttctgcgtcgacaaggggctcacctcccagatcgaggtcgtcaagatggactacgtcaaccaggccctcgagcgcctcgagcgcaacgacgtccgctaccgcttcgtcgtcgacgtcgccggcagcaacatcgacgacgccgacgcgccgcccgcctgatcgccgccgtgcaccctcatggcagcatccgtatgatccgttcttgaacttgtttgtgtgagactctgacgacttgtccatgtaacgtccgtgtgcctttccggtataaattcggcctcgcaatatatggacc

SEQ ID NO: 1828 - DNA, 1152 bp, Oryza sativa
  ref <308>: DATABASE ACCESSION NUMBER: AK059805
  ref <309>: DATABASE ENTRY DATE: 2001-12-06
cagcttccactccacgaaaaccctctgcctccttcgctcgctgcaccctcgtctcggcgatccatccatggctgccaggaagttcttcgtcggcggcaactggaaatgcaatgggacaggggaggacgtgaagaagatcgtcaccgtcctcaacgaggccgaggtgccctccgaggacgtcgtcgaggtggtggtgagcccgccgttcgtgttcctgccgcaggtgaagggtttgctccggccggacttctccgtcgccgcgcagaattgctgggtgcgcaagggcggcgccttcactggcgagatcagtgccgagatgttggtgaacctgcaggtgccttgggtgattctgggacactctgagcggagagcgctgatgggcgaatcaagtgattttgttgctgacaaaattgcgtacgcactttcccaaggtatcaaggtaattgcttgcattggtgagacccttgaacagagagaagcaggaacaacgatggaagttgttgcagcgcaaactaaagctattgcagagaagatatccgattggaccaatgttgttttggcatatgaaccagtttgggccattggaaccggcaaggttgcaacccctgctcaggctcaggaggttcatgatggtctgagaaagtggcttgtgactaatgttagtcctgcagttgctgaatcaaccaggattatttacagaggctccgtaaatggagcaaactgcaaagaacttgctgctaaacctgatgttgatggattccttgttggaggagcttcattgaagcctgaatttgtggacatcatcaagtctgctaccgtcaagtcttctgcttagtgttctgggttgcaaccagatgatcgtaggagttaatgctgccaattttaagttatgacatgtttgaccagcttgctttgttatatctcgaagtcagtgaactccatatcgttccatagagcatgcagccacctgtggttgctttttttctttttgactttttctcccgagaggatcagatgaactgaaagtgccgttaatgtctgtattatcagaagtttgttgatggcttgatgctataatagttgaacctgatacttcctgagtgaagtactgtcctttgcatgtttgattggtgattacttgttttcgtagtc

SEQ ID NO: 1829 - DNA, 1146 bp, Oryza sativa
  ref <308>: DATABASE ACCESSION NUMBER: AK059806
  ref <309>: DATABASE ENTRY DATE: 2001-12-06
ctgattggttttacacgccagtttatactacttgtgacctaactccggctggactgcccttgccatttaagtcgccgagggtgatgaggagtgcgatccagtacatttcgcacaagtggcccttctggaatagaacagatggagcagaccacttctatgttgtcccgcatgattttggtgcatgttttcactatcaggaagaaaaagctattgagcgtggaattctaccgttgctgcaacgtgctacgttggtccaaacatttggacaggagaaccatgtttgcttaaaagagggttctatcactataccaccctacgctcctccacagaaaatgcaggctcacttgatcccccctgacactccacgttcaatcttcgtctacttccggggactattctatgacactggaaatgaccccgagggtggttactatgcaagaggggcgcgagcttccctatgggaaaacttcaagaacaatccattattcgacatttccacggatcaccctcccacctactatgaagacatgcagcgtgctgtcttctgtctgtgcccattgggctgggcaccatggagccctaggttggttgaggctgtggtctttggctgcattccagtcatcattgctgacgacattgtgctaccatttgccgatgcaatcccttgggaggaaattggcgtgtttgttgaggagaaggatgttccaaagttagacaccatcctcacatcgatgccaatcgacgatattttaagaaagcaaagattgcttgcaaatccatcaatgaagcaggccatgttgtttccacagccagcccaaccaagagatgcgttccaccagatcttgaatggccttgctcgcaagcttccacacccagagggagtatacttgcaacccagtgacaagcgcctcaactggactgctggacctgttggagatctgaaagcttggtagtgagcagcttccctctccttggacgatccttgtatgaaaacctcgtagggtcagtcatcagttcatacttcctgaaatgtgatgtaatcaacgtgcagtgccgggtgtaatgtacaccttggccttatctaacttaatgaatctttgtaagttagtaaattttgaaagaaatgaaaattgtatcgttggaatc

SEQ ID NO: 1830 - DNA, 1009 bp, Oryza sativa
  ref <308>: DATABASE ACCESSION NUMBER: AK104137
  ref <309>: DATABASE ENTRY DATE: 2002-08-28
acgctccaatggcggccacggctgtgaccctgccgtcctcgccggcccccttccccgtcaccaccaccgcctcctcctcccgtaacgtccgcctcctcctccgctccccgcctcctcgccgagccctccgcgtcgccgcctccgccgcggccgacgcgccacccaagccggcgccgccgccgacctcgccttcgggcatcgtcctcgtcgaccccaccgaggcacagaaggtgcaccgcctcaaggctgtatacgaccagaaggtggtccccctcatcaccgaggagttcggctacaccaatgtccaccaggtgcccaaggttgagaagattgtagtgaattgcgggttgggggctgaagccggtaactccaaggggctcgaatccgccatgaaggacctcgccatgatcaccggccagtggcccgtcaagacgaaggccaagaagtccgtcgccagtttcaagatccgcgaggggaacaccattggtattgccgttacgctccgcggcagggtaatgttcaacttcctggataggctcatcaaccttgggcttcctaggaccatggacttccttggtgtcaaccccaacagctttgatggccatggcaacttcaccataggccttcgtgatcagggcgtgttcccggagatcccgtacgaggtcggtgggaagaagaatggaatggacgtctgcatcgtcaccaccgcgaagaccgacaacgaggctctcaggctgctcaccctccttggcatgccgttcgcggagcacatcaagtcctccgtggtgatccggaagaagaggttgaagcgccaccacttcatgagcaagggcaggggaagacggtgattgcaaaccgctgcctaggcacgttgagctttgcttctcactttgtcaattgtcattgtttttgcaaagtttcgtttagaagtttgatgattttgttatcttgtcacgtgctgtatttactgtcagaagacaaaatgaaaaggctttgctttggtcaggtc

SEQ ID NO: 1831 - DNA, 1116 bp, Oryza sativa
  ref <308>: DATABASE ACCESSION NUMBER: AK059807
  ref <309>: DATABASE ENTRY DATE: 2001-12-06
acagcagcagctgcttgtacctatcctccaccaccaccagcagcgagtcatggcggccatggcgatggtgtccgtgcaactcacagtcgcggcgaggcccctgcgctcccgccgcgcgctctccgtcttcacctgcgccgcacccccgaggcagcggcctcctccaggcccaaccaagcaccgccgcctccgccacgacgccgacgcgcagcctcccaggaagcgaggtcatcctcctcctcctcccaggcgcacccgcacccggggccctcccgctcgcccccaacaatcctacactgacgacgacgaggaagaggacgaccaagacgaggaggaggggagcttcggtgggggcacccgggctgccgccatgcccaagccgccagcgggcttcgtgctggacgaccagggaaggtgcatcgccgccgcctccaagcgcatcgtcaccatcattgatgacaccaacaaccggcccttggagtgcatcatcaggagggtgttccgaagcacgctagaccacgactgcatgctcctttgcccagttgacatgcctgtgcaggtccttaagagtgccaatttcagtggctggattgctgttgatgatgaccagattaaggaaatcattccatccgttgcatatgccctcgctagagtgcatatgcactttgtagagagtggattttgttatacagcacggggtggcttttgctttcctgaagacgcgattcaagaatttcatgattctggtgacggcggtgatagtgtaccttttgaaggtgtagagatttgttgtttcaatttggatggcgcacattatatgatttatacaccagttgatcctcttctgttcgttgcagtgaaggataaagatggcgtgctacgcattgctgaagatgaactcatggacgaccctgctgttgtcggtgccatagacgaagagacagaattcacagctttggtggaggaggaagaggcccttcttgaatcggtgctgggtgaaagatgaccatgccgcggcctgtattgatggtcgatcagaggcggagactgcaatggtgggcgtccatcgatcatcattcccacccaccaattaagtagcagaagcaagctccccgc

SEQ ID NO: 1832 - DNA, 1172 bp, Oryza sativa
  ref <308>: DATABASE ACCESSION NUMBER: AK104138
  ref <309>: DATABASE ENTRY DATE: 2002-08-28
aaggcagccagccgcccggcctcccgccgcctctgctgtctcagtcccgagtcgcgagtcgcaacgccaccacgaggagccgaggaggaggaggaggaagaagaggtgttgtccgggcgtgaggaggatcggaggaagggaagctatggggatcgtggaggaggcgcacaacctgcgggtggtgggggaggggaagcgcggggtgatcgtgctggcgcacgggttcgggacggaccagtcggtgtggaagcacctggtgccgcacctggtggccgactaccgcgtggtgctcttcgacaccatgggggcggggccgaccaacccggactacttcgacttctcccgctacgccaccctcgagggctacgcgctcgacctcctcgccatcctccaggagctccgcgtcgcctcctgcatctacgtcggccactccgtctccgccgtcatcggcgccatcgcctccatctcccgccccgacctcttctccaagctcgtcctcctctccgcctcgcctcggtacctcaatgatgtcgactactatggaggatttgagcaggaggatcttgatgagctctttgaagccatggggtcaaactacaaggcctggtgttcaggctttgcgccactgtgcgtaggaggggacatggaatcagtggcagttcaggagtttagccgcacactcttcaacatacgtccagacatagccctgagtgtcgcccagacaatcttccagagtgatgtgcgaagcctcctaccacttgtcaccgtaccatgccacattgttcagagcaccaaagatcttgctgtgccggttgtggtgtctgagtacctgcacaagcacctcggtggcgactcaatcgtcgaggtaatgccgtctgagggccatctaccccaacttagctcaccggacatagtcatccctgtcttgcttcgacacatccagcatgacattgcggtctaggtggtgcaaccattccgcctagagctgttcatcagaagttgtataatttcagtatctgtactccactgaatcacccgacttaggatccatctactgttgttgtaataagattctccatatgttgtaaattgatggcggtggagaagtagtctatggtgtttgtaaaccactgcacgtatgatgttcattataatgttggatgttttaacgt

SEQ ID NO: 1833 - DNA, 995 bp, Oryza sativa
  ref <308>: DATABASE ACCESSION NUMBER: AK059808
  ref <309>: DATABASE ENTRY DATE: 2001-12-06
gtgcaaaagattctgcttcagcagcaatgaatgttcctggagaagggccttccttaaataataaaacaaactggttggcgatacagaggcagttgtcccacttggatagacagcagactagtctaatgaacatgctgcaggatttcatgggaggatctcatgacagtatggttactttagagaaccgagtgcgtggtcttgagagagttgttgaggaaatggccagggatatatcactatatccatccatcatccatctcatcatcagcaaccaattcgcaccgatcgatcgatcgatccagcaactagatcaacagtactagctaggaagcatggcccgtgcacagttggtgttggtcgccctggtggcagctctgctcctcgccgccccgcacgccgccgtggccatcacctgcggccaggtcaactccgccgtcgggccctgcctgacctacgcccgcggcggcgccgggccgtcggcggcctgctgcagcggcgtgaggagcctcaaggcggcagcaagcacgaccgcagaccggcgcaccgcctgcaactgcctcaagaacgcggcccgcggcatcaaggggctcaacgccggcaacgccgccagcatcccctccaagtgcggcgtcagcgtcccctacaccatcagcgcttccatcgactgctccagggtgagctgagccatcgatcagagacggatcatatatatacagcagcgcgccggttgccacctagtagattctgcctgggtcgatgtgtggagccgaattctgtatccagtactagtagtatcatatctgtattctggaataaaagatgagctagctaaggtctcgatcaatcaccatgcatccatggttgatcggcccggtcacgctagctagctttcttcttcttgtgtgttcgtctcgtacgttttgctccttttcgaggggtacgtgtaccagagagagctagagattctacatgcatgtactgcaactccttgtact

SEQ ID NO: 1834 - DNA, 986 bp, Oryza sativa
  ref <308>: DATABASE ACCESSION NUMBER: AK059809
  ref <309>: DATABASE ENTRY DATE: 2001-12-06
accccaattcccaaagcaaccgacacacacacacaagctacaaacatggctgcttcttcttggtgggttgtagcggcgtgcgtggtgttggcggcggcggcggcggccgacccgagggacgggttcacggcggtgagcctgggcgatggcaacttccagctgcagtggccgtacgacgtggagagcagctcgaggtacagcttcgacggcacggtgaggcggctgtgggtcttctccgacgacaagcccttcaagccgcagagcggaaccaacccaaggacggagatcaggatgacgggttatgactactcgtcaggggtgtggcaattcgagggcaccggttacgtcccctccggcaccaccggcgtgtccatcatgcaggtgttcggtggcgggaccgccaccaccctcatgctccacgtctatggcggcgacctttggtactaccaccagcaggtggtggagaccaacatctacgaccgctggttccgcctcaatgtcatccacgacgtcgccgcctcccagctcaccgtcttcattgatggccgggagaggctccgcgtcgccggcaagggtggcgactcgcactacttcaagttcggcgtgtacatgcagacgaacccgtccaaccgcatggagtctcgctggaaaggcatcagcatcctcaacaagacatagtaacctagtatcgaaattagacataaattgatgttatgaataaatctatctagattcaataatattagattgtgtcaaatctatcgggtataaagttattatattttaagatggagatagtacttggagtaaattataactggacattgtgtaaacacgcatgtctctacttgtgttcttacatgcgtggagtactatgcacatgcctatatgtatggttgtgtatgtcaattttgtttcatctatatattgagtgtacgtatatatgatatctttgcattaagaaaagtacttaattatgtgataat

SEQ ID NO: 1835 - DNA, 1029 bp, Oryza sativa
  ref <308>: DATABASE ACCESSION NUMBER: AK059810
  ref <309>: DATABASE ENTRY DATE: 2001-12-06
gtgccatcgtgtgacgacgtctcgtctcgtctccctctcccgacccgacacccgagtcttcttcccttccccaatctcgcccttcctcctcctccgatcgatccagcccccgcccctccccgcccctcgccgcgcgcgcgaaggagagagagagagagagggagagagggagggagatcgcctcgccgccgcggcgtgggatccggaggtggtgtagcgaggatgtcgtctgattcgtcgtcgtgggcgcgcgcgctcgtgcagatctcgccctacaccttctccgccatcggcatagccgtctccatcggcgtctccgtcctcggcgccgcctgggggatcttcatcacggggagcagcctcatcggggccgccatcaaggcccccaggatcacctccaagaacctcatcagtgtcatcttctgtgaggctgttgcaatttatggtgttatcgtggcaatcatcctccaaactaagcttgaaagtgtaccaactgctctagtgcatcatccagagtctctccgggctggttatgcaatctttgcgtctggtcttattgttggctttgctaatcttgtttgcggggtttgtgtgggaataattggaagcagctgtgcattgtctgatgctcagaattcatcactctttgtaaagatcttggtgattgagatcttcggcagcgccttgggtctgtttggagtgattgtgggcataatcatgtcatctcaagcaacatggcctgcaaaagcctagttctattcatatggcaatctgtaaattatttcggggagacctatcagaagaatatctggtccagttgtttttatttctttttttttgtttgtgcatttttggcaaatcacgtatattgatgcttgatgcatctgacggtagagatactgttcctactgtaaagactacataactgctgcgtatcttgtaggtgctattgcttttgcagagtgtggtctgcgtattgaataaaaccattgaactcaggaataaaatacttcaaacaacattttgctc

SEQ ID NO: 1836 - DNA, 1172 bp, Oryza sativa
  ref <308>: DATABASE ACCESSION NUMBER: AK059811
  ref <309>: DATABASE ENTRY DATE: 2001-12-06
atgctcgccgcgcgcttgctccagtggcgcttcgccaacgcccgcatggagaaggccatggcccgcgccaccgccgccgccgagaacaagctgttctacacgtggctgcgggtggcggagctccggaacatccaggcggcgaagcggatcgtggcgcagcggcggcggcagaagctgaagctggcgaggctgctccggccgcagctctcgctgctcgcgtcgtgggactccctcgccaagccgcacgccgacgccgtcgacgacctcggcgccgtcctcgccgccgcctgcaccgcgctccccttagccgacggcgcccaaggcgacatggagagcttgcacgaagccatgttcgcgtgcgtgggcacggtgaacgacatcgaagccaacgccgacatgttcttcgccacggctggggtgacgagcagcacgctggaagaactgtcgacgacgataaagcaggaggtggagggcctgcaggaagccatgaagctggcaaggattgtcactagcttgcaggtgcaggaagtgagcctccgggcaaacttgattcagattcaggcaaagcagaaggttgacatgggagcatctgtcccggcgattgcaacttctggttggtgtttctgatcatcaaagtacacggagatggagcagagtgtcaatcactcgcccacttatataaattaagatgcaaagagtactaatgctagtaccagcgtcacggactgaccggtgatctgagccgacattactgatgtttttatgtatatgttcgtgcctgaaacaagtaaattaaaacaaaaaattagacgatgaccaagaaattaaagatacatggtcccctggttggccggtcgcattactttcccaggtaaatgttcagtttgttggaagggcactaatttgttggtcttttcatgttcatgaatgttaagttgatggatggatgtaattcggtttgattaacagtgtatatatgtatcttacgtatatttaagggcgttggtgttcatgttggtgtgtagaattgaatatcacagtttgtggatagagattgagttattgaggtgtatgcaatatgcatattcagtgttcacaaactgtatatcaattattccttcaagggcttgtcctttgagttacccaagagtcaacaatgatatttgccctgt

SEQ ID NO: 1837 - DNA, 995 bp, Oryza sativa
  ref <308>: DATABASE ACCESSION NUMBER: AK059812
  ref <309>: DATABASE ENTRY DATE: 2001-12-06
aaagcatcttactcaaagtctcaaacgataaccacagggagaggagctagtaaaaatagctagctaactaccagagagagatacaatggcctcctcttccttatttctcctgggtgctcttcttgtgctggcctcatggcaggccatcgtcgcctatgatcctagcccgctccaagatttctgcgttgcagacatgaactcacctgtgcgagtgaatggatttgcttgcaagaatccaatggatgtgagctcggaagacttcttcaatgcagccaagtttgatatgccaaggaatacttttaacaagctcgggtccaacgtcaccaacctcaacgtcatggagtttccgggtctcaatacccttggcatctcactagctcgtatcgactacgcgccaatgggtgtgaacccaccacacatacatccccgtgctactgagctccttaccgtgcttgagggaacactctatgttggttttgtcacgtccaacccaaacaagctcttctctaaggtggtttgtaagggtgacgtgtttgtgttccctaaggcaatgattcacttccaaatgaacctagatcatgacaagccagcagttgcccaatcagcactcagtagccaaaaccctggagttattactattgcaagcgcggtgtttggctcacagccaccgatctccgatgatgttctgaccaaggcgtttcaggtggaaaagaagctaattgattggctccaatctcagttctgggagaacaactactgattatattcttatatatttattgtgcttttgtgtatgggagggtgatatgcaccttgcacttttcataaagtatgttacagtatgtaaaataaacgggcttttgctggccaattagtgtgtcacgatatgttgctacagtcgtttgattatccgtgtttaataactggaatgaaatggacattgttacatcctctttttcctcgttaatataaaagctaatggtcgttcatgaagt

SEQ ID NO: 1838 - DNA, 1128 bp, Oryza sativa
  ref <308>: DATABASE ACCESSION NUMBER: AK059813
  ref <309>: DATABASE ENTRY DATE: 2001-12-06
aatgcaaatgcgcaggtcattctccctcccttaactagcctgctaatctgcagccgcgacacacacaacacacacacaaacgcattgacgcatgcacgccatcatggcgaggcgatgctctggtgactactcgactgcaggccaacgagccggcgaggagggcggcggcggcggcggcgccgggctacggctgttcggggtgcagctccatgctgcggcggccagctcgccggcgtcctacttgcacaagagttacagcatggattgcctgcggctgcaggtttcttctccttcctccttgcagtcgtcgtcgtcgtcgccgtcgccgttgacgtcctcgttgttgctgtccatcgacgagggctgcgagaggccagccgccgacggctacctctccgacgggcctcacggcgcggcggcaaccatgcgggagaggaagaaaggagttccatggagcgagcaagagcacaggctgttcctggcggggctggagaagctgggcaagggcgactggcgaggcatctcccggagcttcgtcaccaccaggacgcccacccaggtcgccagccatgcccagaagttcttcctccgccacaacagcgccgccaagaagaccaacaacaagcgccgctccagcctcttcgacatggttcaggattgtgacagtggaggaagatctctcgcctcatccgatcctgccactcgctgcaacaacaacatctctgcttctctgtctctccaagtttcgcaccacaaatcaggtgacagtgcgtggccttcgtcagaaacaccatcagtttcagaagcacaacaaggtcatggatacggcactagtcaccattgctctccgctggacctggagctgggcatgtccctgtccaccacgccatccatcggaacctagcaccatcagttgccgtggtcatccatcgactggattcccaagatgcttaacaaattttatcctcagggtcaagttccaaccatcttgctgctgaatctaattgacagccatggggacagtgttgtagacaaaagtttggaatcttgtaacattgtctcatgtagccacccattgtatggtcacaagcactgtgcatatctgcaatgctaccatgcttagtattc

SEQ ID NO: 1839 - DNA, 1087 bp, Oryza sativa
  ref <308>: DATABASE ACCESSION NUMBER: AK059814
  ref <309>: DATABASE ENTRY DATE: 2001-12-06
gtgctacatttccaaaggagatacagagaatggcttcagatttcctcgccgattacatatttcttgctgtcgggagagttggttcaagtactgatttaattgtccagagggttgagtttgtccttgatgctgacaaaagaagctacctcatggaccttcttcatgcacaaagggcaaatggtacacatgggaagcaagctcttaccttggtctttgtggagacaaagaggggagctgatgccctggagaactggctttataacaatgggttcccagcaactagcattcatggagacagaacacaacaggaaagagagtatgccctgagatccttcaagagtggagcaactcccatcctcgtggcaactgatgttgctgctcgtggactggatatacctcatgttgcccacgtcattaattttgacctcccaaatgatatagacgactatgtccatcggataggaaggacagggcgtgcagggaaatctggtctggcaactgcatttttcaacgagagcaacaccccactggcaaggccgctgagtgagctcatgcaggaggctaaccaggaggttcctcaatggcttgagaggtatgctgcccgttcatcgtttggaggcggcggcgggagaaaccgcaggtcaggtggtggtgctaggtttggtggccgggacttccgacgagacagaggcagtggtggtggagggtatggtggtggaggtggaggttatggaggtggcggatatggtggtggtggcggtggaggcggctatggtggcggtagcagctacggaggtggcgggcaaggtttttctagtgcttgggactgatcctgatccagagctgtcatgagaactgaaatttgaaacaatcgtgctctattggcctccctttggtgacatggaaatttgaaatttgagttgccttttgatgatagtatggtgtggcatcgccttcatcattggcggttctctcagtctggtgttgatttttccttttttgtgtactgtactagggattgcttgtgtttttttatctgcgaattgtgaactcatcttttaatggggcctcttttattaatttctcc

SEQ ID NO: 1840 - DNA, 1163 bp, Oryza sativa
  ref <308>: DATABASE ACCESSION NUMBER: AK059815
  ref <309>: DATABASE ENTRY DATE: 2001-12-06
acacgccctctgaccccgatagaaagggaggaaaaaaaaaagagaaggcgaaaccccaaatccgccgcgatggccgccgccgccctcctccgccgctcgccggcggcgcgcgccctcctctccccggcgctctcctcccgcctcgtcgcctccaagccccactcgtcgtcccccgcgccgccgccgccgccgtcgaaggcgggggcgaacaccaagacgttctcgatctacaggtgggatcccgactcgccgtcgacgaagccccacctcaaggactacaaggtggacctctccgactgcgggccgatggtgctcgacgtgctgctcaagatcaagaacgagcaggacccgtcgctcaccttccgccgcagctgccgcgaggggatctgcgggagctgcgcgatgaacatcgacggcgacaatggcctcgcctgcctcaccaagatctcgtcggcgtcctcggcctccacgatctcgccgctcccccacatgttcgtcatcaaggacctcgtcgtcgacatgaccaacttctacaaccagtacaagagcgtggagccgtggctcaagcgcaaggacgcgccgccgcagcccgggaaggagatcccgcagaccaaggccgaccgcgccaagctcgacggcatgtacgagtgcatcctctgcgcctgctgctccacctcctgcccctcctactggtggaaccccgaggagtacctcggccccgccgcgctcctccacgccaacaggtggatacaggacagccgtgaccagttcactaaggagcgcctggattccatcaacgacgagttcaagctgtaccgctgccacaccatcaagaactgcacacacgcctgccccaagggcctcaacccagcgaagcacatcgacacaatcaagaagctccagctcgaggcctgagattcccttctgggcctccgatctgatgacttccatttccatcagatggagggagcattgtagggagtgaataatttgctaccgtattttacgttttgttctgtatctaattcggtttgttgttcaccgtccattccattatgtcgtgcggtttatgcatgaagtaattcatggattttacctttgtttttgtgatgttgaacatgcccttcatatttttaacccggaaatcaacaagcattctccgt

SEQ ID NO: 1841 - DNA, 1009 bp, Oryza sativa
  ref <308>: DATABASE ACCESSION NUMBER: AK059816
  ref <309>: DATABASE ENTRY DATE: 2001-12-06
attgcgccatcacattctcaagaagaggagaaggagagatctggagaagaagaggtaggaggccattgccacctgaccttctcctcttcctccattcatcttctctttcttgggacatggcgaccatcctggagaacatccagaaggcgaggttcttgccgacaaggccgctcaaggacgagctgccgacgttccagggcggcggcggcggcggtggcggtgggggtggaaaggagagccacctgatggggctgaggaagaggctgtcctccttctccgacaagatccagcccatctcctccgcgtcggcggagtgggcgttccggcggtccaagtcggcgccgtcgctgggcgcgttcgccggcggcccgctgaagcggtggtgggactggggcgtcggctggctcatgtccaagaagcccgggttcgccaccgacctcgagatgaacgaggaggaggtggccgccctcggccgcggcagcaggggcagctggggccacatcctctacaagatgcgctccggcgtccggcggctcgtcacctcgcactcgctgcccaccacgcacagggcggcggcggcggcgtcggcgtcggcccagtgcaagccggcggccacgttcaactacacccagagcttccacagcgggcaaaccgccatggcgtactgagagcttctcacatgttcctccagtgagaaacatgaccttttcttggtcgccgtctccatgggatccaaatgaagaagaagctcagggagattgatataatatatggtgatgaagatgcaactacgattacatgtaaaattacacggtaaatttgatgaatgatgaaaaaaaaaattgtagctcactacgtgatctgttttttgtgtagatctagtgtcctgtagaggccgaatgtatgttcgttctttcaattctttttggagttcgttgggcgatgtaaatgtctccggtcaaattccttatgcttttgcctcctgcagtaaataaaaagctaatgaaat

SEQ ID NO: 1842 - DNA, 997 bp, Oryza sativa
  ref <308>: DATABASE ACCESSION NUMBER: AK059817
  ref <309>: DATABASE ENTRY DATE: 2001-12-06
tgaacactacgtgcaaagcaagcagctgtccaccgacgaacgagtgacagaacgagcgtagaatcgatggcgcatcgtcgtcgttgtctcctcctcttgctcgccgtgctgctgccggcgatggcggcaaggggcgatcccgacgcggtgcaggacttctgcgtgccggacgccgggcgtgggcggccggtggagctcgccatgctcccggcctacccgtgcaggagccccgccaacctgacggcgggcgacttcgccttctccggcgtgcgcgccgcggggaacttctcgccggagacggggttcgccggcgtgtccgtcaccccggcgcagttcccgggcctgcacaccctggggatgtccttcgcccgcgccgacctctcggcggccggcggcgtcaacccgccgcactaccacccgcgcgccaccgagacggcgctcgtcctcgccggccgcgtgtacgccgggttcgtcgactccggcggccgcctcttcgccaaggtgctcgagcagggggaggtgatggtgttcccgcgcgccatggtgcacttccagctcaacgtcggcgacacgccggccacggtctacggcgccttcaacagcgagaaccccggcatcgtccgcatcccggcgacggtgttcgggtccggcatcagggaggccgtcctcgagagggcgttcgggctcactccggcggagctccggcggctggagaagaggttcggcccgcccaagaaggcggagatggaggattagctagccgcttgtgcttgaccggccatggccgtcggtcgtgggcatgattaggttactccccgttagtgataattaatgggttatttcttttcatttcatttggttaatacagtactgtatcatttgtggcggtggttgggaaatggtgattatagcctggtaatgatttgaggtgtaaggttggtagagatgtataaggaggcacagatgaatggaacaatcgagagggtaactcaacttc

SEQ ID NO: 1843 - DNA, 1212 bp, Oryza sativa
  ref <308>: DATABASE ACCESSION NUMBER: AK104139
  ref <309>: DATABASE ENTRY DATE: 2002-08-28
acgagctagcgagcgcgagcatcgaggcgccattcataattccatctccagatactgatcaagcagatcagagctcgagttatcatagctatttgatcaaatgggaggtgtccacggtgtttgctatggcatgaacggcgacaacctcccgtcgcagagcgaggtcgtgcagctgtacaagtccaatggcatcggtgctatgcgcatctacagcccggatcagaaggccctcgacgcgctccgcggcagcggcatcgccgtcatcatcgacgtcggcggcatcggcgcggtggccaacctcgccaacaacccctccgccgccgccgactgggtgcgtgacaacgtccaggcctactggccgaacgtcatcatccggtacatcgccgtcggcaacgagctcggccccggcgacatggggaccatcctcccggccatgcagaacgtgtacgacgcgctcgtgtccgccggcctctcgaacagcatcaaggtgtcgacggcggtgaggatggacgcgatcaccgactcgttccctccgtcgcacggcgtgttccgcccggacctgcagcagttcatggtgcccatcgcgcagttcctcgccaacaccatgtcgccgctgctcgccaacgtgtacccctactttgcctacagggacaacccgcgcgacatcccgctcaactacgccacgttccagccgggcaccacggtgagggacaacgacagcggcctcacctacaccaacctcttcagcgccatggtggacgccgtgtacgccgcgctggagaaggccggcgagcccggcgtccgcgtcgtcgtgtcggagagcgggtggccgtcggcgggagggttcgcggcgaacgtggagaacgcgaggaatcacaaccagggcgtgatcgacaacgtcaagaacgggacgccgaagcggcccgggcagctggagacgtacgtgttcgccatgttcaacgagaaccagaagcccggggatgagaccgagaggcattttgggctcttctaccctgacaagacgccggtctacccgattacgtttcctccgaactagcggctgaccatgccagtgcaaataaggatttccagagacgaataatccatgattaaataatgttggttgaacgttaatgcatgtactctgtatggccctttttttttgtgacaatgctacatgaataaaaaattccaattttattttattttttt

SEQ ID NO: 1844 - DNA, 1070 bp, Oryza sativa
  ref <308>: DATABASE ACCESSION NUMBER: AK059818
  ref <309>: DATABASE ENTRY DATE: 2001-12-06
gcactctgcagtccgcacccgcgcgaggcttccgctccgctcccctccgatccgtggcctcctcatcgcccctattaaacgggaacccagcccggcgtccccttctcggcttcctcctccaccatccatccatccgcgcgcggtgcgtagtagcgagaagagaagggggggagggcaaagcgatggctccgatgaagctgtacgggtcgacgctgtcgtggaacgtgacgaggtgcgtggcggtgctggaggaggccggcgccgagtacgagatcgtgccgctcgatttctccaaaggcgagcacaaggcccccgaccacctcgccaggaacccctttggtcaggtgccggctttgcaagatggtgacttgttcctctgggaatcacgtgcaatttgcaagtatgtatgccgcaagaacaaaccagagctgttgaaggatggcgacctcaaggagtcagcaatggtggatgtgtggcttgaagtggagtccaaccagtacactcctgcactgaaccccattctttttcagtgcctaatccgtccgatgatgtttggggcaccccccgacgagaaagttgttgaggagaaccttgagaagctgaagaaggtgttggaggtgtacgaggcgcgcctgacgaagtgcaagtacctggctggagactacatcagtgtcgcggacctaagccatgtggctggcactgtatgcttgggggctactccccacgcatccgtgttggacgcatacccgcatgtgaaggcctggtggactgacctgatggcaaggccgtcttcccagaaggtggcttcactgatgaagcctcctgcttaaggtagttgttctaggcacaggtttgtcgtccatggtccacagaataagctgaggtgtgcccagttggttgctcgtttaaggatttgtgttattatgtgtgtcctggatgttgaatgttcaagcaatcaggattgtgttgttatgctgcatatgatccaacctaagtcttgtactgctatgagcattcttgtgctctggccttcgctcttgagaaccttataataaattctgcttttagtc

SEQ ID NO: 1845 - DNA, 1003 bp, Oryza sativa
  ref <308>: DATABASE ACCESSION NUMBER: AK059819
  ref <309>: DATABASE ENTRY DATE: 2001-12-06
ctcatggagagttcgatcctggctcaggatgaacgctggcggcatgcttaacacatgcaagtcgaacgggaagtggtgtttccagtggcgaacgggtgagtaacgcgtaagaacctgcccttgggaggggaacaacaactggaaacggttgctaataccccgtaggctgaggagcaaaaggagaaatccgcccaaggaggggctcgcgtctgattagctatcgatcgatctcacctgcagcagcaaacgagcaccacacaccagcagcagcagcaaagtcgatcgatcgtcagcacacacgaccaagatcgagatggcccgtgcacagctggtgttggtcgccctcgtggcagctctgctcctggcgggcccacacaccaccatggccgccatcagctgcggccaggtcaactccgccgtgtcgccctgcctcagctacgcccgcggcggctccggcccgtcggcggcctgctgcagcggcgtcaggagcctcaactccgccgccaccaccaccgccgaccgccgcaccgcctgcaactgcctcaagaacgtggccggcagcatcagcggcctcaacgccggcaatgccgccagcatcccctccaagtgcggcgtcagcatcccctacaccatcagcccctccatcgactgctccagcgtgaactaatccgatcgatcgctaccggaggatgacatgcagcgccggccgagatgcagctgtcgtctcacgctttgtatcttgtgttatctgtgtttatgctgaataaaatgagagctagctagctaggtcgatccatcgccatgcatacatggttgatcgcccggccggtcactacgctatctgtttccttaatttattcgtcgatcgactatacgtacctgagagctagagatcagtttttgtaccatatgcatatgtacttctgcatgtacatggagtactacttgtactacgtgcgtgtacgttgtggattatacatagatatatagctctttttcgtat

SEQ ID NO: 1846 - DNA, 906 bp, Oryza sativa
  ref <308>: DATABASE ACCESSION NUMBER: AK104140
  ref <309>: DATABASE ENTRY DATE: 2002-08-28
atcacctctactagctagctatagctctagttctactctaattgcgcagtcgatcgaacgtacactgccaatcaaatcaactgcgagcttgcaatggagagaggagcgagctttgcagtggtgatggcggccatggcggtggttctggccaccacatcgacggcgcaggcccagaccacggcgaccgacatcgtcaacatccacaacgccgcccggagcgccgtcggcgtcccggcgctgtcgtgggacgacaacctggcggcgtacgcgcagggctacgcgaaccagcgcgccggcgactgcgcgctgcggcactccgatcgcaacaactatcagtacggcgagaacctgtcgtggaacccctccgtgcaggcgtggacggcggcgagctccgtcgaccagtgggtggcggagaagggctcctacgactacgccagcaacagctgcgtcggcggcgccatgtgcggccactacacgcaggtcgtgtggcgcgacaccaccgccgtcggatgcgccgccgtcgcctgcaacgccaaccgaggcgtcttcttcatctgcacctacttccccgccggcaacgtccaaaaccagaggccgtactagctaccgtatacgtatacgtatacgtacgtacgtaacgtatatgctatggaatatattttgctactactctagtatatattgtacgtataaatctttctgctctcagtagatatatatgcgcatatatgtacgaactactatgtatgttcgtatgtatatatgtacgcacatcgatctgcatgcgtatgcatgatcagtgtgttggatgcaataagtacgtcatgatgcagacgtattgagtatctacaaatacagatatatatgtatccggtgtgtatttttattacaaattactccctccgt

SEQ ID NO: 1847 - DNA, 993 bp, Oryza sativa
  ref <308>: DATABASE ACCESSION NUMBER: AK059820
  ref <309>: DATABASE ENTRY DATE: 2001-12-06
agtatacacgcctttctttccctcctctgctcatcccctccccagatctccagccccaggagctccggagggttcccaatggcggtgaaggtctatgtcgtgtactactctatgtatggacatgttgctaaactagctgaagagatcaagaagggtgcttcatctattgaaggtgttgaggctaaaatatggcaggttcctgaaactctccatgaggaagtacttggaaagatgggcgcgcctcctaagccagatgtgccaacgatcacaccacaagaacttactgaggctgatggaatcctgtttgggttccctacaaggtttggcatgatggctgcgcagatgaaagcattctttgatgcaaccggtggcctgtggagtgagcagagccttgcaggcaagcccgccggcatcttcttcagcactggtacccagggcggtggtcaggagactacaccgttgacagcaataactcagttgactcaccacggcatggtgttcgtcccggtcgggtacaccttcggtgccaagatgtttaacatgggagaagttcaggggggcagcccgtacggcgccggcacctttgccgccgacggctcgaggtggccgacggaaatggagctggagcacgccttccaccaggggaagtacttcgcaggcatcgcgaagaagctcaaggggtccgcttgagatctccattgggcaaattcaattgggcgtgtgcgtgtccctacgcacaacatcgtgaggcatttcatacagctccaaaccataccgacatacagtcaatagcttggtctcttcttttgtggtgtttctcgatgctatgtggcttctccctggaacttctcattgccgtacgcatgatatgattctgttctacgctttggtcagctggttgtaatttggagtaagttctgttattgtattattggttcccccatgatatatattgattattgtacggggagatctcttggttgccattccgtc

SEQ ID NO: 1848 - DNA, 1271 bp, Oryza sativa
  ref <308>: DATABASE ACCESSION NUMBER: AK059821
  ref <309>: DATABASE ENTRY DATE: 2001-12-06
acacagcccccggcccgttgtcctttctccacctcggtggtcatcagctagacagctatcgcgcgccgtcccaccaccatcttgctccactacgcggaccaccgcgcgcgagcagagcatctcctcactctctagcttgctccagtttcgcgtagctgcgtgacagttcaattgaactctctggattcgttggttacttcgtctgagctgctgcagcgttgaggaggaggaggagcaatggcgctcacgacgttctccatttcgagaggaggcttcgtcggcgcgctgccgcaggaggggcatttcgctccggcggcggcggagctcagtctccacaagctccagagcaggccacacaaggctaggcggaggtcgtcgtcgagcatctcggcgtcgctgtccacggagagggaggcggcggagtaccactcgcagcggccaccgacgccgctgctggacacggtcaactaccccatccacatgaagaacctgtccctcaaggagctccagcagctcgccgacgagctccgctccgacgtcatcttccacgtctccaagaccgggggacatctcgggtccagcctcggcgtcgtcgagctcaccgtcgcgctccactacgtgttcaacacgcctcaggacaagatcctctgggacgtcggccaccagtcgtaccctcacaagattctgaccgggcggcgcgacaagatgccgacgatgcgtcagaccaacggcttgtcgggattcaccaagcggtcggagagcgagtacgactccttcggcaccggccacagctccaccaccatctccgccgccctcgggatggcggtggggagggatctcaagggagggaagaacaacgtggtggcggtgatcggcgacggcgccatgacggccgggcaggcgtacgaggcgatgaataacgcggggtatctcgactccgatatgatcgtgattctcaacgacaacaagcaggtgtcgctgccgacggcgacgctcgacgggccggcgccgccggtgggcgcgctcagcagcgccctcagcaagctgcagtccagccgcccactcagggagctcagggaggtggcaaaggtaaggcctcacaagcgttcaacgctcacgctcgattgcccactgcccagaaaggcacgtgaatgaaaaagaaaagggaagacaaaaaaacaaaaaatagtgtcgccggataagcgtataactactacgaaatgcgccaaatttttaacgggttttagaatgaaaccgtctagtttttacct

SEQ ID NO: 1849 - DNA, 1262 bp, Oryza sativa
  ref <308>: DATABASE ACCESSION NUMBER: AK059822
  ref <309>: DATABASE ENTRY DATE: 2001-12-06
gtgcgtggactcatcgagaggagcaaagcaaagcgagcagctgagccccgacgaggtagggggagagatgagggcggtggtgatcgcgcgcgccggcgggccggaggtgctggaggagcgggacgtcggggagggcctcccgccgccgggggaaggcgaggtgctcgtcggggtgtccgccgccggcgtcaaccgcgccgacaccgtccagcgccagggccggtaccccgcgccgcccggcgcgtccccttacccgggcctcgagtgctccggcaccatcctcgccctcggccctaacgtcccctcccgctgggccgtcggtgaccaggtgtgcgcgctgctcagcagcggcgggtatgcggagaaggtggtggtgccggcggggcagctgctcccggtgccggagggggtgtctctgacggacgccgccggcttgcccgaggtggcctgcaccgtctggtcgaccgtcttcgtgaccagccacctctcccccagcgaatcgttcctcatccatggtggatcgagtggaattggtacatttgctatacagattgcaaagcaccttggaattaaggtttttgttactgcaggtagtgaggaaaaactagctgcctgcaaaggtttgggtgccgatgtatgcataaactacaaaactgaagatttcgttgcacgtgtcaaagaagaaacaaatggaaagggtgttgatgtcattctggacaacatcggtggattgtatcttcagcgtaacctgaacagcttagctgttgatggtagacttttcatcattggtttccaaggaggcgctgtaactgaagtgaacctgcaacccatgcttgctcgacgattgaccatacaagctgctggactacgcaacagaagccttgataataaagctctgattgtcagtgaggtggagaaaaatgtatggcctgccgttgtgcaaggcaaggtgaaaccagtaatatacaagacgtttcctctgtcagaagctgctgaagctcacaagttgatggaagaaagttcccacattggcaagatactattgattccatgaatgtattggtatcttgtttgtgctctcactatcggagccactttaaacactgtatatttggtttgtcctttgatcttgcatgttgacaagagtggacgtactatgtcagaaaattatgtgtcacaatacatgaagaaagttatgtactcatgctctctcaaccaacggatcatttggatataaatgcgattgcttggtttggagtccc

SEQ ID NO: 1850 - DNA, 1102 bp, Oryza sativa
  ref <308>: DATABASE ACCESSION NUMBER: AK104141
  ref <309>: DATABASE ENTRY DATE: 2002-08-28
aagcgccgccattcatcgctgctgcgtggtcgtcgtcgtcgccgccgccgtcgtccgccattacagccgactgatccctcctgctcggctccttcctgtaggactgaggagcaagcgaatccggtgagcaagtgcgtcgagaaccaagaggagagatgggggacaccgagaggagctctatactggtccacatcttggtcatcgccctctgcctcaccgcattcggcttcgccatcgccgcggagcgccgccgcagcacgggctcaattgttacagacagcttcaattccacattttgtgtttatgactctgatattgctactggctatggtgttggtgcattcctgtttctcctctctggtcagtcacttcttatggtagttaccaaatgcatgtgttttggcaagccacttgcacctggaggaagtagagcttggtcaatcatatactttgcatcttcatgggtcacattcatgatcgcggagtcgtgcctgatagctggagcaacaaagaacgcgtaccacaccaggtataggcatatggtatacgtggggagctggacttgcgagtccctgcgcaaaggagtttttatcgcgggagcggtcttcgtggtgttcactatgattctgaacgtgtacttctacatgtactacacgaaatcgacaagccaggctgccaaaaagatcaacaagactacccccaatgtcggtatgactggctacgcatgacaattggatttcggtgcatcctgggcagaagattagtttttggataacttggctacggtgtcattgtactatcagatgcttccgaagaagcatgtggtgcagggttgtgcaggttttggcctgtcagagctaattctagtcagtttatggctgggtgcctgggccaagccctatattgctaggatgggagtgattcgtttttgttttgtgctggttagggttaagcacatcatgttctgtttgtaactggtgaagctgccgcctagagcagcttggcaggctagcaatttggtgtgtgttgtagtctgttgtaagtcgattgcctgtattttatttgtgtgcgctagagaagagatgaatctgctggtttcagt

SEQ ID NO: 1851 - DNA, 1022 bp, Oryza sativa
  ref <308>: DATABASE ACCESSION NUMBER: AK059823
  ref <309>: DATABASE ENTRY DATE: 2001-12-06
aagatgatagtgatgaagaggacaataggaaaagacgacgaaggagcagtggcacacttgaagagcggaaaaggaggcggctgcgtgaaaaggaggaagacttagcagacaaattaagagctcccccactctcgtttagggtttccctccgccgccgtcgcctcccgcatccacgcgcctcctcctcctccgccgccgccgccgccaccgcagcatcagccatggccgaagtggagctcccgcagcaggaggtcaagctcttcagccgctggtccttcgaggacgtccaggtgaacgacatctcgctggcggactacctggcggtgaacccgacgaagcacgcgacgtacctgccgcacacggcggggaggtactcggcgaagaggttccggaaggcgcagtgccccatcgtggagcgcctgaccaactcgctcatgatgcacggccgcaacaacgggaagaagatcatggccgtgcgcatcgtcaagcacgccatggagatcatccacctcctcaccgacgccaaccccattcaggtcatcgtcgacgccatcatcaacagtggccctcgtgaggatgcgacccgtattgggtctgcgggtgctgtgaggaggcaggctgtggatatctctcccttgaggagggtcaaccaggcaatctacctcctcaccactggtgccagggagagcgccttcaggaacatcaagaccattgctgagtgccttgctgacgagcttattaatgccgccaagggctcatccaacagctatgccatcaagaagaaggatgagatcgagcgtgttgccaaggccaaccgttgagtggtgatcccatgtcattgtgctaaagctcttgcgctgtttggcaggactatactttttgctagtaatttaagccttttcagacctacctgtggtttaatgtttgaatgaacatcactagtgctgagaaaaatatgtagtgctctattctatctatctatcgacatggttttatattgaacccgcaattcccgttccttc

SEQ ID NO: 1852 - DNA, 1000 bp, Oryza sativa
  ref <308>: DATABASE ACCESSION NUMBER: AK059824
  ref <309>: DATABASE ENTRY DATE: 2001-12-06
ctccatttctctctccatcgaatctcatcccagcagcagcagcagcagcagcagccgccatggattccaaggcggacgcggagtcagccacggccagggccgccgccgcccgtcgtgtcgccgcccgtctccgccaacccctacgtggtctccgccccctccgctcagccgcccgccaagagcgccagggagaatctccgggagaagctcgacgtggtcgggaggaggttcggggacgccgcgcgcaagaccgagggcatcgtcggcgacatctggcagcatctgaaaactgggccaagcattgctgatacggcgatggggaggattgctcagatatccaaggtgatagctgaaggtggatatgacaaggtgttccaccagacgttcgagtgcctgcctgatgagaagctcaagaaggcgtacgcatgctacctttcgacctctcatggcccgatcatgggcgtcttgtacatctccactgccaagattgcattttgcagtgacagtcctgtggcgtatgtcaccgaggataataagaaccaatcttccatctacaaggtagttgtacccgttgctcagctaagatcagtcactcctacggcaagccagcagaacccagcagagaggtacatccaggtggtttctgtcgacaaccatgacttctggttcatgggcttcgtcaactacgacggtgccgtgaagagcctccaggaggccgttcgtggcggcaaggcttcacttcaccatcacatgtattttttgtgaacatcgccgttacatgtattgatctgtccgtcgttcgtcatgcatcactgggaattcgcatgtgtcggtgtgttaaattgtctgtacagatcgctccccttgctgtgtatattggctgaaatttgtgttgcatatgcattcatgtattgtatgtagtgtgtggactagatgtgtacaaatactggattgattgttggcttgatgctccattaaagcctttctgttcgttgttccc

SEQ ID NO: 1853 - DNA, 1361 bp, Oryza sativa
  ref <308>: DATABASE ACCESSION NUMBER: AK104142
  ref <309>: DATABASE ENTRY DATE: 2002-08-28
ctctcgctccccttctctcttagcttgctagctgatgtacttgccgcgatccagcgacctcgcgcttcgtctcccatggcaacgacgcagttgctgtccaccgtcgagcaccgggagacgctcccggagggctatgctcggcctgagtccgaccggccgcggctcgccgaagttgccacggacagcaacatcccgctcatcgacctcgcctcgccggacaagccgcgggtcatcgccgagattgctcaggcctgtcgcacctacggcttcttccaggtcaccaaccacgggatagcagaggagctactggagaaggtgatggccgtggcgttggagttcttcaggctgccgccggaggagaaggagaagctgtattccgatgagccatccaagaaaatcagactctctacgagctttaacgtccgcaaggagacagtacacaactggagagattatctccgccttcactgccacccgctggaggaattcgtacccgagtggccctctaatccggcacagttcaaggagattatgagcacgtactgccgagaagtccggcaactggggctccggcttctcggcgccatctctgtcagcctcggcctcgaggaggactacatcgagaaggtgctcggcgagcaggagcagcacatggctgtgaactactacccgcggtgtccggagccggacctgacctacggccttcccaagcacacggaccccaacgccctcaccatcctcctccccgatccccatgtcgccggcctccaggtcctcagggacggcgaccagtggatcgtcgtcaacccacgccccaacgctctcgtcgtcaacctaggcgaccagatacaggctctgagcaatgacgcgtacaagagcgtgtggcaccgtgcggtggttaacgcggtgcaagagcgcatgtcggtggcatctttcatgtgtccgtgcaacagcgcggtgatcagcccggcgaggaagctcgtcgcggacggggacgcgcccgtgtaccggagcttcacctacgacgagtactacaagaagttctggagcaggaacctggaccaggagcactgcctagagctcttcaaaggccagtagtaacgactaatgaactcgatcgtgtgcagaaacttcagacttgcgcttcactacccaagttaaaattgcttgccgctcgttgctgcagtgcagatatcctcgtcgtttgacggttgtgtgtggttgtctggtgcacttaatttatcggttcagtacttaattatgtcgggcaatgctttacttattttatcgatgttatgtatcacataatgctttggttattcctaaaacttccaataaaattggtatgcctaattaccctc

SEQ ID NO: 1854 - DNA, 1076 bp, Oryza sativa
  ref <308>: DATABASE ACCESSION NUMBER: AK059825
  ref <309>: DATABASE ENTRY DATE: 2001-12-06
tacgcagctcaaggacgcggcacgtttagcttaggacagtcaaacagcagcaatggtgacggcggcgaggctactccccctaatcctcttcctcactgcggtggccgtgggctgcagcgcgtgggagatgaacatccggttgccgacggagagactggcctacggcggcggcgaggctgtggtggcgccgatcatacacgcgctacggccgctgctgggctccggccggcagctggcggcgcgcgccggcgtggcctgcgacagctggaggctgggcgtggaggcgcacaacgtgatcgactggaggacggtgccagccgagtgcgagggctacatcggccactacatgctaggcgaacactaccgccgcgacttcgccgtcgtcgtcgacgaggccgtcgcctacgccgagaccctcaagctcgccggcaatggcaaggagatctgggtgttcgacatcgacgagacctctctctccaacctcccctactacgccaagcacggcttcggagcaacgccatacaacgcgacaagctttcgtgagtacgtggcagaggggagcgcaccggcgctgccagagacgaggtgactgtactaccggctgcttgagctcggcgtcaagccggtgttcctaacaggccgcaccgaagaccaaaggaccatcaccgtcacgaacctccaccgacagggattctccgggtgggagaaactgctgctcaagccagcggtgcacgccaccggtgagctccaagggtccgccgttgaatacaagtccggcgagcggcagaagctgcaggacgctggcttcatcatcgtcgggaacatcggtgaccagtggagtgacatcctcggcgcgccggagggcgcccgcaccttcaagctgcctgaccccttatactacattggataggttgccgcgctcgcgccggcggccattgctagttctaataagcttgcgcgccataaatctagtcacgttcacttcatgatgttgcttgtgatgaactgcttctaataatcgccatctactagctgttggtagatgatatttctaataaaacgtgtgttggagtatc

SEQ ID NO: 1855 - DNA, 1040 bp, Oryza sativa
  ref <308>: DATABASE ACCESSION NUMBER: AK059826
  ref <309>: DATABASE ENTRY DATE: 2001-12-06
gtcgctaagtcaatccgaaatcattctttttatttgacgctgtagttcagtcatactgctggtttccatctttgccctcctcctcgccctgattcctcaaatccggccgccgccgccgccgcgagggatgccggcctcgcctgcgcgatatccgctgaggccagcgccgtgctggccgtcatgcgccgcagcctccgccacccgcgcgccgtagccgacgacgccgcggcggaccacccgctcgtctcctccctcaaggcgctgcgccgcctcgtcttctcccccgccgccgtgctgcggcccttcctctacgcggtccgctccgaggacgccggcgccgcggtcacctcggcgtcgctggccgctctccacgaggtgatggcgctcatgggtccgtccctcacgagcgccgcgctgcgtgaatgggcctgtcgccagctgccggttcgaggccggggctgatgccgccgccgaggaggccgtgctgatgcggatgctgcagtcgctgctcgcctgcctgcgcgcacccgccgccaccgccctcgggaaccagcacgtctgcactgccgtcaacacgtgcatccgtgtcgtccaccacgccggcgccaagggcgagctcctgcagcgattctcgcggcacgccatgcacgagctcatccgatgtgtctttgcccgcaaccggcgaggaggagaacatacgctcctggtgccctgacgattttttctcttctttttccaggaacatgttcttgatttctgattgcagttcattttgggttacctggataactgcaactgcaattcagtgctatgaagtcacaataatcccaacctcccttcagaacagagcaagtcctgagactgaaaatgtgttcaacgatgccttttgggagagcctggatgctgttgtcaatgcgttggacaatgttggacaatggaatctggaactcttggtgctaaatgtaacacacagatggtgatacctcacctaacacagaacttttggtagaaatttgagatgtgagcatgcctatttgagc

SEQ ID NO: 1856 - DNA, 1096 bp, Oryza sativa
  ref <308>: DATABASE ACCESSION NUMBER: AK104143
  ref <309>: DATABASE ENTRY DATE: 2002-08-28
agccaagccagccgcccaaaccagcaaccaaagaaacagctagagagagaaagaaaccccggattacggattcctccctcccccaaaggccaaagcctcccaccgccgagccgccgccgccgccggctttcttgtttctagcttcctttgatgatgaacgctctcggtttatcggtggcggccaccagcaccggctcccccttccacgacgtctgctgctatggcgctgggattgcagggaacatcttcgctcttgtgctcttcatctccccgctgccgacgttcaagaggatcgtccggaacggatcgacggagcagttctcggcgatgccgtacatttactcgctactcaactgcctcatctgtctctggtacggcctccccttcgtctcctacggcgtcgtcctcgtcgccaccgtcaactccatcggcgccctcttccagctcgcctacaccgccaccttcatcgcattcgccgacgccaagaacagggtgaaggtgtccagcctgctggttatggtgttcggcgtgttcgctctaattgtgtatgttagtctggcgttgtttgatcaccaaacacggcaattgttcgtcggttacctcagcgttgcgtccctcatattcatgtttgcgtcccccttgtccatcattaatctggtgatcaggacgaagagcgtggagtacatgcccttctatttgtcactctctatgttcttgatgagcgtatcgttcttcgcatatggagttctactgcatgatttcttcatatatattccaaatgggattggaaccgttttgggtgtcattcaattggtgctctatggctacttcagaaaaggatcaagagaggacagcctcccattgctagtcacacatacatgagcacaccaaggaacaaggtcctgcaagcaatttgcctgcctttgtttcttggaaaatcatcggttctcttatcagttatcacatattggattttgtgttggtggtggtgtttactgttcttttgtaaaattgttttgtggtttgaaatgtacaaatagattttggtataccatattgaaagtagttttccagctctgttgctagctgccacatc

SEQ ID NO: 1857 - DNA, 1010 bp, Oryza sativa
  ref <308>: DATABASE ACCESSION NUMBER: AK059827
  ref <309>: DATABASE ENTRY DATE: 2001-12-06
aaaaaccctacttccgcctccgcctccgtctccgcggattcttcgagctcccggccatggctgaacccgaggtggtggttgccgcaggtggggaggcgatggaagccgaggcggcggagccggctgcggcgaatccgagtcagaagagggagagggaggagggggatgactccgccgccggcgctgctggcgaggaggcggcggagggagctgcggccaagaagcagaaggtggagggggagggggaggcgaagggagcggaggatgaggcgaagggggaggaagaggagggcgcgaaggaagaggaggcgaagccggtgaagctgggacccaaggagttcgccacgggcgtcgagatgttcgactacttcttcgccctgctccactcgtgggcgccgcagctcgagatcaacaagtatgagcatatggtgttggaagacctgctgaagaaaggccatgctgagtccgataggaaaattggagcaggaattgaagcatttgagatccgcaaccacccggtgtttcagagccgctgtttcttcgttcgacgagttgatggatcctctgatgatttcagcttccgtaagtgcgttgacagcatacttcctctcccggaggacatgaagattggcaataagtccaatggcaagaagggtggtggccacttcaagggcggtggaggtaggggaggaggacgaggtggtggccgaggtggcgggcgtggtttccgcggtcggggtaggagaggcaactaaaggactcaataaaaccccgaaattttttgcatgcctaataccaatccttaagattgaggcattcatggcaacatgtgcttgtttgtctgccttctcctagagggactgatgctccactcacttgtgtactgtgaaagtgcaactatgataagatctcgccgatctgtcttcccatatcttcaccgcattctgtttgagcgatttgtctacttgtcttcacatggcatattttgttttgtttggttttgacatctc

SEQ ID NO: 1858 - DNA, 1047 bp, Oryza sativa
  ref <308>: DATABASE ACCESSION NUMBER: AK059828
  ref <309>: DATABASE ENTRY DATE: 2001-12-06
agggtatcccggcttcgtggggaaatctttacaactgcggcaaccacctccaacttcaccaccagcgcagagagaggagcgctggggcaagcagcagagcaactgaaaggaaagaagaaatggggggcctcccccttctacttgtgctgagagatgacagagggaggaagacagaagagggaaggaaggagagaagagggtggctgccggcgactggagcggtcggagtcaccgacgtgaccccagtgagagcccggtaggacccgagcagcctgctgaccgctgaagccggctggcgccgcagcaccgcctcgtgagtgctggcctccgccccagcgcgagccagactccgccgcactggccaccaccagccgcgccagcccacgtcgccgccgccggtgctagatccagcaacgccggcgccggatctaccgctgcctagccaagagggcggccagctgacgcacaccccccagcaggccgccgcgccaccccagacgccgacccaccgcatggacctccacgccgcctcgcgccgcagcggcgaagcctcgcaagcgctggccaccactggccattgcacgggccgccaccaccacgccgcctcccgctgcagcggcctccgctggccacaccgcccttgcgtcgtgcttcccgacgccgccatcgtagatctagcggcggcggggctggatctgccgccgccctgctagcttgaagaccccgctgccatcggcgactgccgcatccctcgcacagagaagatgcgccaccgcgggaaggccccgccgtcaccatcctagctcgccagccggctttgccggcggcaagctccggccgcggcgaggaagggtggagggggataggaagggtgctgtggctgtagggtttcaccccccgtgtcgcctgcacgggggcgacgcggggggtctcccagagcgtttgttgcagcaaaaattagctgtatgcgtgtgatcaatatggagttttttcggatgattgttctggcctgatattttcctaataataaccatgattgatgcgatc

SEQ ID NO: 1859 - DNA, 1092 bp, Oryza sativa
  ref <308>: DATABASE ACCESSION NUMBER: AK059829
  ref <309>: DATABASE ENTRY DATE: 2001-12-06
gtgaaacttctttcttccccgcagaccgcaacgaccgaaaacgccgctacgctaccacgggcgcgctcccctcctcttcgccgtcgccgcctccgccgccgcgggctcgcatcgccgcccgtccccagtagcacggtttttgttctgctcttcactggtgtggttgctactctttgctcaacaatatggtttccttcgagatgaatgacctcaagaagattgggctaggcttgacaggctttggagtattcttctcattcctgggaatcattttcttctttgacaaggggcttattgcaatgggcaatattctcttcctgtcaggtttgggtttgacaattggtctgaaatcaaccatgcaattcttcaccaagcctaagaattacaagggtaccatctcatttggtgctggctttttcctggttctcattgggtggcccttcttcggcatgcttttagaggcatatggctttgttgtactcttcagtggattctggccaactcttgtggttttcttgcaaaggattcctattattggttggatatttcaacaaccatttgtcacatcgttccttgaccgctacagaggaaaacgggttccagtgtagcacagctatgtttcttatgatgtagcaactgaaggttttggggggttacaacagcaagtggttctcccaatgtgtaatcctttttctctaaatgtttacttgctggtaggtttgttcttttgtaaattacaaccctggacctccactgaatcgtttggccaaagacatgcaaattctacaatgaaatggattggatcattggagaaacttctgaagcaagccccgcatgttgggacaaggtagcagtagaggatcgctattgaaaactaaaatagattttacataccctttatcgttttgtaacagtgcctggcagtcgcagatatagatattccagccttgtcggcttatgcttgagcgtattgtcgcaacttatgcgcacttgatagcttggaagaagtaaatttgatgcaattatcccaacttatgttcatttgatagcttgaagaaagtaaatttgctgcaattgaaattaattgttcgt

SEQ ID NO: 1860 - DNA, 1013 bp, Oryza sativa
  ref <308>: DATABASE ACCESSION NUMBER: AK059830
  ref <309>: DATABASE ENTRY DATE: 2001-12-06
atgcctgcatggtatgtcctctcctcttgggctcttgagtgctactagtatctttatccaagcaagaacaacacaattgtgcacaaagcaagaaactcaagtagctacctcctctcctaatctatatacgctcatcagcttatgtgcaactccagataccgacctagcagcttgctatctagagtatatatcaactcaactcaaggaggagaagaagaagaagaagaagaagtgagccatgaaggatggagtagcaggaggaggaggcgagaggccatgcatgtgctacttccacccgcgggaggaggtggtgggcgtgtgctcgcaatgcctccgggagcgcctcctcctcctcctcgcctccaagacctcgcctgccgctgcccacctcctcgccgaccgaccgctccaccgcaagaacagcagcatctctctccccaaggtgttcgcgctcggctcctccttcctccagcgcctcgactcctctcgccaccaccttcgccccgccccccacgactccgacgccaactccgacgccgacaccgcctccatcgctagcctcgatgattccttcatctccatcaagttcgaggacaacggcaaggctacgtgggacagccagaaggccgccgccggcgagaaaaagacagatacgacgaccacggcggtggtggagcacgtgaagcggggcggcgtaacccggtggcggaagcaggtggtggggcggctgctgcagctggcgcggtggaagaggtccggcaacggcaaggcggcggcgtgccaccagctggggatcgacggcaagaagacggcggagcggtcgtcgtccaaggggacgacggtgagggggagggggagggggaggagctggatccggaccctcaccatcaccaggcgcccacccgccatgcctctcagctaggagtagcttcttacctccctcactctcttcacgtactcttaatctcgtcggattgctctgaatatagtaatactcttcatttgtttactgt

SEQ ID NO: 1861 - DNA, 856 bp, Oryza sativa
  ref <308>: DATABASE ACCESSION NUMBER: AK059831
  ref <309>: DATABASE ENTRY DATE: 2001-12-06
gtgtgtgccaaacacgacgatggatcgatcgatggctcggcgccggcgcggcacctcgttcacggcgagctggcagctgggactcgccgtggtggtcgcggcgatcatggcgtcctcggcgcagccgcagcagcagcagcagcagcctccgcagccgcccggtcagccggcgaacgcgccgagctgcccgccggtgcaggcctcgctgtcgccgtgcgtcagctacttcatcggcaactcgtcgacgccgtcggacgcgtgctgcgagcagatgcgggccatgttccagtcgcaggcgccctgcctctgcgccgccgtggcgtcggcgccgtccccgctcgcgccggtgctcggcggggtgcagtcgctgctcccaaccgcctgcaacctgcctcccaatgcctgcgcagatgcgacagggtcgacgtcgggctctgctccggccggcggctcgtcggcgacgccgtccacgggggcaactgccgccgcgccggccatggagcccgctggcatggacccggcgatgactgcaggtggtggatccaagtcagtgccgggtatgccgtactcggcggccgccggagtccatggtggtggcgcctctgctgccgtcgccgtcttgatctcctccatgcttgcttatgcttgtatgatctgagatgcatggctggtcttatatacacacgtccattgtgatttgtgatcgtgatggtatatgcacatcagcacatgtgcatcgttattagcttgcttttcaggttagaagactttgagttaatatgccatttgcggatgtaattaatttgtaacaacattgttatggagtatttcgacataataagatagtagttatatc

SEQ ID NO: 1862 - DNA, 1115 bp, Oryza sativa
  ref <308>: DATABASE ACCESSION NUMBER: AK059832
  ref <309>: DATABASE ENTRY DATE: 2001-12-06
cattccctccgacatgtcgcagcccgccccctcgtagaagagacggcacaatttacacttcgccccctccaaatcttctcctcctcctcctcctcctcctcgccgtcgccgccgcgagcgggcgcgctagggtttcgggccgctactccgatcgcctcccgttcgacctcgatcgccagaaacttcgctcatttactacacttgccgcaattacaatcacacttatctttgcctggaaactgttgagagctcctcaagagcaacctcggaggccacgtagacgcgttgctccatcacctagcaacaccagcagtagatcacggccaggtgctttgacctcaacggatgcttgttcatcttcagcagattcaagagcacaggaagcaatcaaccagcttttccagccagtaaacctgactcttgagcagcttgttaggcataaactgagcgaaggacgaagggttacatgccggttacttggtgtgattttggaggaaacaactccagaggagctccagaaccatgtcacagtgagaccttctgtcctggaggttcttctagaaattgcaaaattctgtgatgtctatctgatggagcgcattcttgacgatgaaagcggagaaaaggtgttatctgccctgagtgaagctggactttttacgaacagtggattgataaaggacaaggttctcttctgtagtacagaaaatggccgcacctcttttgtgcggcaactggaacctgattggcacattgatactagtccagaaattgttcatcagctagctaggtttatcaaatatcaactacatatttctccacaacgagcagaaagagtagcatccaatgttttcagctctacaagcttggaacaattctttggaggccttgatcagagatgataatatgaggtgagctccagcaaacaatggcatagcgagaactgagacgaacatcattgttcattttttttccttgaatgatggaactcgtttttcttgtaccatgtgtaaaagtcgtgtcatgttaaactggttctgcaactccccataagctatggaaagagatagcatctgtagcataatccatgtatcaattgtgttcctgtataaccg

SEQ ID NO: 1863 - DNA, 997 bp, Oryza sativa
  ref <308>: DATABASE ACCESSION NUMBER: AK104144
  ref <309>: DATABASE ENTRY DATE: 2002-08-28
aaaacaacctcaattctatctccactgatccacaaagaaatcaagaagcgaacaaaaaaagcaaggcactgcatttccctgccactgctgagcagtgagcacaaatcacagacacaaatggaagcagcagtggctactccttccttgctcttctctagcccaacacccaggaggccttcctcctgcttgtcactgccgcctccttgcagcagcagctacgcctccaatggggcgaagctgcagcagccgcggctgcagttcgtcagtcagctaaccagcagaaacagcaacgggagtggcagaagaagcatttccattttgtcgctgaggtgctcttccagtggcactgacagcgcgtcttcttccgccacttcagaaagatgggttcttgagcctgcaggagacggcgattggcgtcatatcgggtaccgcgtcgcacgacccggcggcttccagatagcatccgaggcggcggtgacggtgggtcgtgttcctgaacaggctgacatcgtcctgtctgtcgcaacagtttctgggacgcacgcacggctggagaagaaagaggggagcctgttggtaacagacctggagagcacgaatggcacctacatcaacgagaggcgcctcagcccgggtttccccactcccatcgaccccggtagcctcctcatttttggcgacatccacctggccatgttccgtgtttccaagatggtcgtggatgtgcccagtgacgccagtggagctgagcaggaagcagctgagacggctcaagtatcagctgcagcccaacagaccaattaattagcgacctccatgtgctgcttgatgcatcaagacagctcaagaagaactagcttatcagtgctcccaaaggccgacatgaagtgcatatgttacgatcgacagtctcccttgcaaataagcgcatacatatgttgtgtgataggaatgtcacagagcaacaactctggatattaattaatagagggagcgc

SEQ ID NO: 1864 - DNA, 946 bp, Oryza sativa
  ref <308>: DATABASE ACCESSION NUMBER: AK059833
  ref <309>: DATABASE ENTRY DATE: 2001-12-06
atcgcatcacttgagctgccaggtgccagcgtcactcagctgagctatggcttctctccgcctccgccacctctctccctccggcgccactgcaccaccctcctccttcgcccaactccgccgcccttcctcctgcctcgccggaccacgacctctccgctctcgtctcacccgggtgtatgcgctgtccagcaacgacatcagggtgggctccaacctcgaggtcgacggagctccctggaaggttattgaatttctccatgtcaagcctggaaaaggtgctgcttttgtaaggacaaaaatgcgtaattatatcactggcaacacagttgacaaaacctttcgagctggaagtacgatcccagaggcatccatttcaaaggaaactaagcaatttacctacaaggatggagcccagtttgtgttcatggatctgactacctttgaagaaagtcgcttaaatgagtcagatgttggcgacaggcagaaatggttgaaagaaggaatggactgcaatttgttatactggaatggacggatcattgattttgatctccccatcaccgttaggctgactgtaactgatactgacccagggcaaggtgacagtgcacaaggaggaacaaaaccagcaaccgtggaaacaggagctgttgtcacagtgccctcgtttgtgaacgtaggcgatgatatcctgattgattcaagaactggccagtatatgaacagagcatagaagagatgagagactagacatcaacagagcattagtttttgtctccgcatttttggcccattccctcacctcacccaggcttgactgtattgtttacagcatttgaaccctcgacaggatcaaaatgctttctcaaatttttgtactgcatatgtgcgtacatatttcaccagagcagatgattaatgagacaaacacattgtaagatcc

SEQ ID NO: 1865 - DNA, 1134 bp, Oryza sativa
  ref <308>: DATABASE ACCESSION NUMBER: AK059834
  ref <309>: DATABASE ENTRY DATE: 2001-12-06
aagatgaaaaggactttgaaaagagagtcaaagagtgcttgaaattgccgggagagagagagaaaaaaaaaaaaactctccgcagccaaatcgagatctctttcccgtcctccaagccggcgactccctccccgtccggcggcggcgtcggcgtcggcgtcggcggcgaagagatcgatcgatggcgtcggcgttgtcctccctgcgctacggcgacagcctctcggtggtggcgatctcgggcgccacggccgtgctctgcgaggccatctcctggctcctcatctaccgcaccgccacctacaactccctccgcgccaccatcgagcgccactcccgcaagctcgacgccatgaaggccggcgcctccaactcctcgtcctcctcctccgccggcgccggcgcctccgggtcctcccagcccgcgggctcctcctcgtcgcgggccaagaagatggaccgcgtcgagaccagcctcaaggacgccgcgcgggagctgtcgctctccaagctcaagtccggcgccgtcgtggccgccgtgctcttcgtcgtcttcggcctgctcaactccctcttcgagggccgcgccgtcgccaagctgcccttcgccccggtgccgctcgtccagcgcatgagccaccgtggcgtccccgggaacgaccccaccgactgctccatggtcttcctctacttcctctgctccatcagcatccgcaccaacctgcagaagctgctcggcttcgcgccgccccgcgccgcggccgccgccggcgggggcctcttccccatgcccgatccgaaagtaaattgagctttcatgcacacccccatgaccgtgacggtgttgatttcggcatggacttccgtctccgagaagagtgattacgatggaaacggggagaaatgccatgagattctgtactcatacgcctgtttacaaattcgtttcccataacttgctagccaggtattcgcacacatgacctgcaaactgatggaagctagactttttatttttattattccatagagcaagcagtgaagtgaacttgaccacgtgaagccaggttgctgcgtgtcaatgaaaccgtgcagccagctatcgaactcttctagccttttgtctcttgtgtc

SEQ ID NO: 1866 - DNA, 1382 bp, Oryza sativa
  ref <308>: DATABASE ACCESSION NUMBER: AK104145
  ref <309>: DATABASE ENTRY DATE: 2002-08-28
agatagcaagagagtccacggctgaaatagcgaaatgccctccacaaccacggcgccggagaccgatcctagcaagaccgtcgtcgaggaggtcaccggctggctccgcctctactccgacggcacagtcgagcggctgacaccaccggacgcggagcccttcaccgtcatcgtcccgccctacaccgagccgcgcaatggcgtcaccgtgcacgacgtcaccacggccaggggtgtagacgtccgcctctacctcccggccgagccgccggcagccgcgccccggccacggcggcgtcgtcctctcctccttcacctccatggtggtgggttctgtctatcgcgtccatcgtgggcgctctaccacaacttctacgccccgcttgctgccaagctcgatgtcgccggcatcgtctccgtcttcctcccactcgcgccggagtaccgcctccctgccgccattgacgctggccatgccgcgcttctctggctgcgggacgtcgcttgcggcgatgaaggaaaccttgatccggcggtggaacgcctacgtgacgaggccgacttctcgcgcgtgttcctcatcggcgacagctccggcggcaacctcgtgcacctcgtcgcggcacacgcggcggcgaaggatgacggcgcgggggctgatctccacgcggtgaggctcgccggcggggtacttctcaatccgggcttcgctcgtgaggagaagagccggtcggagctcgagaacccgccgagcttgttcctgacggaggacatggtggacaagctcctggcgctcggtgtaccattggggatgaacaaggacagcccgtacacgtcgccgtcgctggtggcggaggccgtggcgcgcttgcatatgccgccgatgttgctggtggtggcggagaaggacttgctccatgacccccaggtggagtacggcgaggccatggcgcgcgtcgggaagacggtggagacggtggtgagccggggcgcggtggcgcacgtcttctatctcaacttcttcgccgtggagtccgatcccctcacggcggagcggacaagggagctcatcgacaccatcaagacatttatcgacagatactgattctccctaaatcctaatagcaatttgcaatgaagatcatgcatgcatgtcctgtgagataattggcatgtgcagagtgcagctatcttttagccatgcactggtccatctccatccgtgcatggatgtatgttgtgttcagtttctgcatgtttgttacacctagtttgatcggtttggtgaatgttttctagttgggttcaaacttccctgttaaatttcctgcgtgaataaaatagagcatactcagtatgcatgagcatattggcatccaatt

SEQ ID NO: 1867 - DNA, 1395 bp, Oryza sativa
  ref <308>: DATABASE ACCESSION NUMBER: AK059835
  ref <309>: DATABASE ENTRY DATE: 2001-12-06
aagaggaaaggcttgcggtggatacctaggtacccagagacgaggaagggcgtagcaagcgacgaaatgcttcggggagttgaaaataagcatagatccggagattcccaaataggtcaaccttttgaactgcctgctgaatccatgagcaggcaagagacaacctggcgaactgaaacatcttagtagccagaggaaaagaaagcaaaagcgattcccgtagtagcggcgagcgaaatgggagcagcctaaaccgtgaaaacggggttgtgggagagcaatacaagcgttgtgctgctaggcgaagcggttgagtgccgcaccctagatggctaaagtccagtagccgaaagcatcactagcttacgctctgacccgagtagcatggggcacgtggaatcccgtgtgaatcagcaaggaccaccttgcaaggctaaatactcctgggtgaccgatagcgaagtagtaccgtgagggaaaggtgaaaagaacccccagtgggtagtgaaatagaacgtgaaaccgtgctgagctcccaagcagtgggaggggaaagtgatctctgaccgcgtgcctgttgaagaatgagccggcgactcataggcagtggcttggttaagggaacgctcgagacctagggcttcctccttcccctccgagcaccgccgccgccgccgccaccgccaccgcagcctgaccgctcggtctccggcaaccagacaaaatggtgagagttagtgtcctcaacgatgctctgaaaacaatgtacaatgctgagaagcgtgggaagcggcaagtgatgatccgaccctcatcaaaggttatcatcaagtttctcatcgtgatgcagaagcacggctacattggtgaatttgagtttgttgatgaccaccgctctggcaaaattgttgttgagctgaacggacgcctcaacaagtgtggtgtcatcagccctcgcttcgatgttggtgtcaaggaaatcgaatcatggactgcgaggctgcttccctccagacagtttgggtacattgtccttactacttcagctggcattatggaccatgaggaggctcgcagaaagaacgttggtgggaaggtcctcggtttcttctactagaaagatatatcttgttgacactctacggggatttcttatacagtagatggattctcccagtaggtgttagtggaagagcattttattagcagttgagtcaaaaaccttgttaagatgatcctcgaatgtctgaattgccccttaatgtcatatgttgtctgtttaattttgcttggcgacttgagtaagctgctgtattcttgctccttggaggccgcatgctttttttgttaactttttataagttattactgaaaattcctggaagatattctatc

SEQ ID NO: 1868 - DNA, 1229 bp, Oryza sativa
  ref <308>: DATABASE ACCESSION NUMBER: AK059836
  ref <309>: DATABASE ENTRY DATE: 2001-12-06
attttgctcctcttcgctgcgacgcgctgcctccctactgctgccgccgacgaatcccagcggcgccgcgacgccgccggtgcgccgccgcagttagcatggcagcgatgaacaatgatctgggaggactgggaggcagacctgctacttcacaagctaatccttttgaaagtgctttatatggagctggacctggactcatccgaagtgggttaggagcatacggcgagaagtttttaggttcaagctctgagtttatgcaaagcaatatcactcagtatctgtccaatcctcagtactactttcaagtcaacagtcagtatgtgagaaacaagttgaaggtgatcttgttccctttcctgcaccgggggcactggacaaggataactgaaccggtgggaggaaggttgtcatacaaacctccaattcaagatatcaatgctccagatctttacattcctctgatggcttttgggacgtatgttgtaattgctggatatgctttgggtgttcttgggaggtttaccccagaggcactcactctacagttcacaaaaggattacttggctggtttctgcaagtaatcctgatcagagttctactgtacacgctgggaagtggtgaagcgccattgctggacattgtggcctatgctgggtatggatttgctggtacatcacttgcaatgcttgtccgcgtcttctggagcccgtcatattattttgtactgccatggttctcaatctgcaccggagttttccttgtcaagacgatgaagagggttcttctgggcgcaccaaggagctatgagagacaccccagccggaatcactactttcttcttttcctcgcggttgtgcaatttcccatgctcttctggctaggcaacatcagcgggtgatatttcagccttattttagaactacataactcgatttattcggtattactggaataggtttgagatttaggcatatatgtcgttcatattcttgtggaagtggtaaattgctggacaagaagttgcataccaaatgtctgtccttcgcccttgtctgtccggcattaactgaagaccaatggatacacgaatgttcttatcgtacatcatcgctattttgccttctgtatctcatttttgttacttagtcaccgcgatcgccttcaagctgtcttacgacctgagacatgtctgtataaaatcagatgataatgttccttgtcgtgc

SEQ ID NO: 1869 - DNA, 1070 bp, Oryza sativa
  ref <308>: DATABASE ACCESSION NUMBER: AK059837
  ref <309>: DATABASE ENTRY DATE: 2001-12-06
aaaaaaaaaccgtaacatacacagctctctcgccgtctggtctcttctcgctcgcgcgactgaaaggagcgcctcgactcgcatctcgccgccgcgcagctaagctagggttttccgccaccgccgatctcgcccccgcccccggccagccatggacgcctctctcatgggcgccccctccgccgcagcgggagacaatcccacctccggggagcaccggatggggaccaccatcgtcggcgtctgctacgacggcggcgtcgtcctcgccgccgattccagaaccagcaccggaatgtatgtggcaaaccgtgcgtcggacaagattactcagctaactgacaatgtgtacatctgccgctctggatctgctgctgatacacaagtaatttccgattatgtacgctattttctccaccaacacacaattcagcttgggcagccagctaccgtgaaagttgcagccaacttaattaggttgttggcttatcagaacaagaacatgttgcaagctggcatgattgttggtggatgggataaatatgagggaggccaaattttctcagtcccccttggtggaacaattctgaggcaaccatttgcaatcggaggttcaggctctagttacctctatggattgcttgaccacgaatggaaggagggcatgtcccaggaagaagctgagaagtttgtggttaaggtagtttcccttgctatagcccgtgatggtgctagtggaggggttgttcgtaccgtcactataaacgcagatggtgtttcgaggaaatttcaccctggagacaaactacaactgtggcatgaagagctggagccccagaactcgttgctggacatacttgcagctgggaaccctgatccgatggtccaatgaatctgccctccagccatacacctcccttaagcaactttcttctgtatctgactttcactagatttactgaagaactggactgcagaattatgttcagctgtgcgcaattatctagtgcaagatgcttcttgtgctgtatgtaatttcttttcgttaaggaagttcaaaaatatcattt

SEQ ID NO: 1870 - DNA, 1180 bp, Oryza sativa
  ref <308>: DATABASE ACCESSION NUMBER: AK059838
  ref <309>: DATABASE ENTRY DATE: 2001-12-06
tcctctctcttcttccaacacctcctaatcaccacaaaggcttaaaaatctccagtctccatagagagaaagagagagaagagaaggcagcttgatttggggcgaggagacgcgatagccgcgataggctaagcagctggcagcggcggctgctgcgatggccggcgccgacgtggacgtcgggacggagctccggctggggctgcccggaggtggcggcggcgccgccgaggcggcggccaaggccgcgaagaggggcttcgaggagaccattgacctgaagctgaagctgcccaccgccggcatggaggaggccgccgccggcaaggcggaggcgccggccgccgagaaggccaagaggccggcggaggccgccgccgccgacgccgagaagccacctgctcccaaggcgcaggcagtgggttggccaccagttcggtcgttccgcaggaacatcatgaccgtccagtcagtgaagagcaagaaggaagaggaagctgacaagcagcagcagcagcccgctgccaatgccagcggcagcaacagctctgccttcgtgaaggtcagcatggacggggcaccctacctgcgcaaggtggacctgaagatgtacaacagctacaaggacctctcccttgctctgcagaagatgttcggcaccttcaccgcaactgggaacaatatgaatgaggtgaatggctctgatgctgttacaacttatgaagacaaggatggtgactggatgcttgttggagatgtcccgtggcagatgtttgtcgagtcatgcaaacgcttgaggatcatgaagggttccgaagccattggtcttgcaccaagagcaaaggacaagtacaagaacaagagctgaaaatgttgcagtattaagatgctgagcatggtgccataagaatggtgttcttgcagtgtgttatggtttccttagaaatataaggttttacttgtttagctggattaaaagaaggaagagttgtcatgtttaatttgtttatggaccagaagcaataatctatttgtgtgtagctggattggtgttatgtgatgtcccctaccgtgtgtcccaagatctacttgatgattttattccaatgttgttaatttaagtttgtgtgattgtgaagtaaagggtatcaatgagactattattattatggtatctggt

SEQ ID NO: 1871 - DNA, 1097 bp, Oryza sativa
  ref <308>: DATABASE ACCESSION NUMBER: AK059839
  ref <309>: DATABASE ENTRY DATE: 2001-12-06
atcatccatccatctccctgcagctacgtactgtacttgttagcaatcaatcccatcaaatcatccaccgctcgctgctgctgctacgtactatacagcttgattaattaggttttacgacgacggcaacggggacagatatgacggccgccctgcaagcgctgctcgacccgacggcgctgtccttgggcctgcccacgccggcgatcaacaaggaggagtacctcgccatctgcctcgccgcgctcgcctgcacgcgggcggggaaggccctggtgggagtgggaggccagcagcaggtgcaggcctgcaataagtggctgtgcccagcgcccgcggcgcctgaggagctccgcttccggtgcaccgtctgcgggaaggccttcgcctcgtaccaggcgctcggcggacacaagtccagccaccggaagccgccttccccgggagaccactacggcgccgccgccgcggcgcagcagctggcatccgctggtgactcgaaggaggactcggcgtcgtcagcggccgggagcactggcccgcaccggtgcaccatctgcaggaggagcttcgcgacggggcaggcgctcggcggccacaagcgctgccactactgggacggcacgtcggtgtccgtctccgtctcggcgtccgcgtcggccgcctcgtcggccgtcaggaacttcgacctcaacctgatgccgctgccggagagcacagccgccgccgggatcaagaggtgggcggaggaggaggaggtgcagagtccactgccggtcaagaagctcaggatgtccaactaattcatcatacgccatcttgtaaaaacaagagatctgcccattgatcgactctattgaacagagtctattctttgattttttttttcttttcaactcactaattgtttggtttctgtcatcgagtatgcaacaagctaagctggtgaccatggatcttccaagattgattgtcgccaagggacatatatggttctaggagtgttgattcatttgattctttgtatatttgttcaatctaaaaattaatgtactcaatctgctcaatatatatagacgctatattattacgactcc

SEQ ID NO: 1872 - DNA, 1264 bp, Oryza sativa
  ref <308>: DATABASE ACCESSION NUMBER: AK059840
  ref <309>: DATABASE ENTRY DATE: 2001-12-06
aagaccgatagagtctgcactaccgagtatttctaggcctattatgtccttggatgggaatgaggatgctattgttggagcccttaaacaaagcttgaggcaactagaatctctaggagcacagagagcaggtcttgaagacatgcttaaagaaatgaagagaaaggatgacatactccctaaattgatggccggtgttggatcacacgatgatctttttaagaaggagatttcaaagtatgatcctgtctgtgctgagatagctgataacattgtggcgcaagaacaactgctgctacaaatacaggcacaaaatgaacagtttgctgcggtgttcaacctagaggattacaaagttgctcgtgagagatgttacaagcaaattgctgcggctgttgctaaataccgagatattaagaagaacattaatgaaggcctcaatttttatgtgacattacaggaagcaattggcaaaataaagcagcagtgcagtgacttcataatgacccgaaacattcaatgccgtgaaatgatcgaagatgtgcagaagaagctagcaggtttcagcttctcatcttcttccagccaagcaagcatgcagaggaatacttctgtgccaccagatcagaacagtccatcaccaccaccaccgtcgtcgcatgctccccatgctcagggcccatatggtgttccacccggaggcgattcaagacccgggtactctcagcccgagcaaagacctgcttactcacagccatacccgccctatggcgcgccaccgcaacagcctccatatggtgcgccgtcgcaacagccaccttatggcgcgccccaccctggtcactaccaacagccaccacaccagcaacctcccaaccatgactatggccaacaagcatatcctggaggatggcgcgggcagtactacaatccacatcagccacagccgcagccacagccgccatatcctcagccaccgtacaatgcccagggttcttaccctcctcaccagagcagctactacaggcctcaatgagagatggttttgggatgtggcagaacatgtttgtgtgcctctttttatttttcttcagactgcgcatatgtgaattacgttttatggtgtactgcttacaaagtgaggtggtgtaatatcgattggtgtcaggttggttagacaatagcctgtatcatttggtccgtattaataatgttgaatatgatatatacaggccacgcgcctgcaatccccattaatatgtgc

SEQ ID NO: 1873 - DNA, 1038 bp, Oryza sativa
  ref <308>: DATABASE ACCESSION NUMBER: AK059841
  ref <309>: DATABASE ENTRY DATE: 2001-12-06
aagctaagctaaaccttatcatcgtcaggtcaggcacttcaccaaccctctgcctcccttccgccgccctccgccgccgcatgcaagccatcctcgccgctgccatggccgcccagaccctcttgttctccgccaccgcccctcccgcctcccttttccagtccccttcctctgcccgccctttccactcgctccgcctcgccgccggccccgcgggcgccgccgctgccagggcgctcgtcgtcgccgacgccaccaagaaggccgtcgccgtgctcaagggcacctcccaggttgagggagtcgtcaccctcacccaggatgaccaaggtcctacaacagtgaatgtccgtgtgacgggacttactcctggacttcacggcttccacctccacgagtttggcgatactacgaatgggtgcatatcaacaggaccacattttaacccaaacaatttgacgcacggtgcaccagaagatgaagtccgtcatgcgggtgacctgggaaacattgttgccaatgctgaaggtgtagctgaggcaaccattgttgataagcagattcctctgagtggcccaaattctgttgttgggagagcattcgttgttcatgagcttgaagatgatttggggaagggtggccatgagcttagtctcagtactggaaatgctggtgggcgacttgcatgcggtgttgttgggctgaccccgttgtaggtcgctgcaagttgcagctgaagtgtcagtatcgcatccatgtcaccctttttgtcatcttcgagcctgaggcagtcgttcttgtatcacatggatttcgcaacatggatgcttaatagtatctgttgatcgttcgtctcacagtaataaaatttagttgagcaaataagtgtcgtcacatcccctgttctccaccctgtcaaactataaattgtgaaacatgagctgttctgggtatacaacgcataaaaaaaaccatgtgttatacataacagccttgttgctggctgtactttcgtgcttctgatctaatctttgtgct

SEQ ID NO: 1874 - DNA, 866 bp, Oryza sativa
  ref <308>: DATABASE ACCESSION NUMBER: AK059842
  ref <309>: DATABASE ENTRY DATE: 2001-12-06
attatcagatcaaagtgatcgaccgacctcatcatcagctaataatttacaagcttgcttgcaacgtgcatcgtcgtcgtcgtcgtcgtcgtcgtgatgtcgtacgggtgccaggtcagcgacgacgagccgaacggatcgaaggcggtgagcctcctcctccggctgtcgacgctggcgctggcgctcacctcggcggtggtcatggcgacggcgagcgagtgcaccgtcgtccagctcaacggcgtcgtcgccaccatcacctacaaggacttcccgccgttcgtctacctcgtcggcttcaacatcgccgccgccatgctggaggcggcggcgatctacctgcggctgagcaccggcggcggcgacgacgacgacgaggggttcaagggcaagctccccgggatcctcctcgtggtgatcgacgtcgccgtgcaggcgctcgtctacacggccaccggcggcgcgttcgccgccgtgtcggcgtacggcccgcagatcaacgcctgcggcgccggcgccggccgcttctgcggccaggtgcaccagtcgaagctcctctcgttcgccggcagcgccgccgtcggcctcgccgtcgtcttcagggacgtctcgctgccgttctccctgtggcccacctcgtcagactgatgacgtcagagttgcacaagccgtcagtaaatcagtagaatgaagtactagtgtactagtactcgtctgtctaataatataagacattttaggtgaacttgacatatagacatcgtccgtctagattttttgtattatgatgtgtcatatttaactaaaatgttttatattatgaaatggagggagtataatgtaatttttcttaattttctggg

SEQ ID NO: 1875 - DNA, 1005 bp, Oryza sativa
  ref <308>: DATABASE ACCESSION NUMBER: AK059843
  ref <309>: DATABASE ENTRY DATE: 2001-12-06
gttcatcccccacactgccccacacatccatcgccggattcgcctccgcctctcccttcctctcgtcggcggcagcaagcggcggcggcggcggagctccggattcgaggggaccaagcatcgcctgcagaggaatccgcctgaaggattggacttcgattccgggaggatccccgcccggatccgaattttggccgaccgggatccccgtctcctccgccgagatggggagcacctcgtcgatgctgacgcagtacgacatcgaggaggtccaggaccactgcgaccacgccttctcgcagcaggagatcgtgtcgctgtaccaccggttctgccagctcgaccggaatgggggcggattcgtctccgccgaggaattcatgaccgtccccgagttcgccgtgaaccctctctctcagaggcttctgaggatgctcgatgggctgaactttaaggagttcgtggcgttcttatcggcgtttagtccccgcgcaagcctgcagcaaaaaattgaatttattttcagggtttatgacactgactgcaatgggaaggtggcatttgatgatatcttgagcatcttgcgggatctgtctggttcttttatgactgagcagcagaggcagaaagttttgatccatgttttagaagaagctggctatacaaaagattcaaattttactctgccagactttatgaagattcttgacaattctgatgtgaagatggaggttgaagttcctattgactaagtacttgtgtcattgttctgtgccccggcatgtatgtcagcttgagaagatggattaattagaccctactagtactttttttatcatgtattaagctgtaattagtgaaacatctgtatttgatcattttcaggcttaattaacttttaccacccgtgcatcctatgacctttcaggtactgttaccctgtaaggtccccttcattttttcctaacatcttttcatattgaaaacgtctgtgatattatggct

SEQ ID NO: 1876 - DNA, 864 bp, Oryza sativa
  ref <308>: DATABASE ACCESSION NUMBER: AK059844
  ref <309>: DATABASE ENTRY DATE: 2001-12-06
gcgactcgttaggctactccacccactcttgtttagggtttccctcagccgccgccgccgcatccacgctcagcagccatggcggtggtcgagcagccgcagcagcaggtggtgaagctcttcaactgctggtccttcgaagacgttcaggtgaacgacatatccctcgccgactacctcgcggtgtcctcgacgaagcacgccacctacctgccgcacacggctggccgctactcggcgaagcgcttccgcaaggcgcagtgccccctcgtggagcgcctcaccaactccctcatgatgcacggccgcaacaacggcaagaagatcatggctgtccgcatcgtcaagcacgccatggagatcatccacctcctcaccgacgccaaccccatccaggtcatcgtagatgccatcatcaacagcggcccgcgtgaggacgcaacccgtatcggctctgctggcgctgtgaggaggcaggctgtggatatctctcccttgaggagggtcaaccaggcaatctacctcctcaccactggcgccagggagagtgcctttaggaacatcaagaccattgctgagtgccttgctgatgagctcatcaatgccgccaagggctcatccaacagctatgccatcaagaagaaggatgagattgagcgtgttgccaaggcgaaccgttgagtgctgaacccatctcagtgtgctcgagctattgccttgcactgttgccagtactttttgctagtctttttgggctttgccagagttacctgtgattttctgtttaatgataagtgctgagaaaatgtagtagtctgttcgctatcgacattgttttattacacccccaatccttgttcctgc

SEQ ID NO: 1877 - DNA, 946 bp, Oryza sativa
  ref <308>: DATABASE ACCESSION NUMBER: AK059845
  ref <309>: DATABASE ENTRY DATE: 2001-12-06
acacccaaacccgacgaacagccgcagctgcaggccacgcatcctcgccgtgaatctcccaccgcgctccggcgatggcattcgcggtctccaccgcctgcaggccgtccctgctcctgcccccgcgccagcgctcgtcgccgccgcggccgcggccgctcctctgcacgccctccaccgccgccttccgccgcggcgccctcagcgcgacaacaacgccaacgccggcgcgcgcagcactgccgtcgacgacggggaggaacaggatcgtctgcggcaaggtgagcaagggcagcgcggcgcccaacttcacgctgagggaccaggacgggagggcggtgtcgctgtccaagttcaaggggaggccggtggtggtgtacttctatcccgccgacgagacccccggatgcaccaagcaggcctgcgccttccgcgactcctacgagaagttcaagaaggccggcgccgaggtcatcggcatcagcggcgacgacgccgcctcccacaaggagttcaagaagaagtacaagctgccgttcacgctgctgagcgacgaggggaacaaggtgaggaaggagtggggtgtgccggctgacctgttcgggacgctgccgggaaggcagacgtacgtgctcgacaagaacggcgtcgtccagtacatctacaacaaccagttccagcccgagaagcacattggcgagaccctcaagatcctccagagcctctgattctcttcttcttcttcctccttttttaactacaatctctcatgtatgatccatcacagtataccgagaaattaatccatctgttaatctcttctcgatcgtttttctccctcggcatgtgtatagctagtgtatctgtaactctgtgagtatatatacagtcaaaatcggtgggctgctagctctgaattttgccgtaaggcactctgattttctct

SEQ ID NO: 1878 - DNA, 1041 bp, Oryza sativa
  ref <308>: DATABASE ACCESSION NUMBER: AK059846
  ref <309>: DATABASE ENTRY DATE: 2001-12-06
catgctcgacctccgcgaatccgcaattgaatctcgtcgcgcaccacaacgtcgacaatggcttcgaaatgcctcggcgagctgatgctccgttcgtcttccacagcccgcatgccatatgcgcacatgggcaagcagacatggccatggatatgtcaccgcggcttctcccacaccccaactcgaccggcacaaccgacaaggaacgacggcaatgaccaaagctacgcatctgagggagaatcaaataggccaataatccgctacatctccgataaagtggctccagaggcgcaatcaccgcaacaagctcagccacagcccactcaagacgaaaccacgcgaacaatcgactctctcttcagcggcatgcccaccaaccggactccaccaccatacatgcagcaaaacgctgcgccaggatcaaagaataaccgtatatttggcgccgaattctcaaacgcaacccgcttgcggccttctcgcccaccaggcctagcctttgactctatggcactgcccgactcgatgctgaaccccaacttgtccaacaagccttctgatgcatccagcctagccgtacaacaagaagaaacattctcctcctacccgcgtcttaacccaacatatggacgcacagtggagctggatgcgagccgcggacgagatattgtgcgaggaattggcatgctgggcagtctagtggcgcgcaacaaagtcaaggccgacttcaatagacagagatttcacgaacgaggaggcctaaaacgaaagaggctggcgtcagagaggtggagagcgaggttcaagcaaggcttcagggacgtcactggacgagtcactgagctgacgaggaagggatggtagatgtccgagcgtatacgacgcaggagccagaagatgcgccatgtatgacttaggtacgaagttcacagactgtactataacagcatttgcatgtgcctgcatagggatcttgaaatctcaaagacatgtgatgcgggtatcatcttacatcagattctacgcacaccatttttt

SEQ ID NO: 1879 - DNA, 963 bp, Oryza sativa
  ref <308>: DATABASE ACCESSION NUMBER: AK059847
  ref <309>: DATABASE ENTRY DATE: 2001-12-06
acgtgcaattgcataataatacaggcagttccccatggctacttccacaccctgcagactggccatctcagttatactattgtgctgcttctcacttctccctcttgcacacgcgcggctcctcctttccgataaaaacaccctcaatgatagcaaggccttctccatcaaaggtggcgatggcgcaggaggtgggcggggttttggtgtgagtattagccatggaggtcacgacatatcaattggtataggcggtggctttggaggtggagccggcactacacgtggtggtggcgcaagtgtgggtggtggggcaggtggaggtgttggcatagatgtgggtcatggtggggtggatgtggggattggtgggggaggaggtgccgcggttaacggtggtggcgtgcacgcaggaggaggaggaggtggcggtgttggtgtccatataggtcatggtggagtgagtataagcacagggggtggtggtggtgctggtggaggtgaaagtgcgggaagtagcggaggtggatttggtggaggaaatggagttggccgtgctgggaatgcagtgggaggcggcgggggttctggtagcgtgattggtagtagcggaagcggaggaggtagtggggttggatcaacaagttctgcaataggaggtggctctggaagtggtggtggacaaggctaagaatttgctctgatcaattatatggtgtatttaattttaatctaaataaccctctccagtgaacactatataggtgaaaacatggtatcgaatccaacaaagtgtgagtatgtactgttatataccatgtttggctttttgcacatttgatgtgcctagtaatttgtcggttgtgaagtactaaccgacatcttatattgtaatataattgtatgctgatcaaactagcatacgagtgatgtatactaatgttttaattataatgtggttgg

SEQ ID NO: 1880 - DNA, 957 bp, Oryza sativa
  ref <308>: DATABASE ACCESSION NUMBER: AK059848
  ref <309>: DATABASE ENTRY DATE: 2001-12-06
ctctccagtccagatcggaaggaagccaggaatggggcacccccacccccacccttacgcgccggcggagcttcacctcccgggcttcgtgcctctccaactgtcccaggcccaaatcctcgtgccctacctcgccacctccctcttcctcctcctcgccgtctggctcatctccgggagatgcagtcgtaggctttccgacaccgaccgctggctcatgtgctggtgggccttcaccggcctcacccacattatcatcgagggaacctttgtctttgctcctaatttcttctccaaccaaaacccttcttacttcgatgaagtttggaaagagtacagcaaaggtgactccagatatgtcgccagagaccctgctactgttacagttgaaggaattacagctgtcttggaaggccctgcttcactccttgctgtctatgccatcgcatcgggcaagtcctacagccatatcctccagttcactgtctgtcttggtcagctctatggatgcctggtgtactttattacagcctacttggatggcttcaacttctggactagcccgttctacttctgggcttatttcattggtgcaaacagctcgtgggttgttataccaactatgatcgccataaggagctggaagaagatttgtgcagcatttcaaggtgaaaaggtgaagactaaataggcaaagggtgcaccttagtcacagtttggttggaaattaatagacatttgtgctatgaacaacatcattgttcctgcaattgaaacccttgtgttactgaaaaattgcattgtacccttggagggaacatcagtgttaattggatgtgactttatgcagctattatgtattgctgcaaaagaaattgggttttgtttatcctctatcattcaagctcgctcttctttacccttgaagaaataaaagggcagggagttgccattttg

SEQ ID NO: 1881 - DNA, 1123 bp, Oryza sativa
  ref <308>: DATABASE ACCESSION NUMBER: AK059849
  ref <309>: DATABASE ENTRY DATE: 2001-12-06
ctagcaaatccccgcctcgatcggaaggagaccatggcgacggcgaggctccgatccgcctcctccctccgcggggtcctcctccgccactgctccgtgggaaccacctcgccgccgcaagttttctcccgcgtctcagatcttcaggctcctggatgtattgcatggaagcatttctcaacattcaagcctaatcctcttccaaaacttgatggccttggttcagtcacttgtttgtacagtcaggcaagatgggcttctcaagctgctgctgttaaagaaactgaaaatagtggcagcaagataagcattgggccaaaatccaagcagatcaaggaagatgacaaagatgacaggctagtttaccagggacctatatcatcgaccataagaaaagtgaagcttctttctctgtccacctgctgtctctctgtgtcgcttggccctgtgataacattcatgacatccccagatatgaatgtaatcctcaagggcgctgttgcatccactgtcattttcctcagtgctaccacaacggcagccttacactggtttgtgagcccgtacattcacaagctcaggtggcgaccaggttcagatagctttgaagcagagattatgtcatggctggctacacccctcacaaggacaatcaagtttgctgatgtcaggcctccagagaccaacagaccttttgtcacttttagggctgaagggaacttctattttgttgatgccgagcacttcccgaacaaggctttgttggcgaggcttactcccaagcaccctaatgagtctgcattcaagaacttgtgattgaaggttgcccaatgacctcatggctgcactcgcgttcatgatcatttgttggcagtttacatttttattgtgatacctccctgctaatacttccagaagaagtagtatactatgttattagcgttcctttaaatccatgtggaaatcagtaaatgctggtgtcatactacgattttagttaagacactgagatggcgtgctgactgttcttaataagtagcggtgacttttgcttaggacacctcccaacattctgttgtttatgatgttgcaatgctacacgcccgtgtgtgcttggcagttt

SEQ ID NO: 1882 - DNA, 1178 bp, Oryza sativa
  ref <308>: DATABASE ACCESSION NUMBER: AK059850
  ref <309>: DATABASE ENTRY DATE: 2001-12-06
ggtgctcccttcccctttcttctcccgcatcctggccgcctgctcctcctcccgtcctcacctctccacaacgccgccctccccctgcgtctcctccaactcctgccgctccgcctccctcgcacacggctcctctttctcctttcgagtctacgtcaaccacccgctcctcccctttccattcttgtcgttgtagccccgtggctggcgccacttctccctctggatccggcggcatccccttcgccatctacccatccctcctccccaccgcacacccttttcccctttcatccaacactaggtctcaggcggtgccttgatccctccacgaggtggtgtgttggcgaacctgctctacgtcgccgtgtcttcttgagccttcaacgaggaggacacaaatccatggcacatccatcaacgagggtccggtccatcttctcctcgtcgtctcagactatcgactgggatgactggtgctgcagccatccgaggcacaactgaagagaaaattgtagtccgtgtggattgatgccaattgtatcgcttgcctcaaagaaaatgttcgattgtgtctggtgtgccaggacctctgtttatcttggataaagtaaagtactaggaaattgtaaacatccgattgggagatggaaccactcggtgtggccaaattctggaagttgatggtgaaagaggctgttgtgcaggtctttgaagacacttcaggagtggacaacaaatacaccattgtgcaattcacagtacaagggtggtgcagctgagggtggcagaagaccaatcatctggaacatctttgaacaacgaagcacgcccgccccgtgtgcgtctttcacgacatgctctggtcccgggtttcttcctgtggtcttctagcgttagaagaagtcgtgtccgtcccggacatctgcaacgtcctctcacgcctttttttggggggacaaacaaagatcaggaaaagacggaccgaacccattcggtgactttcgcggttgccctcactgaaccgacttggatctgaactacgattcagatcaagtcttaccgaaattggatttccttttcgtgccatatgtcgcttagactttactttttcccctttctgtcctttcctctatttgttcgatagggtcttcaatctggacccaggcatgttaatt

SEQ ID NO: 1883 - DNA, 1212 bp, Oryza sativa
  ref <308>: DATABASE ACCESSION NUMBER: AK059851
  ref <309>: DATABASE ENTRY DATE: 2001-12-06
agacatcgaaagccaaaaaccactcaagaagctgcaaccgcgtaatctcgagaaaacggtttactcggcctaagacagtgggagacgacggcgacggcggcggcgggaggaagccatggttctcgctctgctgttgggctcctcctcttcttctcttgcggcgccacaccctgcttgctcttccaggagaaaatgcagacccgctggacgaaataatttcagatgctctctgcatgacaaggtgccactgaatgctcatggagtattatccacaaaattgctctcatgccttgctgcttcgcttgttttcatctctccaccttgtcaggctatccctgcagagacctttgtacagccaaaattgtgccaggttgctgtggtagcagccatcgacaaggctgcggttcctctgaaattcgatagcccttctgatgatggcggcacaggtttgatgatgaagggtatgactgccaagaactttgacccaattcgctactctggtagatggttcgaagtagcatcgctgaaacgtggctttgctggtcagggacaagaggactgtcactgtactcagggggtgtattcatttgatgagaaatcacgctcaatccaggtggacacattctgtgttcatggtggacctgatggttacatcaccggtattcggggaagggtgcaatgcctgtccgaagaggacatggcgagtgctgagacagatcttgaaaggcaggagatgatcaaggggaaatgctttctccgtttccccacactaccattcatacccaaggaaccttatgatgtgcttgcaaccgattatgacaattacgccgttgtgtctggtgctaaagacacaagctttatccagatatactcaagaacacctaatcctggaccagaattcatcgagaagtacaagtcctacgctgccaacttcggttatgatccgagcaagatcaaggacaccccacaggattgcgaggtgatgtccacggaccagcttggtctgatgatgtcaatgcctgggatgactgaggctttgacgaatcagttcccagacctgaagctgagtgcacctgttgcattcaacccattcacaagtgtgtttgacaccctgaagaaacttgtagaactgtacttcaagtaaactccatattgtaaaacttgtgatcaatgttccctccacatgaagatgcagttgaataaaattctcac

SEQ ID NO: 1884 - DNA, 1098 bp, Oryza sativa
  ref <308>: DATABASE ACCESSION NUMBER: AK059852
  ref <309>: DATABASE ENTRY DATE: 2001-12-06
gacacgcgcctcgccgccgcccgccgcgatgctactggcgcgcgctccgccgccgccggcgatgccctcggcggtcagctcgccgccgcaacgggagagcatactccgcccatactgcgttccctggacccgcggctccgttgcgacggccgccgtggcgaaggctgctcctttccggggcgagcaaaaccacaagcaggtagcgagcgtggcgaaccccctggtgaagcactgcgttaggctcaggctctcctccgcgtaccgccgctcctgccgccgcattctcctcgtcggactcatccccatcctggagatgtgtagcttcgaattctccaccatcgaaaccttgcttctcttggacggcatagagctaccggaggaattgtacgggttctctggcaatgtcgtgtatgtcagcgccgctgtgatgaagaaagtttctgggatgcaatcagttgattcaactgaggcaatcgctatcattcacatgcctaagtatttccgcgaccttgacagcgaccagggtggagctgttcttgatgagtggctcggctctgcaaagaggattttggttctggatgggattcaggaccctggtaaccttggaacattgataagatccgcttgtgctttcagatgggatggggtatttcttcttccagcttgctgtgatcctttcaatgaaaaagctcttcgtgcagctcgtggagcctcattgcagcttccagttgtttctggtaactggtctgatctgcatgctttgatggctaaatctgatatgaagatgctggcaggtcatccagaaagcagcagtaatggatctgaaagaacacatgttctatctaaagaactagcggattcactgatgagtgaatcagtgtgcttagtgttaggaagtgagggcaatggcctttcggcagatacccttcaagcctgtgagcttgtaaacattcctatgcaaggtacatttgaatctcttaatgtttcagttgcaggtggtatcttcttatttatgttacaaactaaacagcaaaaaatggcagaacgttaactgtttaagtcatccttgattttttaataattttattgttcttgtcc

SEQ ID NO: 1885 - DNA, 984 bp, Oryza sativa
  ref <308>: DATABASE ACCESSION NUMBER: AK059853
  ref <309>: DATABASE ENTRY DATE: 2001-12-06
taacactgagtggggagctttctcagatggacttccattgactgaatttgacagagaaatggatgatgagagcataaatcctggtgaacagatattcgagaagacgatttccgggatgtatctaggtgaaattgtccgtagggtgctggtcaagatggctgaagtatctgatctctttggtcattccttccccaagaaacttgctgaaccatttgttctaaggacaccacatctatgcgctatgcaacaagacacctctgacaatcttggagaagttgagtccatcttgagtgatgtcatcggcgtgtcccaagcttctctgctggcacggagagtcactgtagaagtctccgactgcatcatcaggagaggaggccggttggccggggcaggaatcgtagggatccttgagaagatggagaatgactccagagggcacattttcggacgaagaacagtggtcgcgatggacggtggtctatatgagaagtaccctcagtacaggaggtacatgaaggaggctgtggctgagctactgggacccgagcgatcgaatcgtatcgccatcgagcacacgaaagacggatcagggatcggcgctgcgctgttggcagctgcaaactcaaagtatgctgctgctcaaatctctacaaggtgatcgcaattgttataattgttgagttactgggccgaattaattctctacaaggtgatctcaattgttatcattgttgagctactgggacctgaacaatccaagcatatcatcatatggtggcctcttatctgaagtatggaggggcttcatatatgctattcttctgtactactagtctactatactatataacgcatttgaggaaaagaaacaccagaaatttatcaacttatgttttgtataattcatcaacttatgtgtttgtatagttacagttcaccagaaattcatcagcttatgtatttgtatagttaaagtttatcctc

SEQ ID NO: 1886 - DNA, 988 bp, Oryza sativa
  ref <308>: DATABASE ACCESSION NUMBER: AK059854
  ref <309>: DATABASE ENTRY DATE: 2001-12-06
ccagctcacaaaaacctcaaacccccagccttctcgggcctccacagaaagccgaggaagagaaaaaaaaatggagctcttcgtctccaccgtcgcctccgcgcgcgccaccgcccccttatgcttcgcctcctccttccaccaccgccgcgctgctcctcccgccgtcgccgccgccgccaccctccgccgcagcaaccgccacctcccgactcgaggatggcggtgcgcgagcgcggcggcgccggacccggtgccatcggaggagcccgcgtcggcgtcggcgtccaccgtcgtcgtcacggaggacaagcccgatccgccgccggcggaggagaagagcgaggaggtcgcggcggtctctaatggcgggtctctggagaccgtggcggcggcgccggtgtcgtcgggggcagccgaggaggacggcggcttggatgacatcctcagcaagctggacatccaagtgacaccaactcttgtcctctatggatccggtgctttggttgtcctatgggttctatcttcagttgtttctgcaatcgattccattcccttggttccaaaagttcttgaactcataggaactggttactcaatttggttcacttcacggtacctcctcttcaaggaaagcagggacaaactgtttgcgaaattcgaagatctgaaagagaggattatttgagctcacgatgaatgatcctatggtgtatgttaggcttcgcagccaacttattattaggtcttcttttttctattactgaaagggaaaaaagttgtgtatgtaagccacgtttctttcgcttcaaatatgatcagacatccatagatttttgtttgttagagcggagcttgctcaagtctttctggtttttttaccacttgatccgatgtatatactccatactgaaagtgccgccaactgtgaagctgtgtaccttggatacataataatatatcaaatgggtcgaccttcatatttggt

SEQ ID NO: 1887 - DNA, 1013 bp, Oryza sativa
  ref <308>: DATABASE ACCESSION NUMBER: AK059855
  ref <309>: DATABASE ENTRY DATE: 2001-12-06
tctgaactccaaacatcagtaagctagatatcccttcctacgccgaaggcagaagcgtcgacgatgtcgagtctccgcagggaagctccaccgatctctgactacgaggcactagatggttccggcaaatgcaccgacgaaccatcatgctcctcggatcctagcaaagacagctcgtcgtgtacatcggccttcgccttcaccatccttgccatcaactgcggcgcagctatctaccattcgcggcgtgacccctggtcagtcgcgtttgtgttggccgccttcctcatgctcatctcgctcttctgcgcgctccgcttgttcgagagcttgcctcgcagctccccccgcagatcccatgtcaaagccggtgtttgggtcctttccacggtgctcacaatcttgttcacctacagagtagctgcgcttatgcctttcccagtcgccgttgtcgtgtgggctatgtccgtcttcacaattcttgcaggattctacatgttcttcgtttgcagcgacgaggtcaaggcggcgccagaggagaggccggcaaaagtgtctgacatggcttgagccctggggccctggctgtgcaacccctgtggaaacgtcagtgctccactgctgggacccgagacggagacgccggcaacatcataattccccagcagtgtgtgtcccgattgcacaaccggaacaaaagggattgtgaaaagatcgattcctcagctgtgattgcaagtgctcctccaccctgcgcagctgtatggttttgaccgagtttcaggaccaaaaacggttcctccaccctgtgctgattcaccggtagttcctgttgatacagtatcttccaaagcctctggttttcagaatgatcaaaggaaccacagaagatacactagggctcggattacagtacaacctgtaactttccagtttcggccacaaattgttccgaatgatgtcatatgtaatatcctgaaaaattatttgaagtcaataagtactttcgatgt

SEQ ID NO: 1888 - DNA, 1390 bp, Oryza sativa
  ref <308>: DATABASE ACCESSION NUMBER: AK059856
  ref <309>: DATABASE ENTRY DATE: 2001-12-06
catgttcaagtcacagaggcacttctccgagaggtttttcagagtactggtttagttgaaggatgcaagcttatacgaaaagagaagtcatcttatggctttgttgactactatgaccgcagatcagctgcattatcaattttgacacttaatggaaagcaaatttttgggcagcttatcagagttaattgggcatatgctagtgggcagagggaggacacaacagaccatttcaatatttttgttggtgatcttagcccagaggttactgattccgcattatttgcattcttctctggatattccagttgctctgatgcccgagttatgtgggatcaaaagactggaagatctagaggttatggctttgtttccttcaggaatcaacaggtatggtaattctaaaagcacgtgcatttgtatgggttctttgtttactcctgtcacttaaaaaaaagttttttggtgagcttacaggatgcacaaagtgccataaatgacctaaatggacaatggcttggaagtcggcagatacgctgcaactgggcaacaaagggtgccagcaatggcgagcagcagacttcagattcaaaaaacgtagctgatctgactaacaatttgacagaagacgggaaggagaaagcaaatgaagatgccccagagaacaatccacagtacagaactgtttatgttggaaaccttgctcacgaggttactcaagatgtgctccatcgtcttttccacgcacttggagctggggccattgaggaggtccggatccagcttggcaaaggatttggcttcgtcagatacagcaaccacgcagaagccgccctcgcaatccagatgggaaacggtcgcattctaggtggtaaaccaatcaagtgttcctggggcaacaagccgacgccacccggcaccacgtcggcgcctctgccccctcccgccgctcccagcgtgacggcggccgatctcctcgagtaccagcgcagcctcgccttgagcaagatggtgtcaagccaggcgctgatgcaggctcaggcacagcagcatctgaagcaggcaatggggatgggtgcaggcgtgagccaggccatgtatgatgccagcttccccaacgttggcccctcgcagcagcagctcatgtactactgaataaaattcctgcgagctcgtcgctgtaatttgtgactcgatcagtctgatctctttttttttctggttttgttttagctaatgttactttttttacgtctatatttagagtgtttctggagctattttcgatgttgtttcgtacatggatggatggagaatgtgtaatggtatatgtgtgtgaaggatgtaagctgacaattttatataatcttagtctaatgttattgctgcc

SEQ ID NO: 1889 - DNA, 1138 bp, Oryza sativa
  ref <308>: DATABASE ACCESSION NUMBER: AK059857
  ref <309>: DATABASE ENTRY DATE: 2001-12-06
ccgctaatacttattttgaactgttattacttccttttcaggatatggcatgcatgcaggcctttcacctcagcgccaacacagaccagaaaacagaaattttgatgatacttttggtccacgttatgctcatggatatcaaggtggtggtagaggagtcgcgaggttccgggatggttctccaccatatggaagaggaggcagatcatatgggaggggctctggtgctcctggaaaggagttcattaatattgatggagaatatgttcacaggaatgatccaaatctgtcgccaagagaaggcgattggatatgccagaatcccaactgtggaaatcttaattttgctcggcgaactcactgtaacaactgcaacaagtatcgctattcacgagaagtatgtgagcctggccacagtcctcacagagattacgtcaatcctccacgtggacctgcaaggaatcttggtccaagtgatcgggcccctccaagagagatggccaggtacgggtcaccaccccgtggttggggaagtgaccctaagggttatccagctcgatcacctccagatcatgcaggacggtatgcagatccagtgcaaagggaaagaatgggcttccgtggtgattgtcagttgagggaccgtgtaaagcatgactggtcttcagctgaagactacaacccaagggagcgcccacatgatatgtatcttgagaggagtcggcgacgatcagtgtctcctcgggataactgggggcacaatatgcgggaccggagcagatcccctgcaggaggcaggctgaagggttctttcacaggtggaggtcgaccagacttgtatgctgatccctatgcagggagggggcgacccaacaatttagatgatgtccgtggccgtggccgtggccgtggccgtggttacatacctggaggtgctacatacctaggcaagggtcgaggtgacaggcgtgctgctcccagtagtaggaatgatggaagctattagatcatcatagtcttattgcatgaccatcaaacaatctagttaaggtagctgttgaagcaagatgtagcttgtaatattaagatttcccgtactgtcttgaactatgatattacatttgcatcttgtatggac

SEQ ID NO: 1890 - DNA, 1407 bp, Oryza sativa
  ref <308>: DATABASE ACCESSION NUMBER: AK059858
  ref <309>: DATABASE ENTRY DATE: 2001-12-06
ctatttaatcctgtatcacgcccagattcctgagtccaaaaccaactactgatagtctaatagtatcgatcactgaggaagaagagcatagcaaaagagtggtcgatcgtcatcaatggagcacgacggcacggcggcgctcggctgggcggcgcgggacgcctccggccacctctcaccgttcagcttcacaagaagggttcaggaggaagacgacgtgacgatcaaggtgctctactgcggcatctgtcacaccgacctgcacaccatcaagaacgagtggggcaacgccatgtaccccgtcgtccccggccacgagatcgtcggcgtcgtcgccggcgtcggcgccggcgtgaccaggttcaaggccggcgacacggtgggcgtgggctacttcgtcgactcgtgccgcgcctgcgacagctgcggcaagggggacgagaactactgcccgacgatggtgatcacgtcgaacggcacggactacggcggcgccaccacccagggcggtttctccgacgtcatggtcgtgaggcaggactacgtgttgcgcgtcccggcgagcctgccgccggacggcgcggcgccgctgctgtgcgccggcgtgacggtgtacagtccgatggtggagtacggcctgaacgcccccgggaagcacctcggcgtggtcggcctcggcgggctgggccacctgggcgtcaagttcggcaaggcgttcgggatgaaggtgacggtgatcagctcgtcgccggcgaagcgggaggaggcgctggagcggctcggcgccgacgcgttcctgtcgagccgcgacggcgaggggatggcggcggcggcggcgacgatggacgggatcatcgacacggtgtccgcggggcacccgctggtgccgctgctgtcgctgctgaagcccaaggggcagatggtggtggtgggcgcgccggcggcgccgctgcagctgcccgcgatcgccatcatcgatggcgggaagcgcgtcgccgggagcggcgggggcagcgtggccgagtgccaggcgatgctggacttcgccggcgagcacggcatcgccgcggacgtcgaggtggtcgccatgggcgacgtcaacgccgccctcggccgcctcgagaggaacgacgtgaggtaccgcttcgtcatcgacgtcgccggcaccctgcacgccgccgccgcgccgtcctaggctcctagcaatgttgccttcgtgtcaacgtgcttgcgtgtcattgtgcggtcgtgtgtgtaaccgtgaaaggagaggcgtttggtaatggagcaataacgttgtttttggaccgtgatggtccgtgggcttgtgatgggttatgtgggccacctcgagttgggcccttctcttgtccgattctttgtccaaagattgaaataagttcatct

SEQ ID NO: 1891 - DNA, 886 bp, Oryza sativa
  ref <308>: DATABASE ACCESSION NUMBER: AK059859
  ref <309>: DATABASE ENTRY DATE: 2001-12-06
attccaacttttgcgcacttcagcacaagtcaccaccactacaaccaccaccaccaccactacaacatggtctccttcttctccacgcttacgatcgctgccgttgcctttgtcggtgccgcccacggtctcaccgagggagagtactaccgtcccacgggggctgaagtctccagccaagtcggcgccaccaccgcctatgtgcgctcgccgtgcccggcgcttaacgcgctcgccaaccacggctacttgccgcgcgacggaaaggacatcacccgtgcccagtataccgaggccctcgctaagggttacaacatcggctgggacgtcgccgcgctgctcgtcaacaacatcccggccgtcatctcgctctcgggactcagcgagcacgatctcattgagcacgatggctcgctcgcgcacgccgactcgtactacaagaaggagccgtcggcgctcgatgcgacgctgtgggcggatctgttgagccgtgccaaggacggcaagttcggtgttgtggagcttgctggtgcgcgcaagaaccgcatggcgttgtgcaaggccaagccgacaggttgtgacttcggtcccaagcagcgtttcttggctttcggtgaggccgctctcttgctgcacggtatgggtggcaacaacgacgagtcgtgctcggtcgagttcgccaagtcttttttcgaagaggaacgtattccggccaactatgtcaagtccaagtcggctgttaaccttcctgagttgctcgcgacgatggcgaagatccaggtactcgctccgttccagtaaatggaccgcaagtagctgttcgtgaggagatgttctcccgaccacccgaatactttatcttatcaataaacgactttgaaagctc

SEQ ID NO: 1892 - DNA, 983 bp, Oryza sativa
  ref <308>: DATABASE ACCESSION NUMBER: AK059860
  ref <309>: DATABASE ENTRY DATE: 2001-12-06
acactcttcagtctcacacaaacccaaaaacccaaagcttagccaagctactagctagctcctcacttcttccagcttcttacactaatacagctcgagccacttcgtcttctcctctcttgcagcatagtttaagtttgagataggattggcgatagatatgaggccgactggtcgtcgttcttctccgccggtggctgctgctcttgccctgcttctcctcctcgtcttcttcttcttctcccactgcgcctcagctgctcgcccactgccagcatcagcagcagcagagctagtgcttcaggatggcgccaccggcaatggcgacgaggtttccgagttgatgggagcagctgaggaggaagcagcaggattatgcgaggaggggaacgaggagtgcgtggagaggaggatgcttcgcgacgcccacctcgactacatctacacgcagaagaggaacaggccttgaaatcttgaatcataatctccaagtcgatacaaggagtattaatcagtagtaaacctacataaattaatctactatctgcagcctgttttcaactgcatgtatcagtgtattagtcgatctaggataatattttgcatgtgtactcaagtaaactgtcgtctgtataaccccgttatgtacatggttgtatttctttctccaaagtgttatcgaactctctgttgatctctgatacatctgtatgtgtagcatcagagaaaagatcgagcacttgtgggttatgatctgacgatcgagtgtatgaacagtgctaatggtgtagtaagtttttgcttaattgtcttggacttctcatggtgtgaaatgttcgaacaagcagaacatattccctatatcttccttggtagctggtgcttggtactactaccagcacaaatgttaccagtatgcatgtttcataaagagaaggtataatggattataaatatataaacttgcatttgttttctgccgc

SEQ ID NO: 1893 - DNA, 937 bp, Oryza sativa
  ref <308>: DATABASE ACCESSION NUMBER: AK059861
  ref <309>: DATABASE ENTRY DATE: 2001-12-06
aaggtgaagagcaactgattggccatgagtccagagatagcattgaacacaggacaaacaacctcaattctatctccactgatccacaaagaaatcaagaagcgaacaaaaaaagcaaggcactgcatttccctgccactgctgagcagtgagcacaaatcacagacacaaatggaagcagcagtggctactccttccttgctcttctctagcccaacacccaggaggccttcctcctgcttgtcactgccgcctccttgcagcagcagctacgcctccaatggggcgaagctgcagcagccgcggctgcagtttgtcagtcagctaaccagcagaaacagcaacgggagtggcagaagaagcatttccattttgtcgctgaggtgctcttccagtggcactgacagcgcgtcttcttccgccacttcagaaagatgggttcttgagcctgcaggagacggcgattggcgtcatatcgggtaccgcgtcgcacgacccggcggcttccagatagcatccgaggcggcggtgacggtgggtcgtgttcctgaacaggctgacatcgtcctgtctgtcgcaacagtttctgggacgcacgcacggctggagaagaaagaggggagcctgttggtaacagacctggagagcacgaatggcacctacatcaacgagaggcgcctcagcccgggtttccccactcccatcgaccccggcgacatccacctggccatgttccgtgtttccaagatggtcgtggatgtgcccagtgacgccagtggagctgagcaggaagcagctgagacggctcaagtatcagctgcagcccaacagaccaattaattagcgacctccatgtgctgcttgatgcatcaagacagctcaagaagaactagcttatcagtgctcccaaaggccgacatgaagtgcatatgttacg

SEQ ID NO: 1894 - DNA, 1027 bp, Oryza sativa
  ref <308>: DATABASE ACCESSION NUMBER: AK059862
  ref <309>: DATABASE ENTRY DATE: 2001-12-06
atataccgactgttgtacgtatattttactccgatccaccgccgatcgcctccccaagcaagcaagcagccgctcggagcgaagactgaggcggcggcgaccatggcggggctcgcgcacctcgtcctcgccctcctcctccccctcgcgctgctcccgccggccgcgcgcggcacggaggagacgccgcagtacacgacggtgcacgccgagtccgacttcgaggtgcgccgctaccgcgacaccgtctggatgtccgccccctccgacgacatctccttccacgtcgccaccaagctcggcttccaccgattgttccagtacctgatgggcgcgaaccttaactcctccaggatcaggatgacaactcccatcctaactagcatcgtcccaggtgcagggccgctacactcgtctgcctactttgtgcggctctacttaccagcgaagttccaggcttcccctcctgtgcctctccccgaactgaacctccacccggataggtggccaagccactgcattgcagtgaggagcttctcgggttatgcacgggacaacaatgtcgtcgaggaagcggagaaacttgcgttgagtttgagccggtcaccatgggctaattccacaaactaccctagcaagagcgcctactcaattgcgcagtataacaacccctttcgcatcattggccgtctcaacgaggtatggttcgatgttgattgcaagtctactggtgttgaggcatactaaaacgaaggttttactgtgcaccatcaccccaaaaaaaaaaaggcttattgtgtgttagtaccacataagccatgtacatctttgtatatatgtgttcatggtgatgaattctgatgataaagctggggggtgtttgtggtgtgtcaatccatcagtgatgaaatgacacagcagatgtcaattgtaatgatccactatgtactcacatcttgcaagctcgagtgctcgattcagactgatcttgcatgtcattgtgtggctaatgtgatgtttccactgc

SEQ ID NO: 1895 - DNA, 1169 bp, Oryza sativa
  ref <308>: DATABASE ACCESSION NUMBER: AK059863
  ref <309>: DATABASE ENTRY DATE: 2001-12-06
cacatttacagatggttactgcagaagttttctgccatccagggcgcaccaatttattgtgccatgatattgcgatccttatgtcgacgtagctccttgcctttctttgttggcattagtgttctgacagccaggatatataactacgttacgattcacaatcatatttattccccacaactctgcgctggccatgacgctaaccttcggagggatttgttcattcaagacactgaattgtgcaataagcaaaccctcgattcaggtttccttggcagcaagcatgattgtatccgtctagcacttcattttatttgcagcactgccaatttaaaggtttatacaacaccaaaacagatcggtttcgatgggaagtgcaaacaaaagaataccgagagaggccgattttggaggatcttatcaacaaatgagcaatatctgacttatattggggcactagtgacactacaactgtttttacaactgagcagagcgaacattaccactctgctcctgccaatgctatatcagacaacaagctcccagcgcaatgctgcagttgtcggtaacatcgtgattgttttttgaactcctttggcattcttgggtctgacttcacaacaaagcaccacggacgggaggtcacattcaccgtgagcgccattctgatggtgttttgccagatcacaatcccattgcttgtggaagcgcaaatcgggctgggcggtggaactcggatactgacgggctacaccacggcgacattcctgctcacatgcgtcgtctcctatggtctcagctggtcatggggctcattgttctgcactattcctggtatgaagattcagtcagctgggcaggttatcggcatgggtctctgtttcgggctctgcttcgtgcaaatgcagtacttcctgctgatgctgtgccggctgaagaacgccatccttgcatactacgcaatgtggatttggtcttgatttaaactaggatctcaagagaagagatgggacagatggctagatgtctgcccgttttactgctagcgtttgatggatgtaaatatgctcattttctttgcctgttctgtacagtttttgtattggttgctatctcagtgtagattctcccaagcagtttctgcgactatgaggcaattaacaaatgtt

SEQ ID NO: 1896 - DNA, 1121 bp, Oryza sativa
  ref <308>: DATABASE ACCESSION NUMBER: AK059864
  ref <309>: DATABASE ENTRY DATE: 2001-12-06
gtgtctcagtcagcacgaaggggaggaagaatctaatgaagctagcggacgacctgctcgcgagcttcgccggcggcatcgccgccactggcggaggaacgtggaccgtcgtgatcggcgccggcacggagaaggacatcagggtcgcgtacaggaggaccaccgagggcagcagcagctacaacgcgatcctgtccgtcaccgcgtccctgcgtctgccgctgcccatgaggaaaaccttcgatctgctcaggaaccttactcaccgctgcaagtgggacgtcctggtgcacggcagcgtggtgaaggaggaggtcaccatcgccagaggcgtcgggaacgacgacactgtcaccgtcctccactgcaagcgcgccggcagggaggacaggggaaggaccatgatcctgcagaacaacgggtacgacgcgtcgggctcgttcatggtctactcccagatcgacagcgagctgatgaacaccatggtcctgagccccagcgacctgccgcccgggcggggcgggccgtccctctaccccaccggcttctcccttctccctgacgtcgaggctgcccaggacagcagcggcatcgccctcggcgaggttgggggaactctcatgaccatgggcttccagattccggtgaagctcgccagtggggatcgcatgtattcccggtctgcggcatcggcaatcaggctcatgactgacaccattgccctcgtcaagaagacgctgatgaacgagcattctggtatctacggggttagcccgttccacccctagattcagaaaaacaccagagggagaaaagggaggtccgtgtgcagataaaaatcaagaacatgcgaaggggattcatcggctccgatcaccctgcatctcccagaatttgctgaattaattagaactttaaggttgtgttaacaacctgtaataatgtttttaaggccaaacttatatcgtgtctttgctgtaataatgtagtatgcgcctgatggatgtcgactgccgtgtaccgatgcagtttgcttcgcagagacgcggatacatttgctatcgtatggatgctcctttagaacctatgttgcctcttaatttctatgggtgctattttag

SEQ ID NO: 1897 - DNA, 1041 bp, Oryza sativa
  ref <308>: DATABASE ACCESSION NUMBER: AK104146
  ref <309>: DATABASE ENTRY DATE: 2002-08-28
gaaacgaaatggcagtggcgttccactgaaccaggccaagccagacggacaagacttcgccgcagccgcgtcctcctcaccgcgccgccgtcgcaatggctacggccatcgcagcctccgcgttcctctcctccgccttcgccagggacaggccgctcccccgccagcggcgcgcggcgaggcccgcgacccgccgcgccgccgcggggggcctgtcggtgcggtgcgagcagagcgagaagcagaagaggcagccgctctccgcgctcgtcccccgcgagcagcgattcatgttcgaaggcgacgagctctgcggccccgacatatggaacacaacatggtaccctaaggctgcagatcatgtaactactgagaagacatggtatgttgttgatgcaacagacaagattctaggtaggcttgcatccaccattgcagtacacatcagaggaaagaatgaggccacatacactccaagtgtggacatgggggcttttgttgttgtggttaatgcagagaaggttgctgtttctggcaaaaagcggtcacagaagctctacaggaggcactctggacggcctggtggaatgaaagaagaaacttttgatcagcttcagaaaaggattccggagagaattattgaacatgcagtgcgtggcatgcttcctaagggcagactgggaagaagactgtttacccacctcaaggtgtacaagggagcagaacatccccatgaggctcaaaaacctgttccactgcctatcaaggataaaagaatacagaagtctgagaagtagataattcctgtggagactaagaaagacacaacaatctcacgtaaattcctcccctcgagattttgtccaatctttggaatgtgatgcatctgtctgtttggggaatggagtgtaaaattttttgtaatttacttcctccaaaagtttgtgtttctaagtcatagttcttgttgattacatatcatgtacctaataccgtacgattttaagcaatccgatatttccatatccaattgagtagtgc

SEQ ID NO: 1898 - DNA, 1137 bp, Oryza sativa
  ref <308>: DATABASE ACCESSION NUMBER: AK059865
  ref <309>: DATABASE ENTRY DATE: 2001-12-06
aaacagagaatacttgcgagctccgatctcttcttcttcttcgtgagctctcaccaaaccaaccccaaccactgccctcctcctgccgcgatccactcctgctctccagctcagggaatccacctccacccgcagagaccaaccagcagctgtccgtcctctgcggcggcggcggcggcggcgagatggggcaagctctgcggcggctcttcgacgccttcttctccaccagggagatgcgggttgtgatgcttggtttggatgcagctggcaagacaacaattttgtataggctgcacatgggagaagttctttcaacggttcctacagtaggttttaacgtagagaaggttcagtacaagaatgtggtatttactgtgtgggatgttggcggacaagaaaagctcaggccattatggaagatgtacctcagcaattctgatgcactgatctacgttgttgattcattggacagagaaaggattatagacgccagacaagaatttcagaccattatcaaggacccactgatggcaaacagcataatcttagtatttgcaaacaaacaggacctgagaggtgcgatgagcccagatgaggtgagcgaggggctaggcctgcacgacctcaggaacaggatatggcatatacaagggacatgcgctctccgtggtgagggactctacgatggacttgattggctcgcatccaccctgaagcaattgcaagagacaggccatgcaacttcagtcgccggcccttccatctgatttcgctagagaagagatgccaatgcctcaactagtcaaccaatctgatgctcctgggcagtcatccttctgttcatccaatgagaatattgagttccttggtgcatgcgtgatcttcgctatcggctttcttggtgtggctgctcgcagaggagggcattcaatcgctgtgttcatatgagcaaactcatttgacagtaacttgcggcataattttctcctaaaatgtttgtaaagtgtttggacgtctgtgtactttgttgtagtgaacaagagctgagtagtttgcacggaccgtgcttgtgtatacttgatggcacgtccacatgattgtttgctgattgcctatcaataagacggttggatg

SEQ ID NO: 1899 - DNA, 924 bp, Oryza sativa
  ref <308>: DATABASE ACCESSION NUMBER: AK104147
  ref <309>: DATABASE ENTRY DATE: 2002-08-28
atcctaccgccgctcgcgcccctctcgccctcgcgcgccgccgccgccgcccgccgtcgccggagctaaacccctcgacgccgccatggggcgcatgcacagccgcgggaagggtatctcgtcgtcggcgctgccgtacaagaggactcccccgagctggctcaagaccgccgcctccgatgtggaggagatgatcatgaaggccgcgaagaagggtcagatgccgtcgcagatcggcgtggtgctccgtgaccagcacggaatccccctcgtcaagagcgtcaccggcagcaagatcctccgcatcctcaaggcccacgggcttgccccggagatcccggaggacctctacttcttgatcaagaaggctgttgctattaggaagcacttggagaggaacaggaaggacaaggactccaagttcaggcttattcttgttgagagcaggatccaccgcctcgcccgctactataagcgcacaaagaagctcccacccacctggaagtatgagtcaaccacggccagcactctggtggcctaagagaacactggcgtgctcttagatgcttcgatatggacctggttctagaaatcaatttatgtactgctttgagtttggagcgagttagacgtggacaagaaactgcaagtttttctatgtttactcgggggatcctataaaccatttttggtttcacaattctgtctgttaaacatgcatcggtattttgttatttacaattagctgttaccttaccataatgttcggcatcgtttgcatccagctctatcccgtactttggtattgtgtttgaactcatcgtacgatgttagttcataattctggttgatcgaggctaatttgctcacaagcgcttctcatagaacttttcacaatatttgtgagagaaatccggtgctatg

SEQ ID NO: 1900 - DNA, 1062 bp, Oryza sativa
  ref <308>: DATABASE ACCESSION NUMBER: AK059866
  ref <309>: DATABASE ENTRY DATE: 2001-12-06
actactactactccgtcctcctcttcaccggttagatcggcggcggcggcggcgatgatgagggcacggtgggcggcggggatgctgcgccgcgctagctctggcgaggcttcgctcgccgcgcgcgcggtcttcgcgcgcggcttcctcggcctcaacatgaaggcgagtaaggagaccatcgagaagaaggagaaggataaggccaggcttatggatgaaatgagcagggggtacttcgccgacatcgcagagatacgcaagaacggcggcaagcttgcgacagcgaataagatcatcattccggaaatcgcagccgtgaagttccctgatctttctgtgaagtcccctgatggcaggacagtgaatttgccgcttgtcgcacctccgcgaaacgatgatccccagactggcaatacagtggacacacaaaatgatgattgtaaggctggtgatatggtggttcctgatgcttcattggtgtgcctttcctttcgcgcaagctcccagaaaatggcagaaacgtggagcctaccttttcttgatgcatttagttctgctgggaatattcaagtgtatgaggtctcatttattgattcatggctgttatcatcaagtcctgtgagacaagtattcctcaaggtgatgacaaaatccaacaatccacagagacatgctgtatatgcctttggtgaccactattatttcaggaagaagcttcatatccttaaccttcttactgggtacatatacctggttgatcgcctcggaagagtgaggtggcaaggtttcggatctgcgacgcaggaagagttgtcatcgctaactgcatgtacctccattttgttagatggaaaatgagatttagatggatactgaaatatttggggttggagaaattttgtcattgcgaatccatagctgtatcacctctcgtttcagcatattgagggatgattttttttcctcgcggttaataagcgtaaattggattgattttctcctgcccaatgacattgtgtaaacagcattgcttgcatgtcattgttattctgggaactc

SEQ ID NO: 1901 - DNA, 1137 bp, Oryza sativa
  ref <308>: DATABASE ACCESSION NUMBER: AK059867
  ref <309>: DATABASE ENTRY DATE: 2001-12-06
caaggaggcttactgtttcatttatctgcacagttgccaactatgaatatggtttttactggcacttttatcaggatggcaagatagaagcagaagtaaaacttactggaattcttagtttgggagctctgatgcctggggaatcaagaaaatatggtacaaccattgctcctggtctgtatgcacctgttcaccaacacttttttgttgcccgtatggacatggctgttgattgtaaacctaacgaggctcataatcaggtggttgaggtaaatgtgaaagttgaaaatgcaggcacacataatgtgcacaacaacgctttctatgccgaggaaaaactactgaaatctgagctgcaagcaatgcgagattgtgacccttcatctgcacggcattggatcgtaaggaacacaagggctgttaatcgtactgggcagccaaccggctacaggctcgtgcctggttcaaactgtttgccgctggctctacccgaggcaaagtttctgaggagagcgggtttcctgaagcacaatctctgggtcacgcagtacaagagcgacgaggtgttccctggaggggagttccccaatcagaatccacgtatccacgagggcttagctacctgggtcaagaaggataggcccctggaggaaactgacattgttctctggtatgtgtttgggctcacccatatcccaaggctggaggactggcctgtcatgccagtggaacgcatcggcttcatgctcatgccacatgggttcttcaactgctcgccggcggtcgacgtgcctcccggctcctccgacgctgacatcaaggaagccgagtcgcccaaagccatccagaacggcctcatctcgaagctctgaagagctttccgctgctcttcgtttcgaagaaatgcaactgtggcatgtcactgctacgtatgcttctcgtcactatattgccccaaataaaagctactcccatggtgttattcctgtgttctgtactgttatgactttcctgctgcgctgtttgatttgtgaaatgtgtcctgttgcgccatttgatttgtgaacttgagccacgtctggtgaaatttgggatggctgacgttaatgcctgtattaataaaagcgcgtgttagac

SEQ ID NO: 1902 - DNA, 1014 bp, Oryza sativa
  ref <308>: DATABASE ACCESSION NUMBER: AK059868
  ref <309>: DATABASE ENTRY DATE: 2001-12-06
aacgccacggccgaaagcttttctcagcccgagagatccgctgcgagggcgcccccaacccgacggtcgccggagaagcagcagccgccgcccacccacccatccagtcgatggcgccgccggataccagccgcgcgccggcgcaaggcgaggaagccgcctccacatccccgtggcctctccggaagctccagagttttacaccagggttgtgttcgcagtacaaagcttatgagaatgcatttgtggatatggctaaaggaactatttcggatgcaatggttcttgtgaacgagcaccagacagaggcaattggatgtgccactgtggcaggattcatcttattgagaggtcctcggagatttttataccgcaatactctggggcgtttcaagactgagaaggatttactgaatgatgctgagcaaagtatgatggagtacaaaacatctatcgaacagttgaaaaaagattcaaaatacaccctagacaaaatagctgttggtgaaagtgatttgcagcgtggacaaactgatttgaggtctactggtaagcagattcgatctcttattggttccatttacaaggctgaatccacagctacaggtttgatggatcgactccggacaattccaaccagacaatctcttgaactgcgagcagaggtggcttccatggcctctgatttgaaaaaccagagatgtgttctacaagaaaggatcaacaaaatatctgaatatggtgtccgcgtctgaacttcagtaatcatatttcccatgataccacacttgcccttccaaggtggcaataaactgaatcactgcaggagatgctgtttatcgtttgatcaggccagtaccatctccggactcttaaccttttctgtaagcattttaaataggagagcaaacaaaatcactcgccataaccatggatttcatggcatattcactgtatttctgtgctgcgcttgcgcattgttccttcagcttatgtgatgtgtttcctgtaagc

SEQ ID NO: 1903 - DNA, 1194 bp, Oryza sativa
  ref <308>: DATABASE ACCESSION NUMBER: AK059869
  ref <309>: DATABASE ENTRY DATE: 2001-12-06
aaagggaaaaaaaaagtagggttccggcgaccgggctaccggcggcgagaaggcgcagctccgcacccaccggccaccgtgaggcctgagcccccccgccccctaacgccgacggcctacacccagaggcgactcggcaagcgggctgtggcgctaggcggcagcgggggcggcggccgcgaccacgaccagcaaggaggaagggctctcctctaatcctctccgtctctccaagaatccaaccaggtagcagctgcttggcagtgggcagagcaacatgtctagcaatccggttggtgtcgataacactttccggaggaaatttgacaaggaggagtacttggaacgagctcggcagagggagcgggaggagaaggaagaagcgcggaaaggcaaggaaaagggccctcctgtgcaaaggcaacctttgaagcatagggactatgaagttgaccttgagtcccgtcttggcaagactcaggtggtaactccaattgcacctttgagtcaacaggctggttactattgtaaagtttgtgaatgtgtcgttaaagattcagctaactatttggaccatataaatggcaagaaacatcagagagcattgggcatgtctatgcgtgttgagagagcatcacttgaacaggttcagaaaaggtttgagtcacttaagaagaggaaagacccaggtagctttagtgaacaagatttggatgagagaatattgaaacagcagcaagaggatgaggagaggaagcgccaacgcaaagaaaagaagaaagagaaaaagaaagagctggctgcccagaatgaacctgaggaggacatagaccctgatgttgctgccatgatgggtttcggaggcttccgttcctcaaagaaatgaatgatccatggcggcctttttttgtgacctgtggtttctttcaggtcgaagagtatatgcacctggattacaatatatatttgtttctaaggaaccaggacaagagttttgtgcacctcttgatccaaagctgcgtggaagtgattgaaaataacttttgtaatcgctaccagatagtattttatctgtaaggatgcatgagatgtcgaaacaagtttaatctgtgtatttcggtatccaagagtgaatggtgaccttgctgtaattcgattctcgcttatgtgaatgatttctgaagtgttaaaatt

SEQ ID NO: 1904 - DNA, 970 bp, Oryza sativa
  ref <308>: DATABASE ACCESSION NUMBER: AK059870
  ref <309>: DATABASE ENTRY DATE: 2001-12-06
acacgaagcccctcgcaattcttcgacctcctaaactcccccatcgcgatccctctcctcctcctctttccccaatctcgcgcgacgcggcggaaccctagcccccaccgcgattcgctcgccggagagggagagggagggaagggaggctaggggaccccctcgccggcggcggagatggaggtgaagctgtggaacgacaagcgggagcgggagctcctggagagcctcgccgacctgtacgccatcatcaaggcgacggagaagctggagcgcgcctacgtccgcgacctcgtctccgccgccgactacgaggccgagtgcctcaagctcatctcccagttcaactccctctcctcctcgctcgccggcgtcgtcaccatcccccggttcgtcgaggcctaccgcctcgactgccccgccgccctcaaccgcctcgttcagtccggcgtccccgccaccgtcgagctccgcgccgcggcgtcctcgtccgcgccggcctcctccgcggcgtccgcggccgccatcgcccagtgcgtccagagctttattaccgccatggatgccgtcaagctcaacatgctcgccaacgaccaggtccgccccttgctccacgacctctcgacctccatggggaagctgggccccgtcctgccgccggacttcgaagggaaggtcaaggtgagcgagtggctcgccaagctaaataagatgggggccggggatgagctcaccgagcaacaggcaaggcagctcaacttcgatctggattcggcgtacagtgcgttcatggcatcactgcccagcaccggcctatgagcaagcctcatcctggttctgagttggtttcttctttttatttttctcatgtgtttttctatggatcaccgctgcagtgttatagccttataggtatgtgtaacttgaattgtgctatattatttgtcaataatagtgccaattttgtggt

SEQ ID NO: 1905 - DNA, 1086 bp, Oryza sativa
  ref <308>: DATABASE ACCESSION NUMBER: AK059871
  ref <309>: DATABASE ENTRY DATE: 2001-12-06
agtctgcacacacgatcgagaaacacaattgacagtacagaatttgtaagttgttgatttgcgccatgagaaggcttctcccgctcgccggcgccacgctgctgatcgcggcggccggcggcgccagcgggcagcaggcgggtgttgggtcgatcatcacgcgggcgatgttcgagtcgatgctgagccaccgtggggaccaaggttgccagggcgccttctacacctacgacgcgttcatcaaggccgccggagatttccctagattcggcacgaccggcaacgacgaaacgcgccggcgcgagctcgccgctttctttggccagacctcccacgaaactacaggtggatgggcaactgctcctgatggaccctttgcttggggatactgccgggtgaacgagatcacgccgtcggacccgccctactacggccgaggacccatacagcttactcataagtacaactaccagctagccggggacgcgttgggtctggacctggtgaacaaccccgacctggtgtcaagcgaccccgtggtggcgttcaggacggccatctggttctggatgacggcgcagtcacccaagccgtcgtgccacgacgtaatcaccaaccagtggacgccgtccggcgatgaccgtagctccgggaggctccccggctacggcatggccaccaacatcatcaacggcggtgaagagtgcggcaagggctactccaccgacaacgccaaggaccgggtcggctactacaagaggtactgcgacatgttccgcgtaggatacggagataacatagcctgcagggaccagaagccctacggaggaggttaagcactggagacgatcgactgggagtacgtcgtcataagcggattctcctagtgctagtacagctgctggttgcttgctaatggctagcttagccttcgcgtacatacgtatatgtacgtgatactagtacgaataaagctagcagagagcgttcgcggatatcatgtaacagatatgagtatatgacacatggtcgcttatctcacatgttattgtgaaataatattattactggtggaacgatgcccct

SEQ ID NO: 1906 - DNA, 1028 bp, Oryza sativa
  ref <308>: DATABASE ACCESSION NUMBER: AK059872
  ref <309>: DATABASE ENTRY DATE: 2001-12-06
atcctcaccaagcaaagtatagcagcaaacaaagccagcttgtcactgcgcttctttcctagtttccttctcaattctcattctcaaaagagaatatattgagctgatcgagctagatatatagaagcactagctagttgatcaacaatggagcacagcttcaaaaccatagcagctggagtggtgatcgtcgtgctgctcctgcagcaggcgcccgtgctgattcgggccaccgacgcggaccctctccaggacttctgcgtcgccgacctcgacagcaaggtcacggtgaacgggcacgcgtgcaagccggcgtcggccgccggcgacgagttcctcttctcctccaagattgccacgggcggcgacgtgaacgccaacccgaacggctccaacgtcacggagctcgacgtcgccgagtggcccggcgtcaacacgctcggcgtgtccatgaaccgcgtcgacttcgcgcccggtggcaccaacccgccgcacgtccacccgcgcgccaccgaggtcggcatcgtgctccgcggcgagctcctcgtcggcatcatcggcaccctcgacaccgggaacaggtactactccaaggtggtccgtgccggcgagacgttcgtcatcccgagggggctcatgcacttccagttcaacgttggcaagacggaggccaccatggtggtgtccttcaacagccagaaccccggcatcgtcttcgtcccgctcacattgttcggctccaacccgcccatcccgacgccggtgcttgtcaaggcactccgcgtggatgctggtgtagttgagctgctcaagtccaaattcaccggcgggtactaattaatccgagagcattttcatggtgttctctgctaccagcagcatactttaagctcccgttgtgtggttgcatgttattggattgaataaactttctcccatgttatgggaatggaaataaaatgtaatacttctttgtgatgttttttttctccttataatgaattaagaatcgtgtatcttttctgtgt

SEQ ID NO: 1907 - DNA, 1234 bp, Oryza sativa
  ref <308>: DATABASE ACCESSION NUMBER: AK059873
  ref <309>: DATABASE ENTRY DATE: 2001-12-06
gaagacgacgcggccgcgaccgcatcggattggatcggatatggagaggagggaggacgcgctcctcctcctcgctatccccatctcctcctctccccaacctctcccctccccgtggcctgactgaccccctcctgaattcctgatcccctcacaccaccacgcggccctcggtcttccctcctcctcgccctcgcctcccccgtctggatctagcctagccccccctcccctctcgccctcgtcctcctcacgagatggactacggcgacggggaggtgcggctggtgaggaggaaggggaagaagaggctcgctccgcctccgcctccgcctccggcggcggagaggggcgagagggacaggttggacgagctccggcgggactaccgcgatgtgctcaaggataatgagatgaagaggaggaagctagagagcataaacaagcgaaagctcgtcctgctttctgaagtcaagttcttacaaaagaagttaaattctttcaagaagaatgattcgcagcaagtacggctgaagaagaaagctccgcgagtcccatctcatgtgggaatcaatgatgcttcagctttttatggggcgagtactgaagtgccatctaccagtaaaagaacagatttagatttaaatcaagattctgcaatgaatgatgagctttctgatttcccggggcaccataaccatttggaacttaaaaaggctgaacaggctggagtagatgaagatattatgactgccgatgtcaacctatcagcttgtagggataccggaaactctccggcaagcgatgataagaggagtgtttcatggcaagaccgtgtagcgttgaaggtctagtccttccatagatgtggctatgaaataacatccttctcagatgattaactgcactctgcttatttttttctgaaatattttgcagtgctttgtatatcacaagagtcttagttagacatgccttaatgcaagctcgatctgatgatgtgatgttatgaaatatccacccagattttgaactgacgcacattgactgcatttgtctggattgtgttctgctgcatcctttggaaacatggtgacaaatcaatgttttttgtttgttgttaccatttacttctgaaatggcaactgcagcagactggcatcctggcattttgacatgtatatcatattgtaacatgtgaaatgaattatgaatatcaagcaagttgtattgt

SEQ ID NO: 1908 - DNA, 1045 bp, Oryza sativa
  ref <308>: DATABASE ACCESSION NUMBER: AK059874
  ref <309>: DATABASE ENTRY DATE: 2001-12-06
ctattctccgctcctcgcgtcgtcgtcctccgagagggggaggagaaggcgagaaggggctccggtggtgggagagggagaccgccattgccgctacttccgagttcagattggggaagatggttgtccaggagttcaccgttgatctgaacaagcctctcgttttccaggttggccatcttgaggaacgttatcaggaatgggttcatcaacctatcgtgagcaaggaaggtccacgctttttcggaaatgatgtcctggagttcttgacgcgcacaaagtggtttgctgtgccaaccatatggctgcctgtcgtctgctggttgcttgtgaaatctattcggatgggtcatactattcaggaagtaggtctaatggccctatttggaatattcatttggacattgatcgagtatactttgcaccgcttcctattccacattgagaccaaaacctattgggcaaacacagcacattaccttcttcatggatgccaccataagcatcctatggactcactcaggcttgtattcccccctactgcaacagcaattttgtgtgtgccgttctggaagctggtagcgttcttcgcaactccaactatcactcctgcgctatttggtggtggcctgttgggatatgtgatgtatgactgcactcactattacttgcaccatggacaaccatccaaagagccagcgaaaaatctcaagcggtatcacctcaaccaccacttcagaatccaaaacaaaggctttggcatcacctcatcactctgggattacgtttttgggacattgcctccgtcgaagaccaccggaaagaacaactgagccactgacagaaatgtattgttttgcatgagaaattttagaggatatgtaatatatatattaagtctaggcacaactgcttgttttgtctttctgggacaacaggttcacatgcccattcagttcgaattcctgtggtttactgatgactgccttgatgtgggtgaagaagacatttcattgccttgacatccaatgttctgaattcagat

SEQ ID NO: 1909 - DNA, 1064 bp, Oryza sativa
  ref <308>: DATABASE ACCESSION NUMBER: AK059875
  ref <309>: DATABASE ENTRY DATE: 2001-12-06
aagccaaatccacgcatcgacgcggcaggagcgggcggctgctgcgagatcggcggcgccgcagatctcgcgcccaccagcggagatgaagatcacggcgctcctcgtgctgaagccgtcgtcctccggcgggggagcatcctcgtccggcggcggcggcgggtcgggcggccccgaggcggtggtgctggcgaacgcgacggacgtgagccacttcgggttcttccagcggggcgccgcgcgggagttcatcgtcttcgtcgcgcgcaccgtcgcccagcgcacccagccaggccagcgccagtccgtccagcacgaagaatacaaggtccactcacacaacaggaatggtctttgcgcagttgcatttatggatgatcactatcctgtacgaagtgcattttctcttctgaataaggtacttgacgaataccagaaggctttcggggactcttggaaagctgctacaaaagatgcaacagatgctgcccaacagtggcctttcttgacagatgctttgacaaagtttcaggaccctgcagaggctgacaagttaatgaaaatccagagggacttggatgaaacaaaaattatcctacataaaactattgagagtgtgctccaaagaggggaaagattggatagcttggttgagaagagttcagacctgagtgctgcttcacagatgttctacaagcaggcaaagaaaacaaaccaatgctgtactatactctgaagtttggactttcctgtccttaagatgaagactccagaagccgaccgatactgtttagttctacagtaagatcaattgccgtgaatcgtgccaaagtaaaactgtcaaaactattattctttggtgatgaaggaaccttccagggtttatgttccagagcaactaacacattcattgaactgcatgtcccgccagcaatcgccaacatcttgtttccactggatagattgttgaattctcaaagcatgttggagtacacgctctgtttgctactcgtaatttatgttattgatatgattggtatttgatgtctctactatgactacag

SEQ ID NO: 1910 - DNA, 1134 bp, Oryza sativa
  ref <308>: DATABASE ACCESSION NUMBER: AK059876
  ref <309>: DATABASE ENTRY DATE: 2001-12-06
acgcgatgcggtggtggccggcgctgccgctgctcctcctcgccgtcgccgtcgccggtgccggcgacgcggctcccgtgtgcacgcggccgtccgcggctgaggcgatcgtgggatcccccgaggcgtgccgctcgccgctgcgccgcccgctcggcgtcaccgagggagatgatgctatcttagcgagggccgttaatctacttcatgcaaacaaggaggatttcgctgctgtgctcttctatgcttcctggtgcccattttcacaagaatgcagactacgctttgagaagttggcttgcatatttccaactattcgtcatcttgcaattgaagaatctacggtcaggttaaggacaagatatcggtatgggattcatggatacccaacgctgtttctcataaactcaacagtgcgagtgcggtatcatgggcctcgaactgtcaaatccttagctgccttctataatgatgtttcaggtattaatccatcaatggatccagccgttggagatgataacattgaacctaaaagggattgtgagcaggaaaagtgcctattctggtcggcgtgaacaccagagaatatacttcaaccagatacttatttaacattagcagcttcttttgtgatccttcgactgctctatcttttttatccgaagatcactgcctttgtgaagcggacatggagtaggcgtactctcttcacctgccttgagcaaggaaaacataaatttaacagggtatacccgtctaagcaagggaatttgcatgatggagcaaggcatgctactgcttgggcttccaaatcgttagcatctgtttcaatcggagagccaagcaccagttgattgaacaacaatacatgaagaacacgatttgtcaactgggacatgtagtagattggagtaatcagtaactgaacagaccatttgctgtggtcggctgcgcaaattactgtaactgcttcgttatgaagcacaccttttttcccctttccttacatcttctcatagctactcttataatagttaccgtccatttcgttttcttggaggtaataaagtatgtttcagacaagtgtactttgacactgcaaaatgatcataaaatgaaaagtgattttacatt

SEQ ID NO: 1911 - DNA, 1131 bp, Oryza sativa
  ref <308>: DATABASE ACCESSION NUMBER: AK059877
  ref <309>: DATABASE ENTRY DATE: 2001-12-06
attccagtaactttcctctcatctctcacagaaaaaacattcctctcatctccaatcagcagctatctcccttcctcatcaccagcttgctgtgatcttatcaggcctttttgttgttctgctggtcttgctcgcgtgcaaagagatgccggagcactctgagaatgcggctgcgaacattgtggacagcatagtggacgccattgccgacaatcttcccaagcagaagtcagtcagatttgaagatggctcaatctctgatcaagctaagagactcttcggtggtcagaagtctgtccatcatgttttgggtggtggaaaatccgccgacgtgttgttgtggaggaacaagaagatatcttcaagtgttcttgcagttgcaacggctgtctgggttttcttcgagtggctcgactaccacttcctgacgattgcttgctttgttcttgttcttggcatggttgtccagtttgcatggtccacttttgcaggcatgctaaatgggtcaccttcgaaagttcctcgcgtcgaattgccggatgagctgttcgcaaacattggttctgcaattggcacccaagtgaacaagttcttgggcactcttcaggatgtgtcttgtggaagagacctgaagaattttctcctggtgattgccgggttcttcgcggccgctatcattgggagctggtgcaatctcctcactgtcatttacattggatttgtgtgtgctcacactctcccggtgctgtatgagaagaaccaagaaaaagtggacgagttcctgtacaacacacttggcctgcttcagaatcagtatcagaaacttgacaagggtgtcctgggcaaggtgcccaaagggatcatcaagcttaagaagagcgattagtttcactagctgctgctgctgctaatgctgcgtacagtcaatcagaatactgcgtaatttggacagatgttagcttcccctgaacagttaattgtgtacagtattggaaaacaccgtgtcagtgatgctagtggtatactcctatattgtaggccaaattcatcagtggcagattgtttcagctagtctcatgtgttttgcccatgagagaaattgggaaaaaaaataaaaggtgatttgtgatt

SEQ ID NO: 1912 - DNA, 965 bp, Oryza sativa
  ref <308>: DATABASE ACCESSION NUMBER: AK059878
  ref <309>: DATABASE ENTRY DATE: 2001-12-06
tattctgcaatctttagccgcctcacgcggcatgagattattgattttgattcagatggccagatcaggtgttacccacatgtcattgttggtctcaggagccaccgagaccttggcatcgacccaagttcttctccccagaactatacaatggtagacttccggttgtttgtccgggaagcctatggactgcctgcagctgaagtggacataccctataaggctgacaaagatgaccctgacaagaagccccggataatgctgattgacaggggcaaatccaggagatttgtcaacgtggcacatgttgtacaagggctggattggtttggttttgaggtggtcaaggccgatccaaagatcgattctaaccttgatgaatttgttcgccttgttgactcctgcgatgcaatcatgggcgtgcatggtgcgggcttgactaacatggtgttcctgcggtccgggggagtggtggtgcacattgtgccatacgggatcaaattcatggctgatgggttctatggtgcacctgcacgggacatgggtctgagacatgtcgagtacagcatcagtccagaagagagcacactgctggagaaatacggttggaaccatactgttatcaatgatcctgaaaccatcaggaagggcggatgggagaaggttgcggagttctacatgtccaaacaggacattgtgctcaatatgacaaggtttggacctagcctgttgaatgcaatagagttcattatgtaagtttgtgaaatgaggtttttgtgtttgttttagctacagcattctacagtcacgaaaaaaatacacttttttgttggccataggtggaataggtattgttgttttagtgctgcttctgtataggattgtcggtgttagatttgaataaccatgatcaactgttacaggaaagatgacaataaacctgtgtgctgagttttcttagagcc

SEQ ID NO: 1913 - DNA, 1064 bp, Oryza sativa
  ref <308>: DATABASE ACCESSION NUMBER: AK059879
  ref <309>: DATABASE ENTRY DATE: 2001-12-06
atctcagtctcattgtgccttctttcttcttcttcttcttgagctgagcctcctcctaaggcctctcttgtatatacacattttgtatagatttttagagttatatcacagtctcatcagctcttgcaacttcccattgcaagagtttgattgattgattggttgatcagctggtgttccaaatggatccaatcagcatagagaagatcagggccatgagcaagtgcagcaactgcaagaggcagcatccgatgatcctccctgccctggcaatctccatggttgccacctttgttcttctcctgctggtgaccagccctgtctgggtcccaaggctgtgctcactcatggccttcttcttcctcaccaccctccctgaccttgccatggccttcctcctcagccccaagtgcctcttcgtcgtcggcaacctcatcgtcgccttcctcgtcggcgagtctaggctcgccccgaggggggagccggcgtcgtcgtcggtgaatgagatacatgacgaacatgttaagaggaacgccgcgataagcgcaaaggcggtgaccgcggttgtggccattgatcagaatgctcatgttggagaattgggggaagaagaggaagaagaagaggaggaagaggaagaagaagagggggaggaagaagagctgcaccagagagtagaggacttcattgcaagggtcaagaagcagaggagaatggaggacaagagcatgtttgacactgatcgatgacctgatgagttttaccttggatttggaagattcaaagaagggattattgcatccaaattaaggattcttgtgatgctttagtttttcatctatcatcttagggccagagttaagaagaagaagagttcacttcactggctcactgcactgtaggagattatgcatgcacccttttgattagagtgtgtctgatgatctgatccggtttagccatgcacaagaattaggcagagaaaaaaagagagacaaggaatgtgtgtgtgatcttttgaaaaagcagaaaaagaaaagtgatgcatgtgtctttctcttaac

SEQ ID NO: 1914 - DNA, 876 bp, Oryza sativa
  ref <308>: DATABASE ACCESSION NUMBER: AK059880
  ref <309>: DATABASE ENTRY DATE: 2001-12-06
aagaagcgagcagcagagctcagcgtttggagcgagatgatgagcagcagcagcagcttggtgtccgccatttctgcgtcaccgtctgccactgcaaaagctcgccttcgtcatgacgatgcagcaacagcaacaggagcagcagcagcagcagcagtagcagcgaggcagctaaagacggagcatggcggctgctgctgctgccggagcagaggccgggcggtggtggcgagggcggggcccgggccactgacggagatcgagcccgacctgaacgaggaccccattgataagtggcgcaccaacggcgtcagcccggacgacttcgagtatggagtgtatgatggtcaccacacatataatgaaacccaagataagaagggcttttgggaggatgtctctgagtggtaccaagaagctgaacctcctcagggcttccaagcactgatctcctggttgtttcctcctgcaatcatccttggcatggccttcaatgttccgggggagtacctctacatcggcgcagcagtgttcgtcgtcgtgttctgcgttatcgagatggacaaaccggacaagccacacaactttgagccggagatctacatgatggagagatcggctcgcgacaagctcatcgccgactacaacaccatggacatctgggacttcaacgagaagtacggcgagctctgggacttcaccgtcgacagaagagatgagattgtgaaatcgtcttagatatggtattcagaaatggggggtcacatttgttagatgcagctgcagaaacagttcagaaaatcagaaccactccaaagaaaagcagggtggcaaagctgcaagatgagtctcttcaaaataaagaactttgagatg

SEQ ID NO: 1915 - DNA, 959 bp, Oryza sativa
  ref <308>: DATABASE ACCESSION NUMBER: AK059881
  ref <309>: DATABASE ENTRY DATE: 2001-12-06
aaaaggaaaagagagagccctcctctcctctcctaccctcttcttcctcctcctcctcctcgcctcccaccaaaccctagcacgagcagcccaatccatctccagcctcacgagctccagttcggagcagcctcgcggtgggacgagtcgccagttggggagctcggaggaggtgaggccgtggttgggggttgggaaggggggaaggccaagaaatggcggagaaggaggagggcaaggtggcggcggagggtggggcggaggcggaggccgacgaggaggtggaggtcaagttccgcctcttcgacggctccgacatcgggcccctccgctgcaacgccgtcgccaccaccgtcgccgccctcaaggaccgcgtcgtcgccgactggcccaaagataaaacaattgtcccgaagactgctaatgatgtcaaactgataagtggaggaaaaattctagaaaacgacaagaacattgcgcagtgcagagcaccttttggtgatcttccgagcactgctatcacaatgcacgttgttgtgcagccatcatcagccaaatcaaaacctgacaagaagaccaacaagttgccaaagaccactcgctgctcatgtaccatactatgaaggttcagtgtcaactccatcgacaataatttgtatgtccgtgaaaattatgcagagagacaacgaatggagagaagattgaagaaaatctggtgccagaggagtccgatgtgttgtgagattgtattgtaattgtaagcttagatactacagagagttcgtccctctgcggctagggaaaaatagatgtcgttcggtcggttgcttgtctgttttacccaacaaaatgtttctatatgatgtacaatatacacatacatgctgttctggaggaagaagttggttgtttttccgtgtcaagttcagttcagttcagaattttgaggtttcttggtg

SEQ ID NO: 1916 - DNA, 988 bp, Oryza sativa
  ref <308>: DATABASE ACCESSION NUMBER: AK059882
  ref <309>: DATABASE ENTRY DATE: 2001-12-06
aaaaacaaaatacaaaccagaacagtctcaaagcttcgcccaagcagagaagaatggccgccggaggaggaggaggagacgagctgaagctgctcggattgtgggcgagcccgtacgtcctgcgagcgaaattcgcgctcagcttcaagggcctgagctacgagaacgtcgaggaggacctccacaacaagagtgagctgctcctgagctccaacccggtgcacaagaaggtgcccgtgctcatccacaacggcaagcccatctgcgagtcgcagatcatcgtggagtacgtcgacgaggcgttccctgacgccggcgagtcccttctcccctccgacccttacgaccgcgccgtcgctcgcttctgggccgcctacatcaatgacaagttcatgccggcgtggcagaaggcgtcgttgggcctcacggaggaggagaaggcggaggcggtgaagcagatgctcgccgcgatcgagaacctggagacggcgttcaaggagttgtccaaggggaagcccttcttcggcggcgacaccgccgggtacctcgacgtcacgctcggcgccgtggtcggctgggcgcgcgccggcgaggtcctgttcgggaggaagctcttcgacgccactaggagccctctcctggcggcgtggatggagcggttcgtcgcgctggacgctgtcaaggcggtgttgccggacaatgccgagctgatcgagtatggcaagatgaggatggcgcactacgccaagcttgctgccgccttggctgctgcgaacaagaagtgagccggcgaagcaaacctgtagttggtgtgtgtccgttctcgttgctcgtggtctcgtggaggatgaaagctggtgcaccatagtccttccacaccgtgaggttgagttgtgacttttttttttcttccagtgatccgttcgatcggatcgtcatgtgattctggcgcatttaactcaataaaagaaaggaagaagttcaaatt

SEQ ID NO: 1917 - DNA, 1009 bp, Oryza sativa
  ref <308>: DATABASE ACCESSION NUMBER: AK059883
  ref <309>: DATABASE ENTRY DATE: 2001-12-06
aggaagccgcacacgccatgggaggcgacacgcacggcagaagcagctgaacgcgatggagctcaacgcgatcatcgccggcggcaacatgatggccgacgacgacggcggcggcttcaccttcgccgaggtcccgccgctagccggcggccgctgcgtgggcccgccgctgtacccggtcttcggccggccgaggtcgccgccgccgacgccgccgccgcatcggcaggcgccggagaaggcctcgcgtctgccgctatggcggtttctgatggtggaccacggcccgccgccgccgccaccaccgacgacgcagccggcggcggacgacgacctcgacctcgacctcgacggggagccggcggagtcgacgttcctgtactgcccgctgtgtcccgcgttgccggtggcggcggcggcctccccggcgcggtgccggaagagcggctccactgggtcgtctctcctccggtggcgccagcgctccatcggccggagccacagcgacggcaaggagaagttcgtgttcttgaacgcgagctcctcctcctccggctccgagcacaagggcggcagaggcggcgaggtgggccatgacggtgccctgagctactacgccaacggcggcagcaggggcggcggcggcggcggcggtcgccggaggtcgttccttccctaccggcaggacatcgtcggacttttcgccaacgccaccgcgttccgccggagctatcacccgttctgacgtcgcgaacgtcttcgataccaatgttgctcgatcgattttattctcttctctctgcaggttaagtatgtacttaattacttgccacgataaattcgtgagcaggtttaattaaatttgtttgatgcgtgtggctgataagtttggctgcacgctttaatttgtttgtctgcggtaaatggtaattgtaacaatttattccaaaaaaatgttgagtgtaacagagcttgcataataagtatatattgtatacagagtttttat

SEQ ID NO: 1918 - DNA, 973 bp, Oryza sativa
  ref <308>: DATABASE ACCESSION NUMBER: AK059884
  ref <309>: DATABASE ENTRY DATE: 2001-12-06
agctatcagcttatcaccacacacagacacagaaggaaatgtcggcttctgcggcgcccacgcacatccgcttctcctccgccgcacctccatcggccgccgctctccggcggcctcgccgccggtgcgccacgcccgtccgatgctccctcgccgcagcgccgggtctccgggcgccgcctgagctcatcgactccatcctctccaaggtgaagggaactgaccgtggagttttgctgcccaaagatgggcatcaggaagttgctgatgtcgcactacagcttgccaagtactgcatagacgatcctgtcaagtctccactaatatttggagagtgggaggttgtgtactgctcagtaccgacatcaccgggagggctctaccggactcctctcggccgcctgatattcaaaaccgatgagatggctcaggtggtgcaagcgcctgatgttgtaaaaaacaaggtgtccttctctgtctttggtttcgatagtgcggtatctctgaaaggcaagctgaatgtgctggatggtaagtggattcaggtcatattcgagccaccagaagtgaaggtaggctccctggggtttcagtatggtggcgagagcgaagttaagctggagatcacctatgtcgacgagaagatcaggctgggaaaaggatcaagaggctcgctcttcgtcttcatgagacgatgatatgagggcagcaggcaatgtttgtaccatcatgtcctttgagaccacaagagggtagcaccatagcactgatgctacgacaatatgtttgtgtgtacaatactgtattctgttgtaaaattcagaggtcatgttggctagtagtgttcttcagacctccgaattagagattgtattgtcatttccaatcaaaatgacaaaatgtttgtagtttttgtgattaatgtgatggttaaattgtccagactaatgagcatggttatggatttttggtg

SEQ ID NO: 1919 - DNA, 851 bp, Oryza sativa
  ref <308>: DATABASE ACCESSION NUMBER: AK059885
  ref <309>: DATABASE ENTRY DATE: 2001-12-06
gagaagaacgagaggtgtacgtgtggtggtaggagagggaatccatccatggtgatggacgcagctagagcggtggcgatgccgtcgctgtcgccggccaccgtcgcggcgaggccgagcagccgccgccttcacaaggtcgccgccatggccacccagaagcccacctccggcacaagaagggggacgacggtgtacttcccggtgggggagccggggccgaggcagacgacgagcgggaaggcggcggcgccgccggtgaagctgctgacgaacgtggagaagctgcggctgctgacgaaggcggagaaggcggggctcctgtcggcggcggagcgcgccgggctgtcgctgtcggcggtggagcggctgggcctgttgtccaaggcggaggagctggaggtgctgtcggcggcgaccgacccgggcacccccggcgcgctgctcggcgtcgcgctgctgctgctcgccgccggccccgccgtcgtctacctcgtcccggaggagtacccatgggaggtcgccgtccaggccgtggtcgcgctcgcctgcgtcgtcggtggctccaccgccttcgccgcctccagcttcgtgtccaagctccagagctcgtccagctgaagcgattacatgctcactgccttagctttgagtgattaattaccacttaatttgcaattagtgtgtaattaagcagagtatttagtgtgtatatcaattactgtgcccctaccctacgccttgattttgtacgagagcattggtgtacctgcaaaaattgtataaaacctagtattatctgataattgtatctaaatggcttggcaaggttaatttacctagctgatgtt

SEQ ID NO: 1920 - DNA, 1123 bp, Oryza sativa
  ref <308>: DATABASE ACCESSION NUMBER: AK104148
  ref <309>: DATABASE ENTRY DATE: 2002-08-28
ctgattcatctcgccgagctctcctcgtcgcctcctccgtctctctataaataaggcgccccacggcgcctatcgattcgcgtcgccgcttcctgcagaggccgagaattattctcctgcgcccgccgcaaaaaccctagccacgccgatctcatggcggctaccatcagccaggcgagcctcctcctgcagaagcagctgaaagatctcgcgaagcaccccgtggatgggttctcggctgggttagtcgacgacagcaacgtcttcgagtggcaggtcacaatcatcggcccgcctgacaccctatatgatggaggttactttaatgcaataatgagctttccacagaattatcctaacagtcctccaactgtcagatttacctcagaaatgtggcatccaaatgtttatccggatggacgtgtatgcatttctattcttcatccgcctggtgatgatcccaatggttatgagcttgcgagtgagcgttggacaccagtgcatacggttgagagcatagttctgagcatcatttcgatgctttctggtccaaatgatgaatcaccagcaaatattgaagcagctaaggaatggagagagaagagggatgacttcaagaaaaaggttaggcgccttgtaaggaaatcacaagaaatgctctgaagaaaccggcagtactggggaaagttaaccataccacgtcacatgtgcatgatttggctgtcgatttccaaatgtcagttgacactagcaattcacttctccccctctgtacttcccatagtgtgcctggtggtggtcgcggtttcgtctcccaggaaggctgaatagcactgggacatgtttgtcacctattctaaagctctggttgtatttgtgtggcttgggctgtaaacgttgagaaactttgaaatactgccactcatcacaattttcgtaacaaacgtcatataagcaggcacctgcctgatctgctagctgttgaacgttgaaacacaatgtctgcaaactggtttcagtccgttctttgtaatatgttcttataaatggagcaatactcggtgctgtacaaaaatacttgctggagtttactcattcatcagttataaatctatattggctt

SEQ ID NO: 1921 - DNA, 993 bp, Oryza sativa
  ref <308>: DATABASE ACCESSION NUMBER: AK059886
  ref <309>: DATABASE ENTRY DATE: 2001-12-06
atttcaaatttcaaatccatccttcgtctcctctcctctcctcctccccttccaccccacgcgccccgcacccacccacgcgccgcgccctaaccctaaccctaaccctaaccttactcctctcgctcgccatgtccgagcccgcgtcgcccccaccggccatgcccgaggacgccgcgccgccgcagccgcagccggagccggcggttccagcgggggaggaggccgccccgtctctggagaggaaggaggagttgctgccggtggaggagaagatctcggaattagatgaatcacagtcacagcttatggggagacttcggggactcaaggaggatttgctgaattggaggagcagtttagatacacaagtgacaaaatacaaaagcgaactctctgatatcaaaactgcgctgaatagcgaaattgaacagctgagatcagattttcaagaattgaggaccacccttaagaagcagcaggaagatgtatcaaatagtttgaagaatttggggctacaagatgctactgacaatgatgggaacaaaggaagtggtgaggagaatgcaagtgagggtgtctcagataccctagggaacctgaaattggatgatactccaaaaaaccatgatgaaagcagtgatgccaatgatgaaaagaatgaaaccattgctgaagatggcacggtcgataaaactgttaaggctgagagtgcaagtgatgaatgaagtagcggaggaaccagaagtagaacttgggccgcttctttttcgtggctcagctgtagtaatttttagaacagagataactttggttcctgaaacgagtccacgctctctgatggcttcgtcgtgtagtgttgttaatcgctgtcatgacttgtgaaatcccagttctctggaatggccgtagtaacaattttattgctatcagcaagttatctaaagaatagccactggaattttgcctttaaaaattccagatatttttctc

SEQ ID NO: 1922 - DNA, 1250 bp, Oryza sativa
  ref <308>: DATABASE ACCESSION NUMBER: AK059887
  ref <309>: DATABASE ENTRY DATE: 2001-12-06
tctcgattcttctccactcgagcagaagaccggaatcagctcccgtaccctgtttgttacccatggaagcgaaaattcccctccttactcctcacaccatggggagattccacctcgcccacagggttgtccatgcgccgctgaccagatcgaggtgctacaataatcttcctcaagaacatgttcagctgtactactcgcagagggccacaaatggcggccttctgatcgctgaagccaccggggtctcggagactgctcaagggtatccaaacacaccgggtatatggacaaaggagcaggtggaagcttggaggacggttgtggatgcagtgcatcagaagggtggtgttttcttctgccaaatctggcatgtagggagggcatctaccaatgattatcagcccaatggacaaacaccaattccttgtacagacaagaaaatcactcctacagttctcaaagatggaactgtcgaggaattctctgccccaaggaggctaagagaagatgagatcccccaaattgttgatgatttccgaattgctgctaggaattgcattgaagcaggctttgacggagttgaaatccactgcgcatttgggtacctaattgaacagttcatgaaagatggtgtcaacgacagaactgacaagtacggaggaagcatcgcaaaccgttgccgctttgctctagaggtaatccaagcagccatcgatgagatcggatcggacagagtaggtgtccgtctctcgccatactcaaactgcctggactgttgggactcagacccagatgcacttggcctctacatgatccaagccatgagcaagctgggcgttctctactgcagcatggttgagcctgaggtggtcaaagtagacggcaaggtgcagattccttacaagctatggcacttcaggaaagtgtttgctggcactttcatcgtcgctggaggatacaacagagaagaaggcaatagagcagtgtctcagggttacacagacctggtagcatatggtaaatggttcttggcaaacccggatctgcctaggcggtttgagctgaatgcgcctctgaacaagtatgacagatcgacgttctacacttctgatccagttatcgggtacaccgattacccttttctcagtcctctgtgagtattgcatttgttttaattaagcgagaaattgcaatccattcctcagagctcttgacttggaatcacaataaaattaaattgatttggt

SEQ ID NO: 1923 - DNA, 938 bp, Oryza sativa
  ref <308>: DATABASE ACCESSION NUMBER: AK059888
  ref <309>: DATABASE ENTRY DATE: 2001-12-06
aaaatccttcctacttttacgacacctccccaccccccgtctccttctccctcgtctccagatccgtgggtcgaagcagcggcggcgcccgatccacggcggtcactccctccgccatgaatcccgagtacgactaccttttcaaacttctcctcattggtgattctggtgttgggaaatcgtgcttgcttctcagatttgcggatgactcatacctggacagctatatcagcacaattggagttgattttaaaatacggacagtagagcaggatgggaagaccatcaagcttcaaatctgggatactgctggacaagaacgtttcaggacgattacaagcagctattaccggggagctcatggaataattattgtatacgatgtgacagaccaagaaagcttcaacaatgtgaagcagtggttgaatgaaattgatcgttatgcaagtgacaatgtaaacaagctccttgttgggaacaagagcgacctaactgccaacaaagttgtgtcatctgaaacagctaaggcgtttgctgatgagatgggcatccccttcatggagacaagtgccaagaacgccactaatgtggagcaggccttcatggctatggccgcatccatcaaggacaggatggctagccaaccggccgcttcaaatgcaaggccaccgaccgtgcagatccgcgggcaacctgtcaaccagaagacgtcgtgctgctcgtcctaaagataaccaagtctttccttccatgtaaaattcgacgtatgttactactgtttgctcactacaacgtatttgtgatattcatttgaacgcccttgataccatcttttctttaatcagatggttaggcagctgcaaatatatatgtaaccttgctttgttgctctttgctcacgaatcgagaggagcaagcagaaccagtgtatttgattc

SEQ ID NO: 1924 - DNA, 918 bp, Oryza sativa
  ref <308>: DATABASE ACCESSION NUMBER: AK059889
  ref <309>: DATABASE ENTRY DATE: 2001-12-06
gtgctcagtaaacaaactcccaccgtgttcttcctcctcccagatctaagatccgtggaccgaccgagctcgagctccaccacctcgtctccaatggcggtcaaggtctacgtcgtgtattactctatgtatggtcatgtcgccaaactagctgaggagatcaagaaaggtgcttcatctgtcgaaggcgtggaagttaaaatatggcaggtccctgaaaccctctcagaggaggtgctgggcaagatgggcgcgccgccgaggagcgacgcgccggtgatcgcgccgcaggagctcgcggaggccgacggcgtcctgttcgggttcccgacgaggttcggcatgatggcggcgcagatgaaggcgttcttcgacgccaccggcggcctgtggcgcgagcagagcctcgccggcaagcccgcgggcgtcttcttcagcaccggcacccagggcggcggccaggagacgacgccgctcacggcggtgacgcagctggcgcaccacggcatggtgttcgtcccggtcggctacacgttcggcgccaagatgttcgacatggcggcggtgcacggcggcagcccgtacggcgccggcacgttcgccggcgacgggtcgaggtggccgtcggaggcggagctggagcacgccttccaccagggcaagtacttcgctggcatcgccaagaagctcaagggcgcctcctccgcctgaatcatatacagaattgttacagagatcattcgcattggctgcctgtgctgatttgatccgtgttcatatgccggaattaatctttaccgattcgttacacaaagatttggttggatttggttgtgggtttgattctacgtactgtgcttgtataaacttgttaagttgattgtgcactcccatcgatattataccatcatataatct

SEQ ID NO: 1925 - DNA, 990 bp, Oryza sativa
  ref <308>: DATABASE ACCESSION NUMBER: AK059890
  ref <309>: DATABASE ENTRY DATE: 2001-12-06
cgcaaacccactccgatcgcaaatactctctctcgccgatagcagcagcagcagcaatggccgccctcgccgccgcatccaccgccttcgccgccaagccgcgcctggcgcgcgcgccgtcgtccccggccgcgcggttctccgtgtcgtgctccgcgtcgggcaacaacggcggcgccggcgagatggcgcagtcgctggcggcgtcggccaagacgttctccgcggcgctggcgctgtcctcggtgctgctctcctcggcggcgacgtcgccgccccccgccgccgccgacatcgccgggctgacgccgtgcaaggagtccaaggcgttcgcgaagcgggagaagcagtccatcaagaagctccagtcgtcgctcaagaagtacgcgccggactccgcgccggcgctcgccatcaacgccaccatcgagaagacgaagcgccgcttcgagaactacggcaagttcggcctgctctgcggcgccgacggcctcccgcacctcatcgtcagcggcgaccagcggcactggggcgagttcatcaccccgggcttgctcttcctctacatcgccggctggatcggctgggtcggcaggagctacctcatcgccatcagcggcgagaagaagccggccatgagggagatcatcatcgacgtcgagctcgccgtcaagctcctcccgagggggttcatctggcccgtcgccgcctaccgtgagctcatcaccggcaacctcgtcgtcgacgacgctgacatcggctactgatcaccacatggatgcttggctactcaagccccaggtgagttgatttggcagtggaggaagagggctcgtgcatggtgatttgtgtggtttgggtgtagaagctgataggatcatggaggaatggaagatctgttgtacttaagaaaaactaagtcttgtataccgtacctctctcttgtgtgtatttaccatcttaagattcttgagaacaattccttcgtgc

SEQ ID NO: 1926 - DNA, 1348 bp, Oryza sativa
  ref <308>: DATABASE ACCESSION NUMBER: AK104149
  ref <309>: DATABASE ENTRY DATE: 2002-08-28
cgccgccgcctctctccgtctgaaaacacccaaaaacccaaccaaaccctagatccgccgcctccccgctcctccgtctccgactccggcgacgcccgcgcggccacgatgccgaacctcgagtgccggatgtacgagccgcggttcccggaggtggacgcggcggtgatgatccaggtgaagcacatcgccgacatgggcgcctacgtctccctcctcgagtacaacaacatcgagggcatgatcctcttctccgagctctcccgccgccgcatccgctccatctcctccctcatcaaggtcggccgccaggagcccgccatcgtgctccgcgtcgaccgcgacaagggctacatcgacctctccaagcgcagggtctccgaggaggaggcgcacgcctgcgaggacaggtacaacaagtccaagctcgtccactcgatcatgcgccacgtcgccgagaccctcgggatcgacctcgagccgctctaccagcgcatcggatggccgctgtaccgcaagtacggccatgccttcgaggccttcaagctcatcgtcgccgaccccgatgccatcctcgactcactcacctacgaggagaaggagaccggcgctgacggacaggaggtgactaaggtggtgcctgctgtcacccctgaggttaaggatgccctagttaagaatataaggaggaggatgacaccacagccacttaagatccgtgctgatgttgagatgaaatgtttccaatttgatggggtgcttcacattaagcaagccatgaggaaggctgaagctgctggtaatgataattgtccagtgaagattaagctagttgcacctccactttatgtgctgaccacacaaactcttgacaaggaccaaggcatttcagttctcactgatgcaattaaagcttgcacagctgagatcgagaagcacaagggaaagttgatagttaaggaagcaccgagagctgtgagtgagagagaagataaactgttcaatgagcacatagaaacccttaacgagcaaaatgcggaggttgatggtgatgctgacagtgaagaggaggaagatacaggaatgggtgacatcgaccttacaaattccggtgtcaacgcggattaaagttccgctatttgatttggatgagttttgttgtatagcaccagccaatcttaagtcgtcctatttgaaaagagttcgttaggttctggtggctgtgacccctttgaattcactgatgcgcgttgtctggggtgtttgcgttttggggttgaggtcgtgttggagaattgctcgagtagcatctaattttttcttgggatcgaaacataattctgttgct

SEQ ID NO: 1927 - DNA, 931 bp, Oryza sativa
  ref <308>: DATABASE ACCESSION NUMBER: AK059891
  ref <309>: DATABASE ENTRY DATE: 2001-12-06
actttgttccccaccacagcaagcgcaacgcgcaaagaggcagacgcgcagctgaggaggagaagcgcacgcagccaccgcgagatctcctcacctccatctccatctccatctccatctccggcggcgagatccccaccgaatcggatcggatcggatcatgggggggaaggagctgagcgaggagcaggtggcgtcgatgcgggaggcgttctccctcttcgacaccgacggcgacggccggatcgcgccgtcggagctcggcgtcctgatgcgctccctcggcgggaaccccacccaggcgcagctccgcgacatcgccgcgcaggagaagctcaccgcgcccttcgacttcccgcgcttcctcgacctcatgcgcgcccacctccgccccgagcccttcgaccgcccgctccgcgacgccttccgcgtcctcgacaaggacgcctccggcaccgtctccgtcgccgatctccgccacgtcctcacctccatcggcgagaagctcgagccccacgagttcgacgagtggatccgcgaggtcgacgtcgcccccgacggcaccatccgctacgacgacttcatccgccgcatcgtcgccaaataatttgtcatttctggttttctcccctctctccctctctctccccctctcaggatccacagtttgacacataataactctctcttgcttgtcgtttccttacctatcatgtgatctctcctgatttgtgctttgtttgctctctattttgtgttttcattccggtgtgatttggacaacctagggtttggataatggtgtgattaatcgattgatggatggatctgattaatgatgctttgcgtttcgctctgttcaatactgcaatgtaaattgtggatctatctatcattcaaaatatgtggatctggcttattatcggaaaag

SEQ ID NO: 1928 - DNA, 1217 bp, Oryza sativa
  ref <308>: DATABASE ACCESSION NUMBER: AK104150
  ref <309>: DATABASE ENTRY DATE: 2002-08-28
ctacatacagtgatgtattcactgcgacaatattagatgtggagaaatgtaaagagttaaagatgggctcctacttgggagttgctgcagcttctgcgaatcctccccacttcatccacttgtgctacaaaccacctggtgggaatgccaagagaaagctggccattgttgggaagggtctaacttttgacagtggtggctacaacattaagactggaccaggctgcagtattgagctgatgaagtttgacatgggaggctctgcagcagtttttggtgcagcaaaagctttgggccaaatcaagccccctggagtagaggttcattttattgttgctgcttgtgaaaacatgattagtggcacaggcatgagacctggtgacattgtgactgcttctaacgggaagactattgaggtaaataacactgatgcggagggaaggcttacacttgctgatgctttggtgtacgcttgtaatcaaggtgttgacaagattattgatctggcaacacttactggtgcatgtgtcgttgcacttgggcctagcattgctggaattttcacgccaagtgatgaactagctaaggaagttgctgcggcatctgagatatcaggagagaagttctggagaatgccactcgaggaaagctactgggagtcgatgaagtctggtgttgctgacatggttaacaccggtggccggcagggtggttctattactgctgcactcttcctgaaacagtttgtggatgagaaggtgcagtggatgcacattgacatggccgggccagtgtggaacgacaagaagcgggcggccaccggattcggcgtctccaccctggttgagtgggttctcaagaactcatcttaaatcatttattcccttgcattctcatccccctgaggatgagatgacacgaggatttcggaggagtttggtggtggcaaagcggccagctagggccaatgatatacaaaagtttagtgggcaatttagaataagaaaactggtcatcgtcgtttccttttcagttggggtgtcgaattgtttggtgaaatcatcatcatcatcatcatcacattcacaagatgttttggccaggacaagtctgttcgtgccgtgtagctctctcccttttctcttttgtcaaatgtggaataacgctcttccttttgatttgtgccccgggataatctgagtcataaatatttcgac

SEQ ID NO: 1929 - DNA, 927 bp, Oryza sativa
  ref <308>: DATABASE ACCESSION NUMBER: AK059892
  ref <309>: DATABASE ENTRY DATE: 2001-12-06
agtggggctactattgtggatcagccagtttgtatagctcgctggggacagcctaatgaaccatacaatttctgggacacaccaaattggtatacagaggaggaaattgaatacaggacctatcaaacatgccagttcaattccactccacaagaagctttgacgattgctcaggatgttgtgaagacaatgctagcaaggggatacgtactcagcaaggatgcactggccagggctagagcctttgatgagtcccatcaggtaacagcgactgccgcagccaaggctgcggagctgagcaagaggattggcctaaccgacagggtcagcggcctaaccgacagggtcagcgccggtgttggtgcaatcagatcggtggatgagacataccacgtatccgagacgaccaagaccgtcgccaccgccacaggaagaacagcagttaaggttgtgaatggcatcatgaccagcagctatttctctgcaggagctatgatgctgtctgatgctctccatagggcagcacaggcagcagctgatttggctgctcatggtagacacaattaagtgaaaataaacacccggtacatatattgtcagttattcagacatcaggatgaacacccaaatatggagtacttgacatgatgccgttccaagtatgataataacggtgaaaccggtaacaactgtacctacaaagactgaaggaaatgtgtgcagaacaatgtaaagtatttcaaaccgagtcaagtgatcgtgcagtcatgtttaacagtttctgctcgttttatattcatgctgatagcatccttcattcttattcttttaggccttatcctgcagaactattgatcttcccacgtcgaatgctggaacataaaaataaattctgcctttgaatggcaacgataaaatattgagctg

SEQ ID NO: 1930 - DNA, 1312 bp, Oryza sativa
  ref <308>: DATABASE ACCESSION NUMBER: AK059893
  ref <309>: DATABASE ENTRY DATE: 2001-12-06
atcgacagccgaaaggtcttgcacccaaaagcgcacgttcctaaatcacgcgccaactgctcgaacacaaactaggaagaagggaccaagcaacaatttgtttattccatctgatgactgcctctcctatatctaaggagagctagctgttcatcagctgagactcccatcatctcgcaaaactacaagcagctcacctcgcaaattaactgtcggccatggcggctgctggtgaagcttcaggaggcagggacaagtaccggtcgttcatgtacggcgagggagagaaggacaccgtgtggaggcttggatcccctccaaactacgacgtcgtcaacaagctcttcgaggaagagagaaccaaggaatggccagaggggtctctggaggagaaggtccagaggttgctgaagacctgggagatggagctcatccacaaggtgcgacccgaggaccagaagagcgtccactcgcagaaattctgcgcgagcaccaacgggatgagatttctgagccggaaggaggtgatggctatcggcggctacaacgcgttcctgcagacgaaactgccgccggagcaccgcatctatgacccggacaatgagacgctggagtccggcatggccacgttcttgacggcgttcccgcgtggctttgccatcgaggtgctcgacgtctacagtggtccaccacggatcgtcttcaagttccgacactgggggtacatggaggggcccttcaaggagcatcccccccatggcaagcgggtcgagttctttggcatctgcatcttccatgtcgacgaggagatgaaggtggagaagacggagtacttctacgagcgcggcaatttcctcgcgagcttcttgagcacgcctgctgctgctgctgctgctgaggctgcgtcaggctcaggatgccctgtcatgggaggaaactgaagcaatgggtaaccaacacagcatgtcacccattcaaatgtcctactccagattaccaacagatctgcacctgcttttttattccaagctatatactgtagtaaataaacagtcttgtttgtatggtacaaagcacaaacaccacttgtggtgggtacctttaggatagttctacttgctcttttggcatagaagaactaagctacacggccatgatttaatcatcaaagtagttataagtagaagtctgacgaataaaagttcaaacttcttatttcgagcaaaatatcctcctccacctccattgttgtatggagtatgcatacaatctttaccagattttatcagagcaccgtggttgatagctgcgc

SEQ ID NO: 1931 - DNA, 1127 bp, Oryza sativa
  ref <308>: DATABASE ACCESSION NUMBER: AK059894
  ref <309>: DATABASE ENTRY DATE: 2001-12-06
ccttcggccctggaggcggtgggtaggacgttgacaggtgctggagcggcggcggcggcgagcgggtgagggccagagcggcagcggagggtgtgtcggccgattccccttccctttcttggctcgccgaaatccctaatccccatgccgcatttcacctcttcccgcgcacaacctccgcatcgcacgcggccggcctctgcacgttcggcgaaggcggatacagccggagcacctcgtttagcatgcaccccatcttggtgagctttcccatcgccgccgcgtccatggggccagaccaaccggtcacctcctccacctcctcccgcaccgccgcccgccactccgggtgcgtcgccagcatcagtagcgtccacgacagcgccagcgccgtcgtaagcttcctctctgcggcggcgctcgcctcgttcccggccagcagcagccacaacaggtccgtcgtcgtcgtcttcctgccgccgccttcacaccgccgccgcgactcgatgatgtcgagcaggagcgcgtcgatcttgcggcccagcttccacgcctcgtaggtggcgcggtccgcgcggatatggaggaggctggcgagcgggacgctgacgagacgcacgcgtggagcggaacagcatcgcctgcagctttgtggaagaccgtggcgtcgtcggcggcgatgctgaagctggccttggcgatgatctcggcggcgttccggacaacgcccttctcgatgtcgatgcagctgtgtcccaacgccactatgtcgctccactcgccgagcatcttcgacgtcgtctcctccatcacgccgatcatgtcctgcatcatcaacaacaggttggtggcggagaaggcaggggcgacgatgcagcggtggcgagcccactcgtcgccctcggccatgacgcggcctctcccgaacatgggcatgcggttgagcagttacgatatagtgtgccaattggcacacctacattttagtcatgtatgttgtttagtttaatttttaatttttcgatagccaaatattaactatttagcgactttattgtctggtgtccgaagaagaatatatgtaaatgacattaccataataaatgttgaatgcttcatcaaatttt

SEQ ID NO: 1932 - DNA, 1191 bp, Oryza sativa
  ref <308>: DATABASE ACCESSION NUMBER: AK059895
  ref <309>: DATABASE ENTRY DATE: 2001-12-06
atgcgtaatacaacttactatttccgtaaccatggataaggcctacattgccgtcttctccattgccatcctcttcttgctcgtcgactacttccgctgtcgccgccgccgcggcagcggcagcaacaatggcgaaaacaaggggatgttgcagctgcctccgagccctccagccatcccgttcttcggccacctccacctcatcgacaagccgttgcacgccgcgctgtcccgcctcgccgagcgccacggcccggtgttctcgctgcgcctcggctcgcgcaacgccgtcgtggtgtcgtcgccggagtgcgccagggagtgcttcacggacaacgatgtgtgcttcgccaaccgcccgcagttcccctcgcagatgcccgcgacgttctacggtgccgggttcggcttcgccaactacggcgcgcactggcgcaacctccgccgcatcgccaccgtgcacctcctctccgcgcaccgcgtcaggggcatggccggcgtcgtctccggcgagatccgccccatggtgcagaggatgtaccgcgccgccgccgccgccggcgtcggcgttgcgcgcgtccagctgaagcggaggctgttcgagctctcgctcagcgtcctcatggaagccatagcgcagaccaagacgacgcggccagaggcggacgacgcggacacggacatgtccgtggaggcccaggagttcaagaatgtcctcgacgagctcaacccgcttctcggcgcggccaacctgtgggattacttgccggcgctccgggtgttcgacgtgctcggcgtgaagaggaagatcgcgacgctggccaacaggagggacgcgttcgtgcgccggctgatcgacgcggagcggcagaggatggacaacggtgtcgacggcggcgatgatggcgagaagaagagcgtgatctccgtgctgcttagtctgcaaaagactgagccagaggtctacaaggatatagtgatcgtgaatctttgtgcggtgagtgagtacgtactttcgccaggtttcaaatcatctcaccttttctttttactcccttcgatcacaaattgaaatacttgaaagttttagatatgaaccaattaaacttacgtaacttttgactattgatgaattttgaacgcttaatttgaaatcatgcataaagaagatatgtatacgtgttctttttg

SEQ ID NO: 1933 - DNA, 1076 bp, Oryza sativa
  ref <308>: DATABASE ACCESSION NUMBER: AK104151
  ref <309>: DATABASE ENTRY DATE: 2002-08-28
atgcgcgagcgcgacccctccccctcgaaccgccgcgaccttctcgatgcttcccaaatcctcctcctcgtgaactcgtcgccttcgtcttcgtctcgatctccatggcggactcgagcgcggcccgccccaccgtcctcgtcaccggcgccggcggccgcacaggaaacattgtctacaacaagctcaaggaaaggtctgaccagtttgttgtgagaggtttagtgagaacagaggaaagcaaacaaaagattggtggaggcaatgatgtttacattgccgacataagggacagagatcatcttgtgcctgctgttcaaggtgtcgatgcgctcataatcctcacgagtgctgtgccaaagatgaaacctggttttgaccctagcaaaggtgggaggcctgagttttactatgaagatggaatgtatcctgagcaggtggattggattggccaaaagaatcagattgacactgccaaagctgctggagtgaagcatatcgtgcttgtgggatccatgggaggaacaaatcctaaccatccactgaacagcctaggcaatggcaatatactggtttggaagcgcaagtcagaacagtatttggcagacagtggagtcccttatacaataataaggcctggtggtctgcaagacaaagacgggggagtgagggagttgattgttggcaatgacgatgaacttctccagacagacacgaagtcaattccaagagctgatgttgctgaagtttgtgttcaggccctgcagtatgaagagacaaagttcaaggcatttgatttggcttcaaagcctgaaggcacaggcacaccaacaaaagacttcaaatcgttgttctcccaggttacagcccgattttgagccatcttgaggagcaatctcatctcggtttccttgtgtattggatatttggatgtatatcttcgtggttagtgaggtgtgaagttgtagtttgctgtaattcgtcatcgtttcctgaaaactcctattgaaatcagtgaattgttcagacaagacacaaattgatattattcaaggacatgatgtctttttaaaatg

SEQ ID NO: 1934 - DNA, 977 bp, Oryza sativa
  ref <308>: DATABASE ACCESSION NUMBER: AK059896
  ref <309>: DATABASE ENTRY DATE: 2001-12-06
tcgtgatttcccccttccgctcgctcgcgccgctccctaccggccaccaccgcgcgcgggacaagcaacctagctgctccggctgccaagccatcgccatggctccgtgccccgccgcgaccacaactcgcattggggcgccgccgttcgccgcgacgacggctcgccgacccgcccggggcgcgacgacgacgacgaaggcgcgggcgtccgggctgcggcaggtggagggccccgtgtcggagagggcgtactcgtcctcctcgcccgctcccacccacaaggtcaccgtccacgaccgccagagaggtgtcgtccacgagttcgtcgtcccacaggaccagtacattctgcacaccgcggaggcgcaggacatcacgctgcccttcgcgtgccgccatggttgctgtactagctgtgcggttcggataaagtcaggacaaataagacaacctgaagcacttggaatatctgctgaactaaaagataagggctatgcattgttgtgtgttggttttccaacttctgatgttgaagttgaaacacaagatgaagatgaggtctactggctccagtttggaagatatttcgcacgaggacctgttgaaagggatgattatgcactggagcttgcaatgggtgatgagtgagccgtgtctaaagagtggtgtttgcagtcgggagctcatgttgtcttaaggactttctttgaaagtggagaaaggggcttttttcctcagctcacaattttccatcttcagtgctgttactctgttagcgattgtttggcatgtaaaaaagtgtgctttcttgtaaaaataccattttctagttcgcacctgacagacgaagaacaccatggattacatgtaaagttgtaaactgaacacctaatcttgagtgcgaataatgaataatgatcaccggagttatgagtttgggaatgatatgctgccatgaaaaccttgaattgagtg

SEQ ID NO: 1935 - DNA, 1205 bp, Oryza sativa
  ref <308>: DATABASE ACCESSION NUMBER: AK059897
  ref <309>: DATABASE ENTRY DATE: 2001-12-06
ctaaacgatgctagtactaggcaagtagagtagcagccaaagcggacaccgctaccacctccactacccaccttccttccttcctgaggatctccgcttgaagagaagagaaccccaaccctaaccctaactccaatggcgttcgccccgcgcctcctcctaccttcccggtgccccccgccggcctcctcccccgcgcgccacggcggccgcaccgcgcctgagctgtccggtcccaccccgcgcgtggtggtggtcacctccggcaagggcggcgtgggtaagaccaccaccacggccaatctcgccgcctccctcgcacgcctctccctctccgccgtcgccgtcgacgccgacgcgggcctgcgcaatctggacctcctcctcggcctcgagaaccgcgtccacctcaccgccgccgacgtgctcgctggggactgccgcctcgaccaggccctcgtccgccaccgcgcgctccatgacctgcagctgctctgcctctccaagccccgctccaagctgcccctcgccttcggctccaagaccctcacctgggtcgctgacgcgcttcgccgcgccgccaacccacccgctttcatcctcatcgactgccctgcaggtgttgatgcagggtttgtcactgctattgcccctgcagaagaggccgtgcttgttactacccctgacattacggctctccgtgatgctgaccgtgttgcagggctattggagtgtgacggcatcaaagacattaagattattgtcaaccgagtacgcccagacctggtgaagggagaggatatgatgtcagcacttgatgttcaagaaatgcttggcttgcctttgctaggtgttgtgccagaggacgcggaggtgatccggagtacaaatagaggtgtgccgttggttctgaacgacccacccacaccagctggtcttgctctggagcaggcgacttggcggttggtggaaagagatgcaatgacagcagttatggtagaggagcaggagaggcccaagaagaaagctgggttcttttcattctttggtgggtaatttgctgtgagattaatgagctcagtgtaggcagtgtgtacagatttgcgttttggagctacgattgtttttcccatttcttttgctttgttatagtgtagaatgattcatccgttgtgcttaaatccatagactggagtattttgcct

SEQ ID NO: 1936 - DNA, 1432 bp, Oryza sativa
  ref <308>: DATABASE ACCESSION NUMBER: AK059898
  ref <309>: DATABASE ENTRY DATE: 2001-12-06
acaaaccacccttcttcttcttcttcttcggcggcggcggcggcggcgatggcgaggccgaggaggcgaggaggcgccggcgcgtgggtggcggcggttcttgctgcggcgctgcaggttcttgcggtgtccgccgcggggaagtacagggcggtgttcaatttcggggactcgctggtggacgccggcaacctggtcacggacggcatcccggactacctcgccaccgcgcgcccgccctacggccagacctacttcggctaccccaccggccgctgctccgacggccgcctcgtcgtcgacttcatcgcgcaagagttcggcctgccgctgctgcccccttccaaggccaagaacgccagcttcgcgcggggcgccaacttcgccatcaccggcgccaccgcgctcgacaccgacttcttcgagaggcgcggcctcggcaagacggtctggaactccggctccctcttcacccaaatccagtggctgcgcgacatcaagccctccttctgcagctccacccaagattgcaaggatttcttcgccaagtccctgttcgtcgtcggcgagttcggcgggaacgactacaatgcgccgctcttcgcggggaaggacctcagggaggcctacaatttgatgcctcatgtcgttcagggcatatccgatggcgttgagcaactgattgccgagggcgcgagggacttgattgtgcccggagtgatgccatccggttgctttccggtgtacttgaccatgtacaaagagcccaaggaggggtatggttcgcgtagcagttgcctgaagcggttcaatacgttctcatgggtgcacaattcgatgctcaagcgagcgctagcaaagctccgtgccaagcatcctggggtgaggatcatttacggggattatttcacgccggttgtccaattcttgcttcagcccgaaaagtttggattttacaaacaattgcctagagcatgctgtggtgctcctgggacgggaccttacaatttcaatctgacggccaaatgcggtgagcctggtgccactgcatgtgccgaccccaagacacactggagctgggatggtattcacttgacagaggccgcatatggacatatcgcgcgaggttggttgcatggcccattcggggatcaacctatcgtacagaattcttgagctcctagttgttttgtccatcgtacctctagggtatcagaatagcacagcaaattggatcagaaaggttgtttccatatagttgtatgtatatctccttcgattcgttgcgatcaggtaaaaaagaaaagttgagatagagaggtctgaaattaaagcatgattttgttcattcatcaggtgaggtggtatgagtaaaaaaaggtgtattgcacaaagtggttaacatatgatacagagtttctttgtgtgtagc

SEQ ID NO: 1937 - DNA, 931 bp, Oryza sativa
  ref <308>: DATABASE ACCESSION NUMBER: AK059899
  ref <309>: DATABASE ENTRY DATE: 2001-12-06
gagaacagccttatctctatcgctttactctctctgtccctggctttcttcgtctctcttcatgtcgccggcacatatccaccaccggctccaaccctccccaaccgtggcggagccccctccctctaccccggcgcccgtccctccgggctccggcatcctcctgcctatgccgctcggcccgtgcttcgtcgcaccgctgccagggctctcctcctcctgctcagaggcagttcggtgacgagcgggttggagcagcctcgcccctcctcgtctggatccagccgcaggcatggccacatcgccggctcctctactgctcctctcctccatctccctgcgctcaccgttcctgatgagggcacggcgactcgaggcgacggctgcggcgactcggtcttccagactcgtcccgccaccggctacggcctcaacgggcgatgacgggcgacctagccgacggatccatcggcgtggaggtctggggccgtcagatttagccgcatccgacctccatggtgacgggctgacggcgacagcgggttgcaggtgcgacaaatgcccctcctctcctctactttccctcggtggcttggccggtggatccatcggtgtggaggtcggagacaggcggatctgggagatgcgatggtgacgccaccccgtcccgttcttcctcccacaccagaagaaggagcagtgatgataatgaattactcttgtgctttgttgatgtttattcatgctttttttttctaatcttgaggatctgggttgttcatatgttaaaataaggatatggggattattgtttgttgttaatattttcaccttcaatttgaggatctggggcattgtattgggggattggggcattgaggagtcaatgaagagaatcgggctcaataaaatggctcaattcgagccagtc

SEQ ID NO: 1938 - DNA, 1103 bp, Oryza sativa
  ref <308>: DATABASE ACCESSION NUMBER: AK059900
  ref <309>: DATABASE ENTRY DATE: 2001-12-06
gactcttgccaacattcctgagataatggaatctcttcccgtagagacgaggttcacagagtttcccttgcgacaatatggtggattttggttattggaggtcatgctcaatggcgttgctgcagctgaaactagctttcaaccgagaccatccgacatcctcctttcaagctttcctaagtgtggtaccacctggctcaaagccctcgcctttgcaaccctgaaccgttcgacttacccaccatcggatgaacatcacccgctcctcgaacacaacccccatgaccttgttgggtttcttgagatttaccccaagctcgagttgtacgagtcactcccatctccacggctgctctcaacccacctgccatattcgatgctgcctcatcgcatcagggaacaagaaacggggtgtcggctagtctacatctaccgggacccaaaggatgccatggtctccatgtggcaccagaacaagaaggagaagaagaataggttgacgttcgaggagatgttcgacatgttctgtgaaggacggtgtgttgtcggcccgcagtggtgccatgccggtgagtactgggatgagagccaggcgagacctgagaaggtgcttttcctcatgtatgaggatcttctgcaagatactgtgggcaacctaaggacgctggcggagttcatgggctgtgggttctctcgccaggaagaagatgacggtatcgtgcaacaaattgtagaactgtgcagcttgaacaacctgaagaacttgaacgtgaacaagagtggaactacccttctagggatctccaaagatggcttcttcaggaagggaggaaccggtgactggagcaatcacatgtcaccagagatggcagcgaggctggacaagatcgttaaggagaggctggagggttctggacatccaattatttccaggatcaatgcgaaagcaacaacttcgatcggttcatccaaccatggtgcttctgaagccaaatacattaaggagtaacaactcggctggctaattaccgtggctcatggtgctgtggattctgtgaagaccaggatctgattgctttttcattatcatttcagtcctttgt

SEQ ID NO: 1939 - DNA, 1116 bp, Oryza sativa
  ref <308>: DATABASE ACCESSION NUMBER: AK059901
  ref <309>: DATABASE ENTRY DATE: 2001-12-06
ctcttctctttctttcatcagctatcacaattcacaagtgtagactgtaggatggccacgctctcttcctgcagccgcctgagcaccggcggcggcgccgtccagcgccgtccccggcggccggcaagcgctgcgaccatcacctgccaccggagctcctcctcctcctcgtcggccagggtagtccgcacaggcgccgccgcggcgcctgccgcggccacggcgcccgccgtgccgcagaccaacgagtgctcgcttccgacatgggcggagttcgagctgggcaaggcgccggtctactggaagaccatgaacggtcttcctccatcggctggagagggcctgatccttttctacaacccggcagcgaccaagatgacccccaacgctcagtttggcatcgcgtttaatggtggttttaaccagccgatcatgtgcggtggtgagccgaggcagatgacgctgcaagagaggggatcagctgatcctcccatatacaccatcaggatacgtgtgccgcagcatgccatgaccctcgtcttctccttcacaaacggggtggattgggatggaccgtacaccctcaagttcagggtccccaagccatggctcaacaagcccttgagcttcttcaacgagggtctagcagacgaactgaacagagaaggggcatgcgacagagccatcttcccagacgaaaacgttgtcatcacaagctgcgagatgggcagctactacgaagaggggggagatcgctgcaagctggacattgtgtcagggtgcatggatccaaactcgcacatgtttgatccactcgccaccgtggatgacggatcatgcccaatggattccgattccgaggaatgaactgaactacagtctcagcgagttttattagcaaggagaagctgtaattagtggccactgttgttcaatgtaaaaagaaagaagcgacacggtatgatgtacaagaaagcacagatgtgtgatagaatggtattagggaatgatgtgtgctgcatttggtgaaaagaatacacaactgtaggcctcatacaaatgtggttgttaatttgtgacagaactactctgaatttaatagagatcaacctatac

SEQ ID NO: 1940 - DNA, 1123 bp, Oryza sativa
  ref <308>: DATABASE ACCESSION NUMBER: AK059902
  ref <309>: DATABASE ENTRY DATE: 2001-12-06
cagtccagtccagtccagcgcactcctcactcaacaactctccctcgatactctccccccgcaccaagaaaccacggaatcctcctcctcgatccctcccaatccccaatcccagcatccccgagatccgcctcccagcgcgatcccaacctcatggcgtcgccgccggggaagaagggggaaggcggcggcgatggcggcggcgggaaggcggagtggctgatctacgcgttcgtggcgcgcggcacggcggtgctggcggagtacaccgagttcaccggcaacttcccggcgctcgcggcgcagtgcctgcagcggctccccgcctcgggcggcggcggctccggcggtggcgcgccggcgcggttcagctacgcgtgcgacgggcacaccttcaacttcctcctccaccgcggctacgcctattgtgtagttgcaaaggaatctgtcccaaagaatgtctcggtggcttttctagaaaggttgaaagatgacttcatgaagagatatggaggtggtaaagctgatacagctcttgcaaaaagtctgaataaagaatacggaccagttataaagcagcacatgcagtatgttcttgatcattcagaagaaatagagaagacattgaaagtgcaagcccaagtttctgaagttaaaaatatcatgttagaaaacatagagaagactttgggtcgtggagaaaaactgagtgaacttcaagataagacttccgatctacaaagtcaggcccaggaattcaaaaagaagggagtgaaaattcgtaggaagacatggttgcagaacatgaaaatcaaattggtggttcttggaattcttttgcttcttgtaataatcgtatgggtgtctgtttgtcaagggtttgactgcaccaagcactgaaagtaactactatcctactgtcggtatagctctgctatataatagtttggagacgtgagattgtgtcggtgaaatcaagtgcattattgactctttggcttgatttctgctgcacatttatcgcgatacaaatgtaaagttgagttggtgtcaagtgttattcaaaccgtgtgaccaacattacataaagtagtaatagtacggttgcttgtcgattgatcct

SEQ ID NO: 1941 - DNA, 927 bp, Oryza sativa
  ref <308>: DATABASE ACCESSION NUMBER: AK059903
  ref <309>: DATABASE ENTRY DATE: 2001-12-06
atcttcgagagattcctcccaatcccgagcagaatcccccgccccggcgaatccgcgcggcgctcgagtgaatttgactagctagtagccacgcatgaagccagatggtgaaactcagcttcgtcctacagctgctggacatccagatcctggtttgggcacatcatctgcagaatacgtggcctctctaggaccagctacagctccagtatcttatccatatatcagtacctattatggaggcacttatggtgcttatagtggacaacctctggttaacgctgctttaatggcaatgcctccgcattctgtgcccttggtgaccgatgctgttgtagagcccatatatgtcaatgcaaggcagtatcatggtatattaaggcggcgccaatctcgtgcaaaagctgaatcagaaaataaggccaacaaaatccgcaagccttacctacatgagtcccgccatctgcatgctttgaaaagggcaagggggtccggtggtcgatttctcaactctaaggctgtggaggggaagcaagacactaaatctgtagataaaaaggatggagctgtgccatctgaggagaagagagacaagaagttggcaaatagcattatcaaattggagaactcgagcccaacaacacaaccaggtgcagatgcgtccgatgttgtatgatgcaaatttagccaatccctccctaatccaaccaaattgccagaatcgatcgaattgtgtgcttgctttctgttcgtgacagtttaagtctgtacatagctgttagttttgatgattggataaatccatgatagtatagtgaacatgttgtgggagcagttcagtgctagggtttgttgctgagtgtagattatgaaccttgtgtcactgttgtgttttgcttctgttaatgaatggtagcttacaatggg

SEQ ID NO: 1942 - DNA, 1058 bp, Oryza sativa
  ref <308>: DATABASE ACCESSION NUMBER: AK059904
  ref <309>: DATABASE ENTRY DATE: 2001-12-06
agagagagaggaggtgggaactgggaagaaaaaaatggcggctttgctccgccacgccgcggcggcggcggcggccgtggtcctcctcatcgcggcggccgcctccaccgacggcgccaccagcttctacgcctcggacccaaacctcggatccgcccgcgtcgtcttccagacaactcatggtgacattgagtttggcttctttcctcatgttgctcctaagacagttgaacacatttacaaacttgtgaggcttgggtgctacaacacaaatcactttttccgggttgacaagggttttgttgcacaagttgcttctgttgtgggtggtagaactgcccccatgaatgatgagcagcaagaggaagcagagaaatcggttgttggtgaatttagtactgtcaagcatgtcagggggattctgtccatgggaaggcactctgatccaaacagtggtggttcttccttttccatccttcttggagatgcaccacaccttgatggacagtatgctgtatttggaaggctcacaaaaggtgatgatacattaagaaaacttgagcaacttccaactcgtagagaaggcatatttgtaatgcctattgagcgtatcagcattctgtcaacatactattatgatgttgatttagagagctgtgaagcagaaaagtccattcttaggaggagactttctgaatcagcatcagaagttgagagatggagaagaaagtgctttgcatgatgctggagttatgttagaacaggttcaagcttctccctgacttgattgctgaggcctgaatattgaaagcatggcgagggaacccctggaatggaatttgtatgttgtgtgcatttatcctagcaaaatgctgtaacagttcaatagaagtgtggataattctctcttctttttttctgttaatctttccagcacacttggatctgtacacaactacacatcatactgaatttgtcattgcttttacaaaaaatacattgtactagtatcttattttacgaaaatattgtatattaccatctccatttctgcacct

SEQ ID NO: 1943 - DNA, 1020 bp, Oryza sativa
  ref <308>: DATABASE ACCESSION NUMBER: AK059905
  ref <309>: DATABASE ENTRY DATE: 2001-12-06
ctccatggcgttgatgttccgccgccagatgttcgtcgacgacggcttcagcgacaagccccatggctgcgcatcgcctgagcccgaggcaacagagcctgagagtggtcttacaactgaggatggacagtatgatggatgggatgatcaacaatctgcaggtgggagcagtaactggaattctcgtgcaaatcgctcttttggtctggcagatattccagaatggactgggaagccttcattaccttatgaagatccagatatgctgagatttcttggagagcctattttaactccaaaaaacaatgaggtctttgatgatactattggtaagggcaggccagacaagtgcaactgtgaagtcccaggttccacttcttgtgtcagatttcatgtggcagagaaaaagaccgagctgaagcgtgaaatgggctcatcatactatgcaatgaagtttgatgaaattggacaggatgcagcattaacatggcaaaaggatgaagaaaagaagtttgagaccattgtccagcagaatctgccttcatctaagtacaatttctgggacaagctgcgtgccgccttccgttacaaaggtgaacgtgcccttgtgagttactacaacaatgttttccagccgcgcagaagagccttccagaatcgagtagctcaacatgctaatggtgtagatagtgatgatgactcaattgaacctgccttcctacgccttcgtcaagacggtggtaagagtagatccaggtcttctgcttcctctaggaaccaaaatcagtcttagggtgatagtcttctataagtaactggtggctccagttcagcttcacctggagctcaagactcaaaaggttcatttatttttatcttcaccaattggttactggactggagacggtaagtgagcttcaattgggaatctcactgagacttggtggtggtttttgtgaatacctctgtgtggcgcgttgcccgtttaccttaaaatctcaatgcaactgtgttgatatt

SEQ ID NO: 1944 - DNA, 1076 bp, Oryza sativa
  ref <308>: DATABASE ACCESSION NUMBER: AK059906
  ref <309>: DATABASE ENTRY DATE: 2001-12-06
tctacaacaagaaggtgctcaacgcgttcccttacccgtggctcacgtccacgctctccctcgccgccggctccgccatcatgctcgcctcctgggccaccaggatcgccgaggcgcccgccaccgacctcgatttctggaaggccctgtctccggtggcgatcgcgcacaccatcgggcacgtggcggcgacggtgagcatggcgaaggtggcggtgtcgttcacccacatcatcaagagcggcgagccggcgttcagcgtgctcgtctccaggttcttcctcggcgagcacttcccggcgccggtctacttctccctcctcccaatcatcggcggatgcgccctcgccgccatcaccgagctcaatttcaacatgattggattcatgggggcgatgatctcgaacctggcattcgtgttccggaacatattctccaagaaggggatgaagggcaagtcggtgagcgggatgaactactacgcctgcctctccatgctctcgctggtcatcctcctccctttcgccttcgccatggaggggcccaaggtgtgggctgccggctggcaaaaagccgtcgccgagatcggtccaaacttcgtctggtgggtggcggcgcagagtgtgttctaccacttgtacaaccaagtgtcctacatgtcattggacgagatctcaccactgacattcagcatcggcaacaccatgaagcggatctccgtcattgtcgcctccatcatcatcttccacacgccggtccagcccatcaacgccctcggagccgccattgcgattctcggaactttcatctactctcaggcgaagcagtaatggcataagcatggaaatggcacccgttttcgccacaagtcgcgactcggtgctcgggatgtaacaatgctatgagcatatatccaaggatcccttgtaatatattagatcttcttttcttttcatttttctttctctaggtgtagctgccaatgtttcttctgaattcgtcgagttcttgtactatgactatgatgatgtagagaggtggatctgcctaaataaagctgttagattttttgcttg

SEQ ID NO: 1945 - DNA, 917 bp, Oryza sativa
  ref <308>: DATABASE ACCESSION NUMBER: AK059907
  ref <309>: DATABASE ENTRY DATE: 2001-12-06
tctcctcccctccccgctcggatctctctccgccgccgccaccgccgccccacgccgcgccgccgcggctgccgggctctcgccgctcctactccggcgccgcgcccctatcgccggcgctctcctcttcctcagcctcggcgccttcgcaggggtgagaagtctcagctcttcagcttctgctcgaatggagtctacttccaccactgtgccttccattgttgtgtatgtgacagttcctaataaagaagcaggaaagaggctagctgggagcattataagtgagaagcttgctgcttgtgtgaacatagtgcctggtattgaatctgtttactggtgggaaggaaaggtgcaaactgatgctgaagaactgctcatcataaagacaagggagtctcttcttgatgcgttgaccgaacacgtgaaagccaaccatgagtatgacgttcctgaagtcatcgcgctgcccataaaaggaggcaacctcaagtacctggagtggctaaagaacagcactagggaaagctaactctgtgccgtggcatgctttttcactacatttcgaagcgtctggtgatacgtatactctgcatctccatggcttcggtgtgaagtgtgatggattttcctatcttttacagcttatgtcaaataaactgtagtagcgtgcgtgcatggcagatgttgtacatgaaaccctctcgtgtttgtggagttagacgacatttcgtttctatttgatttttttttgggtgaagtcatgaatctgtcatctgtgttatcacctttcccatgtcaaacccatcttgaatggtggcttggcgtgaggttggtttcgctgtgagtgccccagttaaaagtgaatgcttctggtctggttgcaccgtagcatatgcaatcaggtcttgtcttcctac

SEQ ID NO: 1946 - DNA, 948 bp, Oryza sativa
  ref <308>: DATABASE ACCESSION NUMBER: AK059908
  ref <309>: DATABASE ENTRY DATE: 2001-12-06
aagcaacaaatatagctgaagaattatgaacacatactggcctgctgctctgagccttgaaaattatcttctccgtgttgagcaacctcctgttcatgctccccaaatcctccacagagtgaggatcgtccacaagccggatcgagaagctcgacggtatctaaaagcacaaaaatgccttcaagaacaagaagaagcatcaatggtgaaacaaggaggcctcatttccctagttttctgaaccaatgggggtcagtcagttcgtacggaggccgggtaggagatcttgacttcgtaccacgcggacggccgcgtcccgtcgagcctgtacagccggcttccgtggcgcagcggcatcgtctcacccatcagctcctcgccgacggtgaggaccctcccctcctccaagctgcagggcaaaacacacacacacggggaggttgagaaacagcacggtgaggcagcgtggatcgtggcagaggaaggggaccgacctgcttgctgaagagagcagcagcctggagagcaggaggagcaggaggcagcggcgtcggcggcatggtgaggggaggggatgcggcggcggcggcggcggcatggccgcgggatctcctggtcgccggcgtcgtcgatgcgtcgaggcggccgggaggcgaagggctctactgcctttggatagttcgtgggctattcgtgggctggtacggacagattattttacttgggccttatttggataggctgagatcatggcccatagcatatggatgggctgggttatggcgcctttcgtggatctgcaattcggccttttctgggcttagggtgctaacgtcaacttttttttctctcttttcattttgtcccatctcatctggacactccattttcacccacggactttacttgtaaattagtttttcgttgatgaaaattcttttatcaggc

SEQ ID NO: 1947 - DNA, 999 bp, Oryza sativa
  ref <308>: DATABASE ACCESSION NUMBER: AK059909
  ref <309>: DATABASE ENTRY DATE: 2001-12-06
atcccaagtgcaccggtgccaccttctcccagcgccaccacactctccatctcttgtcaccttgctctactctccccttcttaacctcttcacgccaccgccggccaccaccaccactctctactccggcgacatcatgttcatcaacacggccagcttcgtcgccggcgccgtcgtcgcttcgccggagcagccggccaagcttgtccgggatcagaggagggtggtgcctggctcctgcagggcaagaagaggtgcagcatccaatggcttcagaacttactgcatgcagacatggaaccctttcaccaacaggaggtacgaggcgatgtcttacctgcctcccctgagcgcgaagtccatctccaaggagatcgagttcatcatgtccaaaggatgggtcccttgcctcgagtttgacaaggagggggagatccaccggagcaacagccggatgccggggtactacgacgggaggtactggacgctgtggaagctgccgatgttcggatgctctgacgcggcggcggtgctccgggaggtggaggaatgccggagggagtacccggacgccttcatccgcctcatcgccttcgacagcagccgccagtgccagtgcatgtccttcgtcgtccacaagccgccgtcggccgccgcttctccggccacggtcgccggagctgaatgaaccaaggtgttcagttcatgttcatcctcgcttcgatgatcatcagtcacagcatccatccaaccagtttccttcctcttcttcggtctcttgctcacttgcatgtgctgtaccacttctttcagttcaacttcaacctcatctttgatgactactgtgatgtactaatgttgcttcgagtataatgagcacaatgatgatcatagcatccatccaaccagttatcttcctcttcttcagcatcatcttcatttgcaggtgttctatgtacctcttcttccagttcaacttcaacatctaatctttgagcg

SEQ ID NO: 1948 - DNA, 999 bp, Oryza sativa
  ref <308>: DATABASE ACCESSION NUMBER: AK104152
  ref <309>: DATABASE ENTRY DATE: 2002-08-28
ctctttttttctttcttgcggtggcggccaaagccagcgaacacctgagctctctcgccgccgcgccgcttaggggttttccgccgccgcatccgccgatctccccgccgccatggacgcctctctcatgggctccccctctcccgccgcgggcgacgcccccacctccggggagcaccggatggggaccaccatcgtcggcgtctgctacgacggcggcgtcgtcctcgccgccgactcccggaccagcaccggaatgtatgtggcgaaccgtgcatctgacaaaattactcaactgactgacaatgtgtacgtctgccgctctggatctgctgccgacacacaagtcatttcggaatatgtacgctattttctccaccaacacacaattcagcttgggcaaccagctactgtgaaagttgcagccaacttaattaggttgttggcttatcagaacaagaacatgttgcaagctggcatgattgttggtggatgggataaatatgagggtggccaaattttctcagtcccccttggtggaacaattctgaggcaaccatttgcaattggaggttctggttccagttacctgtatggactgcttgaccatgaatggaaggagggcatgtcccaggaagaagctgagaagtttgtggtgaaggtggtttcccttgctatagcccgtgatggtgctagtggaggggttgttcgtacagtcaccataaatgccgatggtgtttcgaggaaatttcaccctggtgacaaactaccactctggcatgaagagatggagccccagaactcgttgctcgacatacttgctgctgggaaccctgatccgatggtccagtgattcagccatacaccaccattcttttccaactttctactgtatctgacttgctctagatttttactgaactggactgcagaattgttccacaccgacttgttgttactctttattattttaacttagtaaattctcggttgctcggt

SEQ ID NO: 1949 - DNA, 1058 bp, Oryza sativa
  ref <308>: DATABASE ACCESSION NUMBER: AK059910
  ref <309>: DATABASE ENTRY DATE: 2001-12-06
cctgagagagagagagagagagagagagagagagagagagagagagagagagagagggttccttccatttcgctgctgcgccaaagaacacaactttcccaattccttttcgcctccctgtagaggcatggagtgggacaaggccaaggcgtcctccggcgaggcggtggacgacaggggcggaggggaaggagggctcgggtacgtgaaggtgatgacggacgagcagatggaggtgctccggaagcagatctccatctacgccaccatctgcgagcagctcgtcgagatgcaccgcgccctcaccgcgcagcaggactccattgcaggaatgaggcttggtaatctgtactgtgatcctctaatggttcccggaggtcacaagatcacagcaaggcagcgatggacaccaaccccaatgcagttgcagattcttgagaacatctttgaccaaggcaatggaacaccaagcaagcaaaagataaaggacataacagcagagctctcacagcatggccagatctcagagacaaatgtctataactggttccagaacaggcgggcacgatcgaaacggaagcaagctgctttaccaaataataatgcagaatctgaagctgaagcggatgaggagtccccaactgacaaaaaacccaaatcagataggccgcttcaccagaacatagccatgagagatcacaatagcgaaaggatctcggagatacaccactttgacacggagcatgagcaaatccgtcgtatgatgtatgcatccaatgacagtagctcgcgatcgtcaggcagtttgggccagatgtccttctacgacaatgttatgtcaaatccaagaatcgatcatttccttggtaaggtggagagccccgggagcttcccccacatgcgatccggtgaaagctttgatatgtattgatgacgcggcaattctggattctggttactaggttcgttgcattagacaccatactgttttcccctgtaaaaagtgaagctggtaacttgccgttcattttgcttactgaaattgcgaagtttgcctt

SEQ ID NO: 1950 - DNA, 1172 bp, Oryza sativa
  ref <308>: DATABASE ACCESSION NUMBER: AK059911
  ref <309>: DATABASE ENTRY DATE: 2001-12-06
acaactaaccgccatctctctcctcgcttttaaactcccgcgaaacaaccgctcgctcacacacacacacccagagaagcgagacaatctgctgctgctagtggcggacagagtccaagaaggaatccaagaatcgagagaaatcgagatgctcgcggcgaggacacgattcgccggcggcggcggcgcggcggtcgtgctgctgctaatcgtcgcgtcgacggtggccaccagggcggccgtcgccgacgatttcttctcccctctcagcccgctcctcgcccctgtaatcgggtcgatgtgcaagacggtggcgtgcgggaaggggaactgcacggcggcgtcggggttcccggggtacaggtgcgagtgcgagcctgggtggaagcagatgcacgtcggcgaccaggccagcttcctgccctgcgtcatccccaactgttccattgaccgtgcatgttctaacactatagcaccagcacctgcgcctttaccatcacccaaaaatttctccctcccaacagaccgtaactactgcaactggctgttatttagattttccttttaaaaagacttcctcagaactttttgataaaaataccatttccatttcatctgtgatctgatcatcaattcaccattgactgtataattgtgtatgcatagcctgtcaattagcttactgcggttcgggaggcacatgcaagaatgggacaggcctcagctaccactgcgagtgcagtgagggtttcagtaaccttctgaacatcaccacaatgccatgttttcagaattgttcaatcggtgcggattgcgcaagcatagggctctctccatcctcaaactcttccagttctcctgcaccaccgggatctgctggcatatctaacaatggggcgatttcacataaaattctacttcccttgctgattttgggctcactgatggtctgtcaggctatatagatagagaatggagcatacgtagtacatttgagctagattgtttctgccacggacaggatagagcagttagcctgttagagatgtacaccttttgggatgtttgaagtgttgtccagtgtccacgttatggttcttttattctgtgtgagatttgatcacattcatgtgaattaaaatggaataaactgtctctgtgaataactgaat

SEQ ID NO: 1951 - DNA, 1369 bp, Oryza sativa
  ref <308>: DATABASE ACCESSION NUMBER: AK059912
  ref <309>: DATABASE ENTRY DATE: 2001-12-06
ctcgccgcgcgcggcgccgcgccttcgagaacggcctcggccgcacgccgcagatggggtggaatagctggaaccacttctactgcgggatcaacgagcagatcatcagggaaacagctgatgcattggtcaacactggtctggcgaaattggggtaccagtatgtgaatatagatgattgctgggcagaatatagtagggattcccagggtaactttgtgccaaataggcagacgttcccctctggtatcaaggcactggcagattatgtgcatgcaaaagggctgaagcttggcatctacagcgatgccgggtcacaaacatgcagtaacaaaatgccaggatcacttgatcatgaagagcaagatgtcaagaccttcgcgtcttggggagttgattatctgaagtatgacaactgcaatgatgctggcaggagtgtcatggaaagatacactagaatgagcaatgccatgaagacctatggaaagaatatcttcttctcactctgtgaatgggggaaagaaaatcctgctacatgggcaggccgcatgggtaacagctggagaacaactggcgacatcgccgacaactggggcagtatgacatctcgtgcagacgaaaatgaccaatgggctgcctatgctggacctggtggatggaatgatcctgacatgcttgaagtgggaaatggtgggatgtctgaagctgagtaccggtcacacttcagtatctgggcactagcaaaggctcctcttttgatcggatgcgatgtgcgctcaatgagccagcagacgaagaacatactcagcaactcggaggtgatcgctgtcaaccaagatagtctaggtgtccaaggaaagaaagtacaatctgacaacggattggaggtttgggccgggccactcagcaacaacaggaaggctgtggtgctctggaacaggcagtcataccaggcaaccatcactgcacattggtcgaacatcgggctcgctggatcggtcgcggtcactgctcgtgatctatgggcgcactcttcgttcgcggctcagggacagatatcagcatcggtggcgcctcatgactgcaagatgtatgtcttgacaccaaactagtcagcaaagaaaagcagcacaggttagtacgtgtccggcgaatacagctaaattgatcaggattcaggaagaaggtttgcaatttgcaaggattggtagagctggaaatgggatgccatttggttatgtatgtagaaataagctgtaagcctgtaagcgtatatgtaatcagccgtcaaatgctggcgagtgtatttctgaagtttgcaacgaaagttgcagcaataaaaatacaaaaagaaggctttcctgccact

SEQ ID NO: 1952 - DNA, 1238 bp, Oryza sativa
  ref <308>: DATABASE ACCESSION NUMBER: AK059913
  ref <309>: DATABASE ENTRY DATE: 2001-12-06
agagcgctgcacaatcgacctccgcctccccaatccatcccgtctcgtcgcccgccgccgtcgacgactcccgtctcctccgcctgccgccggcgccgatctccatcctgctagcagaggtggcgccggcgttctcctgctcccgccgcatcatcgctcaccggtgagcatcctaatccatcccgtccggcctcgaatttcggtctcctcgcccgccgcttgtgccgaaccaccccaatccggcgagcagaggtcggcgcccgtggtcctcctgcagtcctgcttccgccgcatcgtcgctcgcctgtgagcatccttcataaggtattttgtgtttttctcgagacatcgaaccagcctcgtcgtcgccggcgaccgccgccgaggatgccggtgagggtggtagacaccgcaaccccttcctcccagccctcatcaggtcaagatgcaaatgctgggcatccgtctcctcctagctgttccctcttaagtgctggaagatgttatgctggaacccagaatgtctctaatatacaaaaagaagaagcttggaaagttaatgtgcggatccatggctgtgatcttgaacagggttatttatgtggaacaatggaagcacttaatgttcccttagctgatacccctgtggtaacgttctgggagggggagatagtggatgctaaaaattatacatttttcactggcaagtgggaagcatccccagaggatgatattagacactggtccaagttcccatcatttacgcctcttctgagtcagattgagacagatggtggcaagtccgtggacctcagcaactatgcttacatattcatgagatggaaagagcagtactttgtcaatgttggagtggactgtgggttgaccatagctggtttctactatgtctgcttttcatgtagcgacggttccattagcgggtattattatgatccaaacagcagtccgtttcagaagcttgaactgaagtgtaccaatgagaaagattctggatttaccttttcgtcctacgagctgcagtgagagactgacaggcctgctgtcattatagtatgtgcggatgttaatatacacaatgtatgtactgaactcataattctgaatggtgtcccattaaaagggctgagatggcatgtttgtaacagtgatttggagcaagatgtattttattttctttgtaatatgaatataagctggtaaactttctagtttgaact

SEQ ID NO: 1953 - DNA, 972 bp, Oryza sativa
  ref <308>: DATABASE ACCESSION NUMBER: AK059914
  ref <309>: DATABASE ENTRY DATE: 2001-12-06
aaaaccctactttactactagtcgtcgatctcctcgcgactttgcccgccgccgccgccgccgctctccatcccgcgagaagctcgtcgccggcgtcccgctgcatccatcctctccggcgatggcgattactttgtccaatgtcaactctgaggcaggcctccagaagcttgatgagtacctccttactcgcagctacatcagtgggtaccaggcttcaaaggatgacatgactgttttcacctcacttccttctgctcccgcagcaagctatgtcaatgtcacaaggtggtatgatcacatcagtgctctcctaagatccagtggagttaccgcagagggtgaaggtgtgaaggttgagtcaactgcttgttctgtgtctccaactgctgaccaaaaggcaccagcagctgatgaagaagatgatgacgatgttgatctgtttggtgaggagactgaagaggagaagaaagcagcagaagaacgggccgcagctgtcaaggcttctggaaagaagaaagaatctgggaaatcatcggttctgctagatgtaaagccatgggatgacgaaacagacatggcaaagcttgaggaagctgtgaggaatgtgaagatggagggcctgctctggggtgcatccaaacttgtaccagttggatatggcatcaagaagttgcaaattatgatgaccattgtggacgatcttgtttctgtggacagtctcattgaggattatttttacacggaaccagctaatgagtttattcagagttgtgacattgttgctttcaacaaaatctaaaatggagtcttgtcagaggcagccttactaaaagaggaatgctatatgctcatcatcagaatttcccaatggtttatgtttcgtctatggaccttgagtgtactgcgaaccagcgtttggtattatcatgagatttaaatcttggttggacttgttttggccagttgccc

SEQ ID NO: 1954 - DNA, 914 bp, Oryza sativa
  ref <308>: DATABASE ACCESSION NUMBER: AK059915
  ref <309>: DATABASE ENTRY DATE: 2001-12-06
ctccgcgaccaaagaaaccgaattaacctccgagtcctctgctccctctttgcttcttggaccaggatctgatctgcgcggcgctcgaccggaatcgcgcggagatggacggcggcgacctgaggagcagcatcaagaagtggaacgtcatctacccggtgtacctcaactccaagaagacggtcgccgagggccgccgcatcgcctccggcaaggcctgccccgaccccacctgcgtcgagatcgccgattgctgctcccacctcaagatccctcacgccatcgaattggataaggcgtatccacgagatttcttccaggtgggaagggtgagagtgcagctcaagaaggatgacggctccccagtcaatcctgcaatcaaaacaaagaagcagctgatgatccaaatcgcggagctagtccccaagcatcatggcaggactaagaagcaggaaccagcagcttcttcaactgcagggacttcaaaggggaaaggtggcaagaaaaagaagtgatgatagtacaccatcttgtgtcgttcttctgtccataggaagttccctgagattcgtcgatgtctgttttgaggcctgaaattctgcgtctcttctgtgctctgaatttctaatttctcgggaaacatcaatcaatgcccgtatttcttgtgatttggactattggaaagaggaagattgcactgttgtttgcaatggatagcttccaagttatgtttttgaatagagctcaccttgaacatgcttatgctactaaaccccttgcaacagtgggctagcagaggttatgacttatgaggctaacagtggccatcggatgattaatcgttcatgtgtcaattgggccttggcctacgtttctttactcgttttggtctgaattcaacttgggtattggtg

SEQ ID NO: 1955 - DNA, 1333 bp, Oryza sativa
  ref <308>: DATABASE ACCESSION NUMBER: AK059916
  ref <309>: DATABASE ENTRY DATE: 2001-12-06
ctgatatagcaagctgttcggccgccggcgcgaagaacatggagtccgtggtggtggccggagatctggccgctgcaccggcgccggcgacgccgatgtggttcgtggcgctggtcgccgtcggcctgcacgcggcggtcgtgtgggcggggacgttcctcgcgtggctccgccgcgcgttcctccggcccgggaagggcctgtgccggcggtacggcgagtgggcggtggtcaccggcgccaccgacggcatcggacgcgcggtggcgctggagctggctcgccgcgggctccacctcgtgctcgtggggcggaaccccgggaagctgtcgggcgtctgcaaggaggtccgcgcagcggcgccggcgtgcaaggtgaggaccgtggtgttcgacctcgccgccccaggggacgacgacgtcgggggcggcgagctgtcccgcggcgtggcgagggtggcggcggccgtggaggggctcgacgtggggctgctcgtgaacaacgccggcgcgacgtacccgtgcgcggcgtacttccacgaggtgcccgacgcggtctggggggcggtgctgcgggtgaacgtggtggcggcgacgaggatcgcgcgcgccctcgtgccggccatggcggcgaaggggaggggtgccgtcgtcaacgtcggctccggctcctccgtcgtcgtgccggcgttcccgctctacgccgtgtacgcagcgaccaaagcgtatgttgaccaattgtctcgaagtctacatgttgaatacaagcatcacggagtggatgtgcaatgccagataccattatatgtcgccacaaagatgtcacctgtccagggtaactcgccgtttataccatcacccgaggagtacgccaaggctgctgtccgctgcatcggttatgagccaagatgtgtcccctactggcgccactcgatccagtggttctttgcatctctactgccagattctgttctgaatctatggcgtctccaggttggaatccggaagagaaatcagatgaaggttctgcttggtgagagcgatcatggattcagttaaactgccataaatgttggttttgtgaagtgtgtgttaatctattcgaacaaaatagtatatacatcaatctgggatttgggtagtagtatatacttcgatgagttatgtgctgaatataatggaatggcatttagtgtttgttttgaactttgggtagtggttttgtttgcacctctagcactattttttattggtttgtgcgagttggaattattagtacttttccattcagtgtaatcgagaaataaacaatgtaaaatatgatgatgaatctt

SEQ ID NO: 1956 - DNA, 1054 bp, Oryza sativa
  ref <308>: DATABASE ACCESSION NUMBER: AK059917
  ref <309>: DATABASE ENTRY DATE: 2001-12-06
accaccgccagccaccagccactgccgcggcgggaatccggttcccgcggcgacatcccccacgtctccgccgctgcaccggcaaaggcagctgcaccgcgacccacccgcgcgctcccaatcggccccaagattaagattaaaccaggagagaccacccgatcgagtgttctctcactttcgccatggagcaccgactgtggtcaagcggggctagcgacaagaacaaggcaatggttgagcagctccagaggtacgggattatcaagtcgagcaaggtcgcgcaggtgatggagaccatcgacagggggctgtttgtgcctcctggtgcttctccctatttcgacagcccgatgcccatcggttacaacgccaccatttctgcgcctcacatgcacgcctcttgcttggagctcctggagaagcaccttcagcctggcatgcgtgctctggatgttggatcaggcacagggtacctaacagcttgcttcgcgattatggttggaccagaagggcgagcagttggtgttgaacatatcccagagttggttacttcgtctattgaaaacatcaagaaaagtgcagcggctccacagttaactgatggatccctcagtatacatattaccgatggcagagaaggttggccagagctcgcaccctatgatgccatccatgtcggagctgctgcaccgcagattccacaggcgttgattgagcagctaaagcccggtggcagaatggtgatcccagttgggactatgttccaggagctgaaagtggtggacaagaaccaggatggcaaggtcagcataagagatgagacggctgtgcgctatgtgcccctcacaagcaaggatgcgcagctgcaggctaactgaatgcactaccataatattctgctgaatgtaaaaccttcaatgcgtgatcccagttacatcaagatgttattattgtacataaattggtcctaccgtatgtgtgaatcgcttggtgcttgtcaacaatgttggatgttggttcgtcatgaagcatggaagtatgtgcttgtgtt

SEQ ID NO: 1957 - DNA, 1419 bp, Oryza sativa
  ref <308>: DATABASE ACCESSION NUMBER: AK059918
  ref <309>: DATABASE ENTRY DATE: 2001-12-06
atcttcagctcgatccatggcgactcaactccctcggctgctcccgttactcctctttctccccttcttccacatcgccgcctcaacctcgccgtccggcctccaccccgtcgtgctgctgccggacaccacctgcagccagctcgaggcacgcctcacggacgcctacgtgccgccgtcgccgcaatgcgccgcgcaccacaaggatcacgacggccggtggttccggctgtggaagaacaccacggagctcgacgacccagccgttgccccctgcgtcgccgaccagctccgcctcgtcttcgaccacgtcgccggcgactaccgcaacgtccccggcgtggagacgcgcgtcctggacttcggctccacccgtgggttcctcgccgacgagcccgccaacagaaaccggtgcatgggaaggctcgtcgaggcgttggaggaactcggctaccgcgacggcgagaacctcttcggcgcgccgtacgacttccggcagtcgccggtggcgctggggcagccatgtagggcgttctcgcggtacaggcagcggctccgggctctcgtcgagcacgcgagcagggcgaatggggacagaccggtcgtcctcgtgtcgcacagcgaaggcggctacttcgcgctcgagttcctcaaccggagccccttgccgtggcggcggaggcacatcaagcacttcgtcatggcctccaccggcgccggcgggttcgtgaggttcatggaggtcgtcgcgtcctgcgtcagcgacgtgtccccgcttgcacgcgtgaggaggagcgtccccagcaagttcacgccgctgccgtcgcccaaggtgttcgaccgcgacacgccgctggtggttacgcgggacaagaactacaccgcgcacgacatgccggcgttcctcgcggcggcggggctaccggagttcgaggtgacgctgtacgagacgagggagctgcccatggcgatgaacttcagagctcctgttgtgccgacgacgtgcatcaacggcatcggcgtgcccacggcggagaagctggtgtactgggacggcaacttcggcgaggcccccgaaatcgtgtacggcgacggcgatgggcttgtcaattcggcgagcatattggccctcgacacggtgatcggcgatgatccgatgcagcagtactacaagtccatcaagatcgccggcatgtatcacgccggcgttatctccgacggtgtcgccttggagcgtttgatcagtgagattcttcgggagagttttgtgcaagattccaagaaggtggattatcgtcgagttgctcaactctaagttgatcactttttctattctctttaactcatcgtttagatcaacatgtatgcgctacttgtaatgtattcacttggttccacattataaaatgttttcgtatc

SEQ ID NO: 1958 - DNA, 1161 bp, Oryza sativa
  ref <308>: DATABASE ACCESSION NUMBER: AK059919
  ref <309>: DATABASE ENTRY DATE: 2001-12-06
tatctttaaatcctagctattcattctccctctttcatttaatcctaacccttcattcatttcccaatcccaatcccaacccccatttcccattatccaaacacaccctaagttcttggggattttcaaccggctgtgctcttggattgatgtctcttccacatcgcatcttgttttggggggagggaggggggcatctttgcctccctcagctactgctcactgagttgcgcggccaacccttaccgagacgtggttttgctgcccgccgagccatccacattgctccttccacttctccgcatccgctcgtcgtcctcgtcctctccgcatccgcatctcttcccaatatttttgttcttcactgtagctgcacgtacagcgagcttgaatggcatcacatactccccatcccgtcctcagcatcggcgtcccacatggcatcgcaacgtcgccttcttcttcggcatcaggtcaactcggtggctcactgctagcacagatggcgggcggggagtggatctttcagttcttcctcagcgacttgcccgacggtgttgctagctgacgcagccatttccgcaatggcagaaatcggtgtacgatctacctattctcctccgcatacaggtaaacagacggctagacttcatgataattcatgctaatgttgggaggggcaatccactatgctcagctcatggatcttcaggaatggagctgccagcatataaatgacaaacaaatacaaggaaaaatactccatgtgcagcaacgattaatgcttttgtatgagctgatcttagtctctgaagactgtgctgtggtcttcatctctgaaggctaagctgtgttaggttggagcactccgattcaactcttttgcccaccaaactaactaagccaattgagtgctgcaaagcgcaaacagtatggtctccatagcctgtgcagatatagctcttacattggtgttctgccaccataacactgccaaagctgtttccaagctaaaaatcatgctgcagtgatgattcaatcccacacttgaataattgttgtttcctgcactgatgtagtagttactgctttttctcacttgcataattgatgtacttcactcacttttttatatttcataatatcatatagattctcctc

SEQ ID NO: 1959 - DNA, 909 bp, Oryza sativa
  ref <308>: DATABASE ACCESSION NUMBER: AK104153
  ref <309>: DATABASE ENTRY DATE: 2002-08-28
actcccccccgtccggcgcgcggctcctccgtcgacccgccgtaagtaaaccttccgatggccgccgccgccgccgccgccgcctccgccaccgccgccatctccggtgcgttactcccccacgccgtcgcatgccaccgcttgccgccgcggccgcagctcctcgcggtgtcctcctcattccgccgcctctccctgaccgcctcccctcgccgggccagccgcctggtccctcgcgcggacgccagcgcagaagcgggagaaccggagcccgccgctgaggctgaggctgaggctgttgctgcctcgactgacgctgaggtggaggagggtgaggcggaggcggctgtcgcggtggcggaggaagagcaggaggaagaagatgagcctccgccgccgagcaagcccccggttaagttcggggagatcattgggattctgaacaaacagttcattgaggaggctgaaaaggtgaagactttaccagatcttaggcctggtgacatcattgagcttagaatgcaacggcccaacaagaggagattgtcgctctttaagggcataattatagcaaaacacaaatctggtgttcacaccacaatccgtgtcagaaggattattgctggtgtcggagttgagattaccttccctatatattcacccaggatcaaggaaattaaagtaatcaggcacaagaaagtgagaagagcaaagttatattatttgaagcacaagcttccccgcttttcaactttcaagtaaaaattagatatgctggcagaagagcttctctcactagcattgttactttctctagcaaatgcttttttatttttttgttcaaacctatgcttttcactgtaatcactaaatttcaaatgtgtaatatctacaccttttctgtttggc

SEQ ID NO: 1960 - DNA, 1302 bp, Oryza sativa
  ref <308>: DATABASE ACCESSION NUMBER: AK059920
  ref <309>: DATABASE ENTRY DATE: 2001-12-06
caatctttaccactacgatctccctcttgcgcttgagaagaagtacggaggctggttgaatgcaaaaatggcggatctattcacggagtacgcggacttctgtttcaagacctttggcaatcgtgtcaagcactggtttacatttaatgagccaaggatagtagcacttcttggttatgaccaaggaacaaatcctcctaaaaggtgcacaaaatgcgctgctggtgggaactcagcaacagaaccatacattgttgctcataattttctcttatcacatgctgcagctgttgcaagataccggactaagtatcaggcagctcagcaaggcaaagttggaatagttctggacttcaattggtatgaagctctttccaactcaactgaagaccaagcagcggctcaaagagccagggacttccacattggttggtatcttgatccattgataaatggacattacccgcagataatgcaagatcttgtgaaagataggctgcccaagttcactcctgaacaagctagattggtcaagggctcggctgactatattggcatcaaccaatacacagctagctacatgaagggccagcaattgatgcagcagacaccgacgagttactcagccgattggcaggttacctatgtttttgcgaaaaacggcaaaccaattggaccacaggcaaattctaattggctttacatcgtgccatgggggatgtacggatgtgtgaactacatcaagcagaagtacgggaatccgacagtcgtcataactgaaaacggaatggatcaacctgcgaacctcagccgcgaccagtacttgcgcgacaccacgagggttcatttctacaggagctacctcacccagctgaagaaggccatcgacgagggcgccaatgtggctggctacttcgcctggtctctcctggacaacttcgagtggctgtcaggttacacgtccaagtttggtatcgtctacgtcgacttcaacacgctcgagcgccaccccaaggcgtcggcctactggttcagggacatgctaaagcactgagaatgaaagacacgcagactgaagttgaagttgccatccattgatcatcatgttcagttctaggctgccgcttggatggcatcagagctggctatgaactatgtgatggaaataaaaggactgcaaattgattcgattatgcaattcgtgtctatgatcagaattgtggccgtctagtgaacttgtagaagtgtactcttgatgtgtgatcgatcttgagtaatcaatgtttgatcagatttcgcctt

SEQ ID NO: 1961 - DNA, 1028 bp, Oryza sativa
  ref <308>: DATABASE ACCESSION NUMBER: AK059921
  ref <309>: DATABASE ENTRY DATE: 2001-12-06
aagagaagagaagagaaagccaagcacacacaccaccagctttgctcccgctagttcccgctgatcgatcttttttcgggagggcgttgcttgctcggatcggcggccatggctgagcccgctggggaggcggccccgcaggcggacggcgtctcggaggaggcggcggcgaggccgagggggtttaggcttcttgggggggacaagtccgtgcaccaggctctcggcggtggtaaagctgctgatgtacttttgtggaaagacaagaagatctctgctgcagtgataggtggcgcaactgtgttgtgggttctctttgaagttgttgattaccatttcctcactctgatatctcatgtcctgatcggtgtactggccatcttgttcttatggtccaaggcaaccatcttcatcaagaagagtccacctaatattccagaagtgaagatatctgaagatcttgctgtgaatgttgcactagcactgcgcactgacatcaaccaagcacttcacttgcttagggagatttctctagggcatgacctgatgaagtttttaggcgtgatcgttgctctctggattctttctgaaattggaagcctctgtgatttcctgaccctgttttacgttgctgtcttgatgctccatacagtgccgatcttgtatcacaagtatcaggacaaggttgatcattttgctgggaaggcgcatgtggaactcagcaggcagtactctgttctcgacgcaaaggttctcagcaagatacctaggggtccagcaaaagataagaagcagaactagaaatgaaacaccatatcacgctggaacctgacttgggagtgttggcatctcacatcacaacatatgcatgaatcttgagtccttgacttggtttggcccttgttggtgcttggtacatatatgacctgtctgtagatttgtgtgttgggagtgtcttgtgtagtaaactgtcgatatgatgtggttggtgtgcaactctgcaatgttaatatacaagatcttgctgc

SEQ ID NO: 1962 - DNA, 998 bp, Oryza sativa
  ref <308>: DATABASE ACCESSION NUMBER: AK059922
  ref <309>: DATABASE ENTRY DATE: 2001-12-06
cataagcagcaactggtttcttttatttacttttttttccaaggaaagaagtagctggatgatagaagtggtcatatcaactgtgtatttgtaagcatgttttttgtttgaaatttgatccaggattatccttggagatcactggagcaaagggtgagaagagaaccttttgtgttttcctccagaatccgccatatcaacggtggcggtaacccgaggccgagacaagaggaccccggactcaccgatgccgagttcaagaaggcgatggagcagctcaacaagcaggcatataggtccttagaccctcataagatggttgaatcaaacagaggaggcagaaaccatgcaaagagtgcaagatccaagccagctccaaacaacacggaagaggagaaagcatgtaccatatgtttggagacattcctggctggggagcaggtggtggccacaccctgcaaccacatatttcaccaagagtgtatcaccccctgggtgaaggggcatggcaactgcccggtgtgccggttcgcgctatgcgagaggaacaccgtctccgacaacagccagagtggcgttggagaggttgaggtagatctggacctgctggagatgatgagggccatggaggagatcttcagccgggtcacattctcaaacttcatgccatacaactagatgaatcagcatcaggtcatgaagacatgaactgatgaacaaatggtattccagtcttaatatcatggtgtgctactcacttgcatgatattccactacgaatttcatcaagattttctacctggcaatcttgtcaaactgctttgtgaaaccaggtaatgcattgcaacagtacaaacaacaggatggatgaacaactgcatatgcattagaggtaaggcagcaaaactaattgtgcgagatgtgccatatatttcttctgaaacacatactgtaatcttactccaacttgtatcatgataatgaaatatctaagaacc

SEQ ID NO: 1963 - DNA, 1241 bp, Oryza sativa
  ref <308>: DATABASE ACCESSION NUMBER: AK059923
  ref <309>: DATABASE ENTRY DATE: 2001-12-06
taattaagcatgtcatatttaatcttccttgtttgctgtactataagttcaaatgtgcatttctttgaaatgttacgctgttaatcttgggatatttaactttttgccacctttaagatgtggcaattgtcactcactgtctatgacacgtgggccctcatgtgtttatgacatatgaatttagtgacaaattctttatcaccgctcgtaagagtggcaaacagttaattattccgttaatgttttacagaaactatccaaaaagggtttgttcactttattaccaaaatcaaccttaccaacatttggcacaaccaactttggtagcgttggatgtgtttagtttgtgatttttttaaaattttagtagtgactttatgagagggaacttctggaactttcaaattttggtaaattagagagggtaagaatatgtttagtttgttaccttacaatttttttttgataacaccgaaaattggtagagttgaaaatgataataaagtgaacagcccaatatctttactgttgaatgttgagcagatctacgtcttgactcttgaatatatttctcctctgatgacaacagcattgaagccaatatggccgcgctgccattagccaccgccgaagtgtgcgacgcaaactcaaatccaatcatcgccggcgagctccgcgccctccctcccatcttcaaaatctacgggaggcggcaggttttcgccggcccagtcgcgacggtgaaggtgttcgaggacaacgtgctggtccgcgagctcctccaggagaagggacatggccgggtgctcgtcgtcgacggcggtggtagcgtgcgctgcgccctcttgggcggcaacctcgcgcagctggcgcagatcaatggatgggtcggcatcgtcgtcaatggctgcatcagggatgtggatgagatcaatggctgtgacgttggtgtccgtgctctcaattcgcaccctatgaagtcggggaagaagggcgccggtgagaagcgtgtgcctgtgaccattgaagggaccaggatttgcgacggcgagtggctctacgctgatgctgatggcattctcatctcgaggactgaattgactgtgtgaagttcctgaatgtgtcgatctgtacgtacgagtagttggtgcataaaaggggtgatgattaattgattatgccctcctccttgtgttgtatctaaaaataaatgtaatgctgcagccaggttccttttgccc

SEQ ID NO: 1964 - DNA, 1196 bp, Oryza sativa
  ref <308>: DATABASE ACCESSION NUMBER: AK059924
  ref <309>: DATABASE ENTRY DATE: 2001-12-06
ttgggacgcgggattccctcgccgccgccgccgccgccgccgccgccgccgcagtgaccacctcgctcgccggcggactcgattggctcaccggcggcgacggaggaggaggaggcatctgcggcgttcggcgcgaccccggagatggaggggttcctctgcgaccgcctgctcgacgcggcgcagcccatcgccgagcgcttccgggcgctcttctccctccgcaacctccgcggcgacgcccctcgccgcgccctcctccaagctgcaagggactcttcaaacttgcttgcccatgaggctgcatttgcactaggacaaatgcaagatgctgaggctatccctgcattagaggcagttctcaaagatctttcacttcatccaattgtccgacacgaggctgcggaagcgcttggagctattggcctggaaaagagcatttccctgctggaggagagtttagctgttgatcctgccgtggaagttcaagaaacatgtgagctggctattagacggatagaagagcaaaagaatactagtggagttgaaagtgcaactgtttcaccttttctctcagttgatccagcactgcctgcaaagcaaggacttccagtagaacaactaagggagcttcttctcaacgagcaagaaagcatgtatgaacgttatgcagctctctttgcactaaggaatgacagtggagatgctgctgtttctgctattgttgctgctctaggcgtcaaaagtgctcttctacgccacgaggttgcttatgtgttaggccagctacaaaacaaagctgcttcagatgcactttccactgtcctgaagaatgttgatgagcatccaatggtcaggcatgaagctgctgaggcccttggttcaattgcagatcaggaaagcattgcacttctggaggagtttgcaaaggaccctgagccaatagtctcccagagctgcgaagtagcactcagcatgcttgaatatgagagatcagggaaggcctttgagtttttgttcccgcagactcctcaggtgcagcaggagtcctaagtgagttgtgaaagtgtgaactgagagcgagaggcaggctggaatgtgtctaatcctgtaatccaaaccttataccagtctaccttgaattgatatgttcgtcaaaaggatttactgatcaatctctgggctctcattctagg

SEQ ID NO: 1965 - DNA, 1368 bp, Oryza sativa
  ref <308>: DATABASE ACCESSION NUMBER: AK059925
  ref <309>: DATABASE ENTRY DATE: 2001-12-06
atctgttccaaaccagtggaaagctagggtttcgccgactcgcgagtggagggcgctgctcgtcgccaggctcgtcgcgccgtcctcgccggcgggaaggccagtcctccgtcagcatcctctcttccgttggtcatcctccctctctttcgccagtcgccatcgctctcttccactggttcgctctctccgtcaagccgtttggttccgccggctctctctgccacgcccctctctttcgtcgactctctccgttgagctctctgagcaccttcacttaactggggccgtattgccaattcaatgatgggatcggcacaagattgggcatttggatggcagccgtggacgggaccggcactggaggacctgctcccacaactctcccatgaggagcaactacgattgcacaaccacttgcgtgagcacgagcgtatcctcaagtggcacaacaagaattctcctccaatatcttctctgcactcagaaggggagcgtgacttcttcatcattatccatgtccgctacgctctccaccattacaatgccaaacacccagatgaggagtttgatgctgtgaagcctctgatggaatccagtgtacgtttcaggggccaggtgtggttccacatcaacttctgggctcgctcccgcaagagcaaaaagatcaagcgcttctttgctgaggtgcactacaagcctcccagcagcagcagctctgtctgctcttacctgccatttccagtcccaggagctgagaggccacccagcagcagctccgtctcctcggatctgctacttccactcccaattcctgtcgttgaagcatgcaccatcattgaagagcctcttgggcagtacaggaagagctgcgcgttttgtcgtggtcacttagacattttacaccccatgggtcgtaaatttgtttgtggaaacgacaaggaccggtttgagcaacaactcttgccgtgcgggtctatagggcttgagatgccattcacttgccgcctgggtccggcctctgtcaacagtagtcatggggaaaaagaagactagggggaataatgaagtggccccttggacgcccttttgctcgcatcgtttgtgccaatcaagtctggtgataacagaaattgaattgtcttgtactaccttcgtcctcaaaatataagaaaaactaaatgggacatatcctactattatgaacctggataaaaatgattctactcagattcaatagtttcttatattttcaacggagggagggagtaaaacgttagcagtcctcttatcttgtgcagaatatgattgtacactgttcagaactcttgagattcagaatattgtttgcctgagggaggttgatag

SEQ ID NO: 1966 - DNA, 989 bp, Oryza sativa
  ref <308>: DATABASE ACCESSION NUMBER: AK059926
  ref <309>: DATABASE ENTRY DATE: 2001-12-06
aaaatccccaaatcctcctccctcatcagtcgtcacgcccaccaccccaccaaatcctcccttcgtcatgcccggcgccggctctcccctcctcccttgccggcgtcctcccctcctccctccgccagcgcgcttcaatgaatgcacggcggagtggccagcgagctctcggcggcgcggatggaggctgggtgtggccgacgagctccccgcagcaggcctcaacgccggcgcagatggcgatgagctcggggcggatctggcggcttcgacgcctcctcaccggcatgggctcggccggcgtctccctcctccctctgccggcatgagctcagccggcgtccctctcctccctccgccggcaccagctggcctcttccccacctcagccacctcctcggggccgagcagcgccggctctcctctcctcccttcaccggcggcggcgcggatctgggcccatcctccctcggccaacgacgagccgcttgtggtcgtcgtcttcctcgcttcgtctccacttccggctggcgacaaggttttggaggcggcggcgcggagcggagcacgggaacgacgacgaggtcggcgacgcggagcgggagggcgcgaggtgacagcgagtcggaggcacgccctccacaatgcaggttccagccgtttctccgccacgcgtggtcttgcgctagcgagaaatcgcgcttccctgtgtgggggcgaggagctctggtggggcgcgcgacctagcgccacgcacgcgcaaatccgagctggcgacgtgaggtaacgctccacgtcaccgcactgtgaaaggccttagaacaaattgtgaagatgcactgaacatcaaaagtgtgtaaataaaatgttatttccattgaacttctaaaaagttaaaatatcccaaacatatcatatggatcacatataggatagaaaaaaaaactaatttaagtcttgggaagaagaaatacgagctccgatcgatg

SEQ ID NO: 1967 - DNA, 1107 bp, Oryza sativa
  ref <308>: DATABASE ACCESSION NUMBER: AK059927
  ref <309>: DATABASE ENTRY DATE: 2001-12-06
catgcttgcttttggtactccagaaaagcaaatcttgatcgaacctatatttgctcaatggatacaatcggctcatggtaagacgacatatgggttcgatatactcttatcttcaacgagcggtcccgctttcaatgcgggtcgaaccctatggttacccggatggttgaatgctgttaacgagaatagtaattcgcttttcttaacaataggacctggagatttcttggttcatcatgctattgctttaggtttgcatacaactacattgattttagtaaagggtgctttagatgcacgcggttccaaattaatgccggataaaaaagattttggatatagttttccttgcgacggccctggtcgcggcggtacttgtgatatttctgcttgggacgcgttttatttggcagttttctggatgttaaataccattggatgggttactttttattggcattggaaacacatcacattatggcagggcaacgtttcacaatttaatgaatcctccacttatttgatgggatggttaagagattacctatggttaaactcttcacaacttatcaatggatataatccttttgggatgaatagtttatcggtatgggcgtggatgttcttatttggacatcttgtttgggcgactggatttatgttcttaatttcctggcgtggatattggcaggaattaattgagactttagcatgggctcatgaacggacacctttggctaatttaattcgctggagagataagcccgtggctctttccattgtgcaagcaagattggtgggattagctcacttttccgtgggttatatattcacttatgccgctttcttgattgcctcaacatcaggcaagtttggttaatttagttaattttgttgtactgtatcagcacctagttcattactcttgatggagggggaggatccgccttcttagatttctttttctatttatttttctatctaggattagaaccgtatacttggtagatagtaggaacggcacattatggcaaaaaaaagtttgattcagagagagaggaagcggcagaaattagaacagaaatatcatttgattcgtcgatcttt

SEQ ID NO: 1968 - DNA, 1256 bp, Oryza sativa
  ref <308>: DATABASE ACCESSION NUMBER: AK059928
  ref <309>: DATABASE ENTRY DATE: 2001-12-06
atccgaatttgaatccccacccgtttagcaaataaaaaaaatcccaaaagcccaagggcccgaattggcagcccaacgacggcgacggcggcggcgacgacgacggcgatggcggcggcggcggtaacggtcaagctcggagggtggagtagttactgttactgccctaccaccacgaggaggagcaaaccggcggcggtgaagatgatgatggcgctttgccctaccagcttccggatcgaattgcctcgacgaaccattcgggctgccatactgaacaagagacacaccgttccttgctaccagaggcaagaaggagcttcatctccagctccgcagatcgaagccaagtcaatggaggaggtatatgatgctttggctgagcaccttttttctgttttgaagaacattgaacatcttgactcaaaatacattgttggtatagctggaccacctggcgcgggaaagtctacagttgcttccgaagttgttcaacgtgttaataaacgctggtcccagaagcacgagaatggtagttcacttatttcaaccgaagaaattgccacgatgcttcccatggatggtttccacctttatcggtcccaactagatgcaatggaggatccaaaagaagcacatgcaagaagaggagcaccatggacattcgatccatcccggtttttgaaatgcctacagaccctgagagaagagggttcagtttatgctccatcatttgatcatggtgttggtgatccagttgaaaatgacatatttgtaaagccgcaacacaaaatagtgattgtcgaaggcaattatctattactggaagaagatgcctggagggacattagagccttgtttgatgaaaaatggtttatcgatattgacattgatgtctccatgcaaagagtgctccagagacatgtcgccacaggaaaagagccagatgtagcagcatggcggatctcgtataatgaccggccaaacgcagagcttatcatgaagtcaaaaaagtctgcagatcttgtaatcagatcggtggatttgtcaagataagagtccatgtcttcaattgctgattagatatctgctctaataatgttcagagaaagacactaccaatggttgtttccatggagatctttgtacatataataagctcaatgcatctctccatggtgatttttgtagatcaaataaacttatccccaaccagtttggttgtacagtcgatgatgaataacttattcaacaac

SEQ ID NO: 1969 - DNA, 1042 bp, Oryza sativa
  ref <308>: DATABASE ACCESSION NUMBER: AK059929
  ref <309>: DATABASE ENTRY DATE: 2001-12-06
atttttttggtttattttgcctccccaaccaagcacaaacacaagcctcgccgtattctctcggagcaaagcgaacgcgaaaccccacccgcggcggcgagaaatccggcgacgatgagccgcggcacgggcgccggctacgaccgccacatcaccatcttctccccggagggccgcctctaccaagtcgagtacgcgttcaaggcggtgaagtcggcgggggtgacgtcgatcggcgtccgcggcaaggactccgtctgcgtcgtcacacagaagaaagtgccggacaagttgctggaccatacgagcgtcacgcacttgttcccgatcaccaagtacatcggtctgctcgccactggcctcacagctgatgcaaggtccttagtctaccaagcaaggaatgaggcagctgaattccgtttcaaatggggctacgagatgcccgtagacgtattagcaaaatggatagcagacaaagcacaagtctacacgcagcatgcctacatgaggccccttggagtagttgctatggtcttgggctatgacgaagagaaaaacgctcaactattcaaatgtgacccggcaggtcacttctttggacataaggcaactagcgccggtcttaaggagcaggaagcaataaattttctggagaagaaaatgaaggatgacccacagttctcctacgaggaaactgtccagattgcaatttctgcattgcaatcagttcttcaggaagatttcaaggccaccgagattgaggtcggtgttgtgaggaaagatgatcgtgttttcagagcactcacgacagaggagatcgatcagcacctaacagccataagtgagcgcgactgagctacaatgaagttggacatgttactgcttcacactgcactctagtctttcagcagtgtcattttatttcatgttcagccaagaaacattcagtgaaccatttcatgtaactccaaaaaacagtcatcagctttacttgttggatcatcctctatcgttgtggttgaatttactacgatttacttgt

SEQ ID NO: 1970 - DNA, 966 bp, Oryza sativa
  ref <308>: DATABASE ACCESSION NUMBER: AK059930
  ref <309>: DATABASE ENTRY DATE: 2001-12-06
gtgcagcagcaacagtatagctgagattggtcatctgacatccttatctccctctccctccaagtgcctaacccaactcttcccgagcctttttctgatcattggacaaatggccgtctcttcagccgttctcgttgggctactcgtcgtgagttgcgccgcggtggccgcagccacgaggtacaccgtcggcgacggcgagggctggacgaccggcgtcaactacaacaactgggccaacggcaagtttttcagacaaggagacgaactcgtgttcaactaccaggcgagggcgcacacggtgacggaggtgagccagaccaacttcgacagctgcaacggcaacagcccgctgagcaacgacaacgggggatcgaccaccatcaggctctcctacccgggcatgcactacttcatctgcaccatccccggccactgcagcagcggcatgaagctcgccgtgaacgtcaacggtgacccgtcgtactctgccgcctcttcgccggcggcggcgagcgctgtcgccgccgcggcagcgggggccctgatcaagctcgcgctgttctgatggccgcggtgcatgcgagccagggtagagacagtgcgtggaagccatgcaggttcttgtcgatcggccgttgcacgttggtgactcgtgcaatgaagctgaccgtgtttcttctcgtttctcgtgtgatttggtcaccgtgcaactcgtatgtagtaatcaccttagtttgttgtggtgattctaaatttgcttgtgccactggtgtatcgtcgtgtctgggggctctggttatgcatgccatggtttgtgttggtgaaatttcttatggtgggtataaataaaaccaagcatgttaaaaacatgctggtggtaatggtatagtcgtggttgtataactataccgaagtttaattacttgacctttgtaatcacagcttgacccctcaactttagcc

SEQ ID NO: 1971 - DNA, 1263 bp, Oryza sativa
  ref <308>: DATABASE ACCESSION NUMBER: AK104154
  ref <309>: DATABASE ENTRY DATE: 2002-08-28
agccagcaggcggcacgcaacgcctcgcttcacggcctcggctagagagacgcgtgcacgcgaacgcagatgaagcccttgctgctcacgccggccgcgcggctcgcggccgcggcgccgtcaacgctctcgcggctgctccgcctacaaagcggtcgccaccatgcgcacgcctcctcctcctccaaccgcctattgccccctctcctccgtcctcctcgcgacggtttccgcggcggccgcctcatcgcctcctcctcctcctcctcctctcagatggcggcgcctgccgatgcaccgggcggatccgcggacgcgttcgaggtgatccgcgctcaccaggaaaaagctgctcgacttcctccggttgaagaaatacggaccattctggaccaaagtgttaggggtgtccttgccacccattctcagggtcatgttggctatccgtctggttcaatggttgattttgcatgtgatcaggatggttcccccatattagcagttagtagtttagcaattcactcaaagaatctctctgaaaatcctaaatgctcgcttctggttgccaaagaccctgaggacagaacagatactgtgattactgtatatggtgatgccacacctgtttcagaccaagaaaaagatgcagtacgaagtgcatacttacgaagacatcctgaggcattttgggttgattttggtgacttccgttttctgcacatcaagccaaaagccgtgcgatatgtgtctggggttgcaactgccatccttggttctggagaattcagtgctgctgagttcaaggaggcaaaagtggacccaatatctcaattctcaacccctattacgagccacatgaataaggatcattctgatgatacaaagctcattgtgcaatactcaaccactgtcaaggtggactttgcttacatgcttgatgtggatagtcttggtttcaatgtgaaggcgggctatgatggaagtgttctgaagctgcgtatccccttccctaggcgtgcacaggacaggaaggatgttaagacacttattgtggaaatgctccaagctgcaaaagcctcatcgtcttctgctgaatgaatgtcctgttctagaaagggacgtctttgtccttgtaaatgaaataaagatgtccttttcgatgagttttttctgatctaggaaatgtcatgtttttacacatgatatatcacaatgccacagcttaacaccgaacagatgccaatctacttgtatattatttac

SEQ ID NO: 1972 - DNA, 1023 bp, Oryza sativa
  ref <308>: DATABASE ACCESSION NUMBER: AK104155
  ref <309>: DATABASE ENTRY DATE: 2002-08-28
gcgttgctgcgacgacgcggcccgcctcctcctccgccgccgctccgctccccctcttcctcctcctcgccgtcgccgccgccgccgccgccctgttcctcgtcggctccgcgtccctcgccatggccggccacgtcctcggcggcgcgcacgacgccccctccgccgccaacagcgtcgagaccgacgcgctcgcccgcttcgccgtcgacgagcacaacaagcgcgagaacgcgctgctggagttcgtgcgggtggtggaggcgaaggagcaggtggtggccggcacgctgcaccacctcacgctcgaggccctcgaggcggggaggaagaaggtgtacgaggccaaggtctgggtcaagccgtggctcgatttcaaggagctccaggagttccgcaacactggggatgcaaccaccttcaccaacgccgacctcggcgccaagaaaggtggacatgagcctgggtggcgtgatgttccagtacatgatcctgtagtcaaagatgctgcagaccatgctgtgaaatcaatccagcagaggtcaaactccctgtttccatatgaacttctcgagatcgttcgtgcaaaggcagaggttgttgaagacttcgcaaagtttgacattctgatgaaacttaagaggggaaacaaggaggagaagttcaaagccgaggtccacaagaaccttgaaggggcatttgtactgaaccagatgcaacaagagcatgatgaatcgagcagccagtgaaccttgccacattaagctgtagttatgtagtttgtgttcaataagaaaacagtgaacatgcacccttccgtttctatcgggacataggctggaacttgttcctaacatcgatgaaaagaagacactacactatccttttgttcctgttgctcttagtgtgataatacgatactggtcgtgtaacttctcaagggaaccgtgggtctatgccatacagcttgtgaatgtgaaatcctatgttgatacttctcaagtcaccactctttggttgctt

SEQ ID NO: 1973 - DNA, 981 bp, Oryza sativa
  ref <308>: DATABASE ACCESSION NUMBER: AK059931
  ref <309>: DATABASE ENTRY DATE: 2001-12-06
agtccgcgattcggccggttaccctctgatcgagagagagcctcacacccgaaggccggagagcgagagatcgacaaaggcgccgcgccggggcagcatgtactcgaaaccggaggacgtcggtggaggcgtcaccaccgccttcgccatgcagggcaaggtccccctcgccgcctggtccaccggcctcttcaactgcttcgacgactgcggcaactgttgcgtgacgtgcctgtgcccgtgcatcacgttcgggcagatcgcggagatcatcgaccgggggtcgtcgtcgtgcgggacgagcggggcgctgtacgcgctggtgatgctcctcacgggctgcaactgcgtctactcctgcttctaccgcgccaagatgcggtcccagtacggcctgcaggagaagccctgcgccgactgccccgtccacttcttctgcgagccctgcgccctcccccaggagtaccgcgagctcaagaagcgcggcttcgacatgaacctcggatggcacgcgaacatggagaggcagggtcacaagccggcgatgaccatgccgccgcacatgttccccgggatgacacgctgatcgatcgagtgatcagcggcttctctgcaagagatgggcaaggcagggcagggcagggcagcttgctatatatgccctacatacgactatacgagccagatttttcttgcgggtttgtaaaaaataattcaaaatgtctataactacttacgcgtaatgcaaattgcaagaagaatttgatggttcgtagatcacatagccaggcttagcagatggggaacttgttcttgttggtttccctcggttcctttttatataaacctaccagcaggtagttgtaatatgtatgcatgtatgtgcaattttcatttcttgatgtgtatgctgtttcgtaaaccatggcacatagaaatgatttccgaattcagtataatacaaatttccactatttgtgc

SEQ ID NO: 1974 - DNA, 1089 bp, Oryza sativa
  ref <308>: DATABASE ACCESSION NUMBER: AK059932
  ref <309>: DATABASE ENTRY DATE: 2001-12-06
aaacaatcaagcgtgtcaggttgcgacttgtgacaaacatgcatacggatgcaggcgacgatttttccgagagttgcaggagcacggagcacttcgtccttgtgcatggcgccggccatggcgcctggtgctggttcaggctcctccgcctgctccaagactccggccaccgtgtctccgccgtcgacctcgccggcgcggccggcagcctcgtcgatcccaaccacgtccgctccttcgacgactacaacgcgccgctccttgacctcatggccagcttaccggccggcgacaaggtaattttgattggacatagtgcaggaggtctaagcgttgtccatgcaatgcatttgtttggggacagaattaagcaggcaatcttcatcgcagcaaccatgcttcagttcggctaccaaactgaacaagacatcaaagatggtgtacctgatttatccgagcatggagatgtgtatgacctgacatttggtctaggagctgatcatccgcctacagctgtggcattaagaaaggagttccaacgcattattctctatcaacaaagcccccaagaggactctgcactagcttccattctactccggccatggccaacggcgctcagcacggccagattcaccggcgacgatggaggagttgagagcttcatcgacagggtccgccgcgtctacataaagacggagaacgaccggatggtgcagccggagcaacaggaggcaatgatccgccggtggccgccaagcaaggtgatggtcatggacaccgaccacagccccttcttttccgcgccggagcttctcttcaacctcatcctcaagtcgctgtgaccgcaccatgcatattcacattccaagctagaagacgcttctctcctgcatgatgtacctgctgatcaccaacgacttccttgattctacaatatgtggtgtgtgtttatacacgtaagattagaccgttaccaagcaaatcaacaagggtctagtgtttttcttccgccttacgctcaaatcagtgtacattaacaggacctatatcacatggaaaatatgaatacaggaataataacaggac

SEQ ID NO: 1975 - DNA, 1264 bp, Oryza sativa
  ref <308>: DATABASE ACCESSION NUMBER: AK104156
  ref <309>: DATABASE ENTRY DATE: 2002-08-28
gcaggtaattaagcagtacagcaccaattaagcaaagccacagcaacgagagagagcttgtgaagttgtgatatttcattttgaccatatgggttactcctactcttccgccgccgtggcggtgagcgttttggtggtggcgttggcggcggcggcgtcgggccagctgtcgacgacgttctacgcctcgtcgtgcccgaccgcgctgtcgacgatcaggagcgccgtgaacgcggcggtggccagggagccccgcatgggcgcctccctgctcaggctccacttccacgactgctttgtccaaggatgcgacgcgtcgatactgctggccgacaatgccaccttccggggggagcagggtgcgttccctaatgtcaactcgctgaggggattcgaggtcatctctagcattaagatgcaactcgaggcatcttgcaggcagaccgtctcctgcgccgacatccttgctgtcgccgcccgcgactccgtcgtcgccctaggaggtccatcgtacccggtggagctcgggaggagggacgggatgacgacgaaccaaaccatggcgaacaccaacctccatccaccgaccaccgacctgggtaacttcgtcactagcttcgccgggaaagggctcagccccaccgacctggttgtactcactggagcgcacacggtgggcgtggcgcagtgcaccaacttccggtcgcggctctacggcgagtccaacatcaacgcgccgttcgcggcgtcgctccgggcgagctgcccgcaggccggcggcgacaccaacctggcgccgctggactccacccccaacgccttcgacaacgccttcttcaccgacctcatcgccggccgcggcctcctccactccgaccaggagctctaccgcggcgacggctccggcaccgacgccctcgtccgcgtctacgccgccaaccccgcccgcttcaacgccgacttcgccgccgccatggtgcgcatgggcgccatcaggccgctcaccggcacgcagggcgagatcaggctcaactgctccagggtcaactgatctgtatatctctacgaaatgcgtcgatctactgtacctacgtggatagaatcgaatcgaataagactagactattaataagctaataagtgattagcgatatcgcgatatgtataagtgcgcaacgtgatattgaatttatgtaagggcttgtccggtttattgccattttcaacactatcgacttttaatattattattaaattttggtag

SEQ ID NO: 1976 - DNA, 1131 bp, Oryza sativa
  ref <308>: DATABASE ACCESSION NUMBER: AK059933
  ref <309>: DATABASE ENTRY DATE: 2001-12-06
attctgccttccgctccgccactcagcttcccacccacggagagaaccatgtcgcctccgccatccgacagcaagaagggctcgggcgccgcgcgcttcatcggctccacggccgctggtgtgaccgagctcttcctcttccacccggtggacacggtcgccaagcggctcatgaccaacaaggagaacgtctcgggcatgagtggcttctccaaagtcattttccgggatgccgtcgacaagccgcttctgcagcgctaccgctcgctctttcccggcctcgggttcgccgccggctacaagatcacgcagcgcatttacaagtttggcggccagccgatcgtgcgcgactacatcaagaagaaccactcggagatcttcaccaacacgttcagtgagaagaatgccaaggtcatgatgcaggccacggccggctcgctcgtgggcattggcgagatctttttgctgccgctcgacgtgctcaagatccgcgcgcaggccaacccgcaggctattgctggccgcggcattgtcgacattgtcaaggccgagggctttgcgctctaccgtggcgccggctggacggctgcgcgcaacgcgcccggctcgtttgcgctctttggctgcaacgcgctcatgatggagtacgtcttcaagcttgagaaccacagcgacgcgtcgttcctccagttcgcgctcagctcggtcgccggcgcgtcgtcgtccatcattgtgtcccagccgctcgatgtgatcaagacccgcgtgcaggctcgtccgtttgactcgcccgagagcggtgcgaccgtgatcaagaacctgcttaagaacgagggcgccggcgcgctcttcaagggtctcgtgcccaagctcagcgtcgtgggccccaagctcgtgttctcgtacacgatcgcgcagtacctcattgcgcacttcgaaaaggcctttgcgtaaggcgcttgtcgtctcgacgcaataattgtgggacggacatgtttgcgaccacaatttattggcggggtacttttctggataggagttccatcagttggatggatacgatagattctacttcgttcgcttgcggacgcccaatgtgcatgcttatcataaacgaccgcttttctacgg

SEQ ID NO: 1977 - DNA, 903 bp, Oryza sativa
  ref <308>: DATABASE ACCESSION NUMBER: AK104157
  ref <309>: DATABASE ENTRY DATE: 2002-08-28
ctgcgccgccgccgcctcctcctcctcccgcatctccctcctcgcctctcgctgccggccgcgcttcgccaagatgaacaaggagaggcttatgaagatggccggcgccgtccgcaccggcgggaaaggcaccgtgcgcaggaagaagaaggccgtccacaagacggggaccactgacgacaagaggctgcagagcacgctcaagagagtaggtgtcaacaccatccccgcgatcgaggaggtcaacatcttcaaggatgatctcgtcatccagttcgtcaatcccaaagtgcaagcttccatcgccgcaaacacatgggtggtcagtggctccccacagaccaagaagcttcaagatgttcttcctgggatcattaaccaattgggtcctgacaacatggagcacctaaagaggattgctgaagagatgcagaagcaggtagctgctgcaggtgccactgcccaggcaaaggaagagaacgatgatgatgttccagagcttgttccgggagagaatttcgaagaggtagctcaggagacaaaagcctgatcatagataccacaagtagtgaaatgttacttgaccgctgttctgaggtcatggttttctatgacggccctgttttgcttctcctcgtaggccaatctttgtatttgcaattggaaacttttagtttctccgagtttttacctaagttatgaatgctgagatgccatggagtcctttttacctggttttgatgttcacatttctggttggttcagaatatactagcatcagggtttgcagatgtccttcacgtctcaactatctactagtatcatttatgtttggagatatcctgcaatggtacagtgttgatttttccccaaatgaaaaataatgatgtgttttacctgctc

SEQ ID NO: 1978 - DNA, 1084 bp, Oryza sativa
  ref <308>: DATABASE ACCESSION NUMBER: AK059934
  ref <309>: DATABASE ENTRY DATE: 2001-12-06
gagtttttattttgttttctttttttatttaattgattcgatgaactttgtgccattaaaattacttcttgagctccgaaaattcacggaaaattccggagagtattttagggcacaaagaatattgcaaaatattcccggccaatgatttttaagggaaaattttaattctcccattatttcacttgattaaattgatttaacttttatttaatttctagaaaatgtattattaattgatttttattcccgaacgaaaatcggggcgttacaacggccatcaccaccactaccccgacgttccagcgtggatcggagtggtccatcctcttcacgtcgcgggtacgaagcggcccacacatctcacggtcgtccttcctttcagcacaccccagcaccggagtacaccagggggtcagccggatcaggggtacccacgtcgagcacggcaccaccacgtccgcaggtattccaaactccgccttatgttcacccctcgcagggagcttctgggtcggcacacttcccttacatgccaacgggggacaacgtgttgaacacaccagtatggggacttcatatcactccgcgtgcgccagagcagggccacacacagcatacatacgatgagtacggttcggcgtcgacgcatcacggagtgcctgcttactcccctcgcacagcattcattgaggacttctttttcactgatcctccccagggggaagtagggatggattactggcacgcagcacctcaggtcacacagccgacgcaggagacggaggccggtcaggggccagacgtgacaccacagcaggcagctagagataggcacccccctgataatttgacatatcccactgagcagattaggcgtaggaagaagggaggacctagcaagcgtgcgaagggcactgatcgtccttgacttatctatttgtattaaacttttagtcatttatgttctgtccgtactatttgagaaacactttacgattaacttagtactatcaggactatttcataaacttcttcggataattactcagtagcatacccttcgaatgaatcatgacaaatt

SEQ ID NO: 1979 - DNA, 1104 bp, Oryza sativa
  ref <308>: DATABASE ACCESSION NUMBER: AK059935
  ref <309>: DATABASE ENTRY DATE: 2001-12-06
caaagaagtcattttgcgctttgacacgaagaagaccattcagtccaagggcacgtggtacaccgactcgaacggcctggagtttgtgacgcgtgtgcgcaaccaccgcgatacttgggatctgaagttgtcggatgatcaagagtttgtggcagcgaactacttccccatcaccaccggtgcctacttgaaggatgacaaggtccagctcaacattgcgacggaccgcgcgcagggcttgggaagtcttgaggatggacaaatggaagtcatggttcaccgccgcctgctgatggatgacgaaaagggcgtcaacgagcacttgaacgagacggagacgctgtacaacccgacaacaaagacaagtacgactgctggtctgattgtgcgcggcagtttgttcttgaacgtcgacaacgcaggtgatgacggaatccgcagccttcgctcgaagatggagcagcagttcttcaccccgcttgctgtgttccgcaagtcggtcgcggatgaagttgatgcgaagctgccgtggttgacgctcaacgaattcccagagaacgttggtctcacgactctcgttgaacttggcaaagagtctcttctcgttcggctgacgcacctctacgcgttggacgaacactcgtcgctctcgaagaccgtggattttgattttgccaagtactttgtcgtggcgggatcgagcttgtcggaggtcactgaactaaccctctctggcacgatgcctgtcgctgagtctcgtcgagcaaacaacctgaagtggagggtggaaggtgaagatgacgatgacgtccccgttcgatttccaattccggtcaagggcacgtctgtccaactgcaggcgatggaggttcgtgcgttccgtatctcgttcaccaagtcggagaagcaatccgcgtcggcgtcgaagtctgaaggaaaggccatcgagatgatggaggacgcgtgggtcaagcagcttgatgctgcgatcgccctcgcgcccacccaagtggaacaagtgattgcgctggagtaaacaagtcggtggagaatgggcccgtcgattcccattcaggtgaatacatgtacacagctttaatcgtt

SEQ ID NO: 1980 - DNA, 1141 bp, Oryza sativa
  ref <308>: DATABASE ACCESSION NUMBER: AK059936
  ref <309>: DATABASE ENTRY DATE: 2001-12-06
gctgtacagcggttaggagttcgacagagtggggagaaagccggcgagggaagccgaagcatcgccgccttccgccagcgccccaccggcggccggcatggacgaggagacgcagaagaaggtggagtccacggttctggagatcctccggggctccgacatggagtccctcacggagttcaaggtccgcaccgccgccgccgaccgcctcggcatcgacctctccatccccgaccgcaagcgcttcgtccgccgcgtcgtcgaggggtacctcgaatccctctcccaggaggatgagcaggagcagcagcaggagcaggccggcggcgccggcgaggaggggaaggacgaacaggccgaggaggaagaggaagaggaggaggaggaggaggaggagcggggaggtggaacgaagagggagtacgatgacgagggagacctcatcctctgccgcctttcggccaggaggagggtgactcttcaggagttcaagggcaagacgcttctgtccatccgagagtactacttcaaggacggcaaggagctgcccgccaaagggataagtttgacagttgagcagtgggaagcatttcgtgattctgtgccagcaatagaggatgccattaaaaagcttggagaatcatcggactgaaagcatgtttcagaagccccttttgcctgtatcaaatcaagaaggcctttgttctggccctttacttagggccagtacaggctgtaagtccgctatggagggtctggaggtactagggttcctataaacttttgtaaaacttatcccttagtcaagctgcatgatgctgtgtagggtagacggttggagacttggagaagtaatttcttcatatgctcgtcttaatattggagttagtgatgtacactgacatgcatctggctactttagaaaaatcagacatgggttccagcaacaagcctcttttgtttggatcatgaggcactgtcatcggactaactcatctttatgaagaattagttctccgccgctagatgttagtgtttttcgttcatgcccttacacttgacaattgcgtctttttgtctggaagttgcaatactgatatgttttgggcaggtgatctgagccctttatcattgtttctcg

SEQ ID NO: 1981 - DNA, 1190 bp, Oryza sativa
  ref <308>: DATABASE ACCESSION NUMBER: AK059937
  ref <309>: DATABASE ENTRY DATE: 2001-12-06
atcgagagggagggagagtgaactgccaccgtccgttcgatccttatcaaaacagcatcgcgtcctctgcctcctcttccccacgccgccggccgcgccgccgctgccgccgtcgccccgcgcccttctccctcatccccgccgctgtgaggtgtcaactccgtcgccgcctcccctgtggtagcacgaggggaaccagggctcacatgctactcgatcggggcgtaactttggatagccatggcggctatgcttcttcgccttcatccctgccctctcctctttccgccgccgccaccgcacccacatctccgccgccagctggccgtctattcgatcccgaaatcctccttccgatccgccgccgccgcggctcgagctagaaaccctccgcgtctggcctccgtcggtggagccgagcgacggcgcgtgggtgacgattatgatgaagaggaagaggacttgggacaggctctcgagagaacgcggcaacttgtcgagtgcgcgatgttcgcatccgtcgctggcctcgcgtacttcctcagcaactccctcgccatcgagaattactttagctgcttttttccattgccgattgttatctcctccttaagatggggactagaagctggcaggaaaactgcggtggctactgttttactgctattcacattgtctggccctgtaaaagcatcaacttatctgctcatgcatggagtagtaggtctggccatgggtactatgtggaggttggagaccaactggattgtttccatcatactctgctcaattacccgggctctaggggcttgtggatacgttttattgtcgtcatttctgataagagagaatattcttggattgataacagtcaatatacatgcttccctgacatacattctggcggcagctggggtgaacacgattccttccatggatgcaatttatgtactctttggaacgctgcttctactcaactgtggattctttatcttcctactacatataatgtatacaatattcctgactaagctcggaataaagccttcattgagacctccaagatggctggacaaagcaatttgagtttacaggtagagtggcaacttactcctttgtaccttgtgcgctgactgaaaccggagcattcagtgtcacaatgcttcctaatgtagattccgcagagtgtc

SEQ ID NO: 1982 - DNA, 1167 bp, Oryza sativa
  ref <308>: DATABASE ACCESSION NUMBER: AK059938
  ref <309>: DATABASE ENTRY DATE: 2001-12-06
gtgcgtattctttgcttccgctctcgatagatcgcgaggaaaggagtagtacggcggcggcggcggcatcgtcggcggcgatgaggtcggccatgacccgcctgatccgttcctcgtcccccgtagtctcgccctcccgtctcagcgccgcaaacttgttaaagaacaataatgggaaagctttcttgagcgaggatgcttccaagcgtgtggaggagcctttcaaggtggaggaagcagaaaccgtgaaggtgccaccgccttccccggacaagcttcttgtgctaggtggaaatggttttgttggttcacatgtttgcaaggaggctttggacaaaggatttactgttgctagtcttaatagatctggaaagccatcaataagtgaatcttgggctgacaaagttatatggaacaaaggcaatctacttgaacctgattccctgaaggatattatggaaggtgtttctgctgtggtatcatgtgttggaggctttggctcaaattcttacatgtacaaaattaatggaactgcaaacatcaatgccatcagtgttgcagctgagaaaggtattaagagatttgtgtatgtgtcagcagcggactttggttttgtgaactacttgttgcaaggttattatgagggcaagagggcaactgaagctgaactgctatcaaaatttacctatggcggagtgattttgaggcctggttttattcatggaactcgccgtgtcggtagcgtaaaaatacctcttggacttgttggttctcctatgcaaatggttctccaaagtgcgaagccgttgacgagattgccgctggttggcccactgttgacccctccagtgagtgttgcctccgtggcgaaggtcgctgtaagagcagcaactgatccagtgtttcctccgggtattgttgatgtgtacggcatcatgcgatacagtgaccagaagtagaagtaataaatattacaccggatcatacaaattctatctccgaatgaataagcagatgtggctggcacgttagacttttgcgcttgtttcgttttcatagatttttacagttagtaggggaaccttatttaactgatccatgtcaatcagtggtgaagatgtatatagtaaataaatcgtatcatgctcaccatgtttgattgcagtc

SEQ ID NO: 1983 - DNA, 953 bp, Oryza sativa
  ref <308>: DATABASE ACCESSION NUMBER: AK059939
  ref <309>: DATABASE ENTRY DATE: 2001-12-06
aaaaccctaccgcgacttccttccttccttccggttgcttccgccgatcgacttctcgccccccaaatcgattcgccccccgcctcgatctatcgattccgcggcagcgccccttcgatcggttggagatggccaggacttccttcaagctcgagcacccactggaaaggaggcaagcagaatctgccaggatccgtgagaagtactcagacagaattccggtgatcgttgagaaggctgacaagaccgatgttccagaaattgacaaaaagaagtaccttgtccctgctgatcttactgttggccagtttgtctatgtggttcggaagaggattaagcttagcccagaaaaggccatctttgtctttgtgaagaacacattgccgccaactgcttctttgatgtctgcaatctacgaagagaacaaggatgaggacggcttcctctacatgacttacagtggcgagaacacattcggctctgcgtaattcatcaactgttgctgctgctgtaaataaacatggatggccaggtgtcatggtcaacctcctgtgtacatagcatgtccctgtgctggattgcctcaatggtctaatgcgtccttagctttttaagtggttcgtatgctatcgtttgaaagttggaacgacccatagaactgatattattcattctgggttgatgacgtttcttattctaccattatgcatttgcaacgtgttttaagtctgaagtgtgattgggcgtttcaatttcagttatctgttatcattgttaattgcaactgattcaggccaataagaaatcaaggccttcttaatcgtcatatctcgcatggttgcacgcatgattgtttttttttttttggtagttgttgttgatgttggagactgcaccgtgttttcttctcgtctcattccatcagttattttcattttatcaatttggtgttt

SEQ ID NO: 1984 - DNA, 1045 bp, Oryza sativa
  ref <308>: DATABASE ACCESSION NUMBER: AK059940
  ref <309>: DATABASE ENTRY DATE: 2001-12-06
ctcgatatccgtccccgtctttccttcccccgccgccgccgccgccgcctgcgccgctgcgctatctccaacactgcgaacagcggtgccggcggcctgctcctgctacttccgccgtatactctcgcttctgaccccttgcgctcaagtcaatcttcccttgcccacggcctcgactcgcgtctgctcgcgagttcgcccgccgccgcctgcgccgatctccatcccgcgagcagcggtgccgtcgtcttgctgcttcggcctccggttagcacccgtgcctatgcacatcccctttctttctcatccctctctacctgcaccttttatcttatgccccacgctaggtacgcccccgctgctccccgcaccatggttgggctttcggaaggagagaagcacttcatccgcgggggcatcgcgcaggacctccgcaccgacggccgcaggcggctgcagttccgggccatctcggtcgagaccggagtcatacctcaggcaaacggctctgcgcgtgttagactcggtgcgactgaagtcatagctactgtaaaggctgagttggggaaaccaagcattcttcatcctgataaagggaaagtttccatttttgttgattgcagcccaactgcagcacccatgtttgagggtagaggttctgaagaattttctgctgagctctgtgttgcactgcaaagatgcttactcggtggtaaaagtggggcaggtctgctgggatctctacattgatggacttgttgttagttctgatggaaatttgcttgatgcattggctgctgcaataaaggtaattgacacttaaattagacaatatcttctacgaagtttaggtcgttgcaaatatttagtgcagccaggaaatgaagctacaatattatactggttaaaaaggttaatagattttatagaacattatgatggttttggagattggagggccctgctttcaagttttgtaaaaatggtcttatgcaatgaatcctctatcttgttcaataaaaagaaaatccatgattatctttgc

SEQ ID NO: 1985 - DNA, 1012 bp, Oryza sativa
  ref <308>: DATABASE ACCESSION NUMBER: AK059941
  ref <309>: DATABASE ENTRY DATE: 2001-12-06
cattgcagactccctctcacgccgccgccgcctcgccgctttcctctctctccaccgccaccgccaccgccaccgccggcgcgtactcgagcaacgttgaggcaggagttgggataggtatctgagttgaggtgaaggacgggagcgatggcggaggcggcgccgattggcctgtcgtgggcgcccaagctgccctccctgccgacgaccagcggcgggaagaaggacacgggagccagctctagcagagcgcaggggtcgctctggaagcccgcgagcgagctcgtcgacgggctcttcgtgccaccgagggacccgaggaaggccaacaagctggccaggaagaacgtcaaggacacctccggcaagggctggttcgacatgccggctcccaccatcactcctgagttgaagaaagatcttgagattttgcagctgagacatgtaatggacccaaaaagacacttcaagagggcaggaaaatccaaggcccttccgaaatacttccaagttggtacagttattgagcctgcatctgagttcttctcaagtaggctgacaaagagggagcgcaaaacaacattggttgatgagctcttatctgatcaacatcttaagaactacaggatgcgcaaagtaagggaaattcaggagagccgcactccaggaggcagccagaagtggaggaacaagggcaagaaaacactcaaaagagccaaggataggcggaaatgagtttttactgctgctactctcactcagtttaccatgaggaagagatgactgattattgggagctaaaggttgagacaaccttcaaattgcgacaaaattagattgtgataccattgtaatgtgggaaattcatgcaatatgatggatgcattagctggtggagctgagctagattgtcggttgctgtatctccctcttttcatttatgagcccactgtttcaggtatgctgtacctggatttcagagtaaaagtaccaatgtattgcttggtctgtg

SEQ ID NO: 1986 - DNA, 1093 bp, Oryza sativa
  ref <308>: DATABASE ACCESSION NUMBER: AK059942
  ref <309>: DATABASE ENTRY DATE: 2001-12-06
ggtgcctgcgagcgcgctgctcccgaccatgccgcgcatcggcatgggcacggcggcgttccccttcacctcctccgaggaaaccacggcggcgctgctccgcgccatcgagctcggctaccgccacttcgacacggcgaggctgtacgcgacggagggctgcgtcagcgaggccgtcgcggaggccgtccggcgcggcctcgtcgcctcccgcgccgacgtgttcgtcacctccaagctctggtgcagcgacctgcacgccggccgcgtcgtgccggcggcgagggagacgctccgcaacctcggaatggactacgtcgacctgctcctcgtccactggccggcgaccgtggcgccgggcagctacgacttcccgttccccaaggaggagatggcgccggcgttcgacatggagggcgtgtggcgcggcatggaggagtgccaccggctgggcctcgcgcgcgccatcggcgtcagtaacttctccgccaagaagctggagcagctgctgtcgttcgccgtggttcggccggcggcgaaccaggtggagatgaacccgatgtggcagcagaggacgctgcgggaggtgtgccggcgagagggggtgcagctgtgcgggtactcgccgctgggggcgaagggcacgccgtggggcagcgccgcggtgatggactccggcgtcctgcacgacatcgcccaaaccaagggcaagacgcttgctcagatttgtttgaggtggatgtacgagcagggtgatgttttgttagtgaagacatacaatgaaaataggatgaaggagaatcttgatattttcgactgggagctcactgaggaagagagagacaaaatcagcaaactcccccagcagaggggtctgactggaatgcagttcgtctgtgacaatgggccttacaagtgcgtcgaagatttgtgggatggtgcttaacatgtcgcaggctggccctatgcaccaataatctggatggatcatgcttgctggggatctagcaaaataatttgtaattcaattttaatcttctgtcttctcgcaaaataattgtgtgaaatggagcgccagatgtgctcaattgtt

SEQ ID NO: 1987 - DNA, 1129 bp, Oryza sativa
  ref <308>: DATABASE ACCESSION NUMBER: AK059943
  ref <309>: DATABASE ENTRY DATE: 2001-12-06
aagcttattatgcacattcgaattgctagctagctcgtcgaagaaaccaaagtgcgagcgatcggctagctgctgcaagaagccttgaccatggaggccagacaccgtgtgatgtcgctgctgctggtgctggtgatcggctgctgcgcctggggctgccgccctggcgcggcgcaggtgcccgtcccggcgaggacggacgggttcgtgtacggtgggaaggcgccggcgctggaggagacggtggtggtggaggcgtacttcgaccccgtctgcccggacagccgcgacgcgtggccggagctgaagaaggcggtcgagcactacgcctcgcgggtgaccgtcgtcgtgcacctcttcccactaccttatcacagcaatgccttcatttcctgccggtcaattcatgccgtgaacaagataaatccgtcgtttgtgtatcccctgctcgagagattcttcaagtaccaggagggttattacaaccagccaacgtatgggaaaacaagagctacagtggatgcagaggtagctaaaaaccttgttgcccccgtcattggggaagccaatttggcagcatacaaagcaggtttcaatgattcaaaatcagatcaagccacacgaatttctttcaagtatggttgcgcacgaggtgttacgggaacaccgtacttctttgtgaatggcatcccccttattagtgactctggttccccactggaatacaacaagtggaaatcaatccttgatccattggttggcaagatgtagagagtgtttcaactaaagtcctctgcctggtgttaaatacaagactcaagacaaataagcttggcgcaaaaacagtatgatttcgccaagatatagatggaacgatattgatcacaaagatcaagtttagttaggcaaataaaagggcaaccctactctaatgacatatattgtctttaccttgtattatgagacagaaaagaatttctataatacaaaagagatgtagctctcacatacaatggtatcccagtgtgctaccaacaagacttgtatgaaatatagtatgcattttaagatttcggatgttatgccaaactacattgataaggaagcagtgttacattccttggttttc

SEQ ID NO: 1988 - DNA, 973 bp, Oryza sativa
  ref <308>: DATABASE ACCESSION NUMBER: AK059944
  ref <309>: DATABASE ENTRY DATE: 2001-12-06
acaggcggacacagtcctcactcctcagcggctcagcgcagaggtctcgttcgtgcggtgtcccctgctgccgcccatgccgctgcggcgcggcggagccctccctctcagcgccccgcgggcggcagccggtggcctccgcggaggcggcggccgtggtgccgcgcttctccacccgacctgcttgtcgccgccgggaacaactggccgagccttgggcctcagttgccagatgaaaagaaccagatggaagccagtctttgccttggaaacaggtggaccatctaacgctgacaaccaagatttcgaagatgatggtggctttcttggcagaacaaggctgggaagactcatccaggctgctgcgagggaactacttgaaaaactgaattctgccaggaacaaatcccccacaaagattttccttgtgctccttggcttctataccgccaatgcattggcaacagtcctggggcagactggtgactgggatgtttttgttgctgctattgtagtggctaccattgagggaattggcatgctcatgtacagaaaaccggccagtaggcctcctggacgattttggtcaatgatcacaatggtgaactactggaaagccggcgtatgtctgggcttttttgtggacgcgttcaaagtgggaagctgagtttccaaatcaccttcttatatgtacttacaagatttattcagctgacaatgatacaacgagtgaactccaagggtcgaagctgctcctgtggtgttgtatgcagatagatatgctgtgaactttacttcggctataaaatgtacatatgatgtagtcttgttttgtatgaaattcatgtagatatattatactctagtttgatgcccatctgttcctatagacaaataatgaagcctgttgtaagatgactctgtagttggctatgtccacaccaggcacactatttaattagctacttgtctt

SEQ ID NO: 1989 - DNA, 1028 bp, Oryza sativa
  ref <308>: DATABASE ACCESSION NUMBER: AK059945
  ref <309>: DATABASE ENTRY DATE: 2001-12-06
cagtgtgaagaccattcgaacctgttatcctcaatcttcaaatggcaatagtcctgctactaatagatctgccaagctagatatgctgtttgccaacaagctgcatgcttttgtggagtatgagacccttgaagatgctgagaaagcgattctggagcttaatgatgagaagaactggagaaatgggcttagagttaggttattgaatacttgcatgacaaagggggcaggcaaagggaaaaagggagtgcatgaagctgatggaaatggcgaggaggatgtctccacttcaaaccaatcaaatgagaagcaactcgaagaaccctctcaattgtcagatatgttgccagatcacttgtttgatgacagttccaatgataaggaaggtccaagacgtggcagaggtcgtggacgtggtggcagagggcgagggcgtggctaccatcagcataacaacaaccatttcaacaaccagaactaccacaacggtcagcaccacaatcaccacgccaacaaccaccaccaccaaggtggcaaccgtggtggcgctcatcatgttgggactccgcccaatcaacagcaaaccaagcctgagcagcacccgcagctgccaattggagccaccaagcagcctcccggccctcgcatgccagatggcacgcggggtttcaccttgggcagagggaagccgcaaccgtttctaccggttctgtgtgcagccgtcgagccttgaaccctattcatcgtcacgatagggtatgcggcggcgagtgctggtgttgatagagatggttggaggtcttctcttttcggaacatggtttacttgattttgatgggtgtgtgcctaggccaagtgttttggaaccgtctgttatggtattgtcatgtgttttgaagccaaacattgttgttctggttggtacagacttggtgagttgcatggttaagttggctaccactactaccattttggacccaagttatatatggggaagggtgtaagacattattcatgaaaaatgttac

SEQ ID NO: 1990 - DNA, 1050 bp, Oryza sativa
  ref <308>: DATABASE ACCESSION NUMBER: AK059946
  ref <309>: DATABASE ENTRY DATE: 2001-12-06
tggaagatgcagataaaggcaaacaaacagctacccttgacaacatatcaaatgaaggaagcaaaccctcaaacacagatggaaatggggctggtatcagggatgatcctggtgcgagagctaggagcagtcctattagggctgatgcaagtttaacaaaagtggatggcaacaatggtgctgatactgcagaggctggtatatctagagctgaacctgtgccaaccaatggtaaagatttagcaatgggctctacagacaacggacagcctcaacgtgtcaggaaggggcgtggttttactcaacaatatgcatttgcacgtcgatacaggacaccatctccagagcgttcccctgttcggtctcgctacaatgatggaagaaatgataggtggaatcattttaataggtatggaagaaatggtccctacggtgcacgctcaccagtaagaagatatcgtggttccccaagagccagtagtccgtccagatacccaaggagagaccgtagcaggagcaggtcacgcagtccattgaggtaccgtgagcgtggaggatatcgccgccccagtccaaggcacagccgcagccgcagcccagcggagcaccagaggcgagatgtaagaaacaggcttcgatcaggtcgggatggtggtggccctgatcaccgtaatagcagccctcctgtcaatagaggaaggtcaagatccaggtcgaagagccgtgatccctcgaagtccagatcaccagatgctcctgccaaaaaggggagctcaaaatataaccgcaggcgcagcagcagttcaagatccagtagccctgctggaagtaaaggcttggtttcatactgagatgtgatatcagaagttgaggtgatatcaggagttgaaaaccctatgttccatggtagcttggtattgagtactaccctttaagaatgatgatgtagttaatggcttaatgtactcttcttttgtaacgtttctcattcagagattgttgtttttatgcatcttctatttggatatgatatttagacttctaagttct

SEQ ID NO: 1991 - DNA, 1033 bp, Oryza sativa
  ref <308>: DATABASE ACCESSION NUMBER: AK104158
  ref <309>: DATABASE ENTRY DATE: 2002-08-28
gtctcctcagctgcttgcgccaagacgagtcgcggctcaacagggggaggggcggcgatctccatccatccggcgagcagagcaggggaggggaggggatcctggaaaatgctaaaccttattaagataaagggtcaaaagaaggaagatgcagccaatgcaaatggaaagcctcctgccaaaaagcaaagtccaggggagttgcgtcttcattaagatattgctgaacttaaccttcctaagtcgactagaatttcttttcctaatggcaaggatgatttgatgaactttgaagttactattcgacctgatgagggatactatgtaggtggtaaatttatttttactttccaagttcctcctgcctatcctcatgaaccacccaaagtcaagtgcaagactaaggtctatcatcccaatattgacttggagggaaatgtctgccttaacattctgcgtgaagattggaagcctgtcctgaatgtcaacacgattgtatatggcttgaatcttcttttctcacaacctaatgatgaggaccctctaaatcatgaggcggcagcagttcttcgagacaacccagaaaagtttgagagaaatgtccagagggcaatggctggaggctatgttggtgaaacccacttccctagatgtatgtaaggcctgaagatggtgatcggtacctgacttatctgctgctgccatttctcctaccaatgcactatggtaaaagcagtatatgtaaccaagaaggaacttctctgttatgtaacaacagcagttgctagaaagtaagttagtgaggcaattgaactcacgttcataacccgcaatccgaagactctgggttaacctgttgtggcaaatgttctcttttggccctcgcgcgcatctcagtcattctgattcataccagtttctgagatgcttttgtataatgccagctagagaaaatgctgaacagtatgtgtgtgctgcacttactgcctgttatgacttatggctaccaggaagtaagaacaagttcactaac

SEQ ID NO: 1992 - DNA, 972 bp, Oryza sativa
  ref <308>: DATABASE ACCESSION NUMBER: AK059947
  ref <309>: DATABASE ENTRY DATE: 2001-12-06
gtattggcagtgatccccaagacttgctcagctcatcggtcttctctcctcggatctttcagctcgagttgtaagttgtaaccgagatggcgtcagcgtcgtcgtcctcttcttcgttctttgacatcgagccactcgacggcggcgaggcctgcctgtccggccacgccatggacgcctgctccctctgccggaagccgctcaccaggaactgcgacatcttcatgtacagagggaacacgccattctgcagcgaggagtgccgggatcaccagatggagatggacgaagcagcagtgagggttagcgccacgaatgcgagggagcgcgctgcaagaaacgagcagcgccacaggctcgacgccggcagtgtcgccgtcgcggcgaatgtgcccgtcctgagctaagccataggcgcaagtaaagcatccggggtccccttgagaaagtaaagggaatcgcccgatcgagatgagatgaacgcacaaggaatattcagatgagtcagggcaagcagcaagctccgagttaattccagttttctgtccatcacccttgcagtcttgttctgtgcatgtattagagcaagagaaatagcgcggtagagaaaatacgtgtatatgacggcgttttcccctttttcttgtgtgaggatttttcccttccttttcgacctgtgggagagaactttgatgctgtgtcgttgcaaccagttctttcatccttgagagccgtagatcctactgggtaaaatgtgtgcctcgattctgtactattaacttgtcacctgagcagatcaaccggtaaggcattgtagctgcttttgtgcaatgatcttggccatcctgaccggcaacatgatgttggtccgttggccttggccccaaatgcagaaatgtaaagaaaatgaacagttgaggcggggccgctgccggcttcctaacgaacgaacaaacgaattaaggcagtact

SEQ ID NO: 1993 - DNA, 1000 bp, Oryza sativa
  ref <308>: DATABASE ACCESSION NUMBER: AK059948
  ref <309>: DATABASE ENTRY DATE: 2001-12-06
ggagattcctatcctctctcgccatgacaacaatgtcgtcgaggctcgcatctcgcgccgcccgcttagctgcggtggcggcatctcgcgccgcccgcttagctgcggcgtccgcatctcgtaccggggccggggacccctcagcgcgggccaccgccactgccgcatctcgcgccgctcgcttagctgcggcggccgcatctcatgccggaggccccacagcgcgcgcgattgcggctgccgtatctcgcgccgcccgctcaatctcctcgaagctccttgacgacgacatcgctgcccgcctctccttccgctacagcaccgagcccccagatgatggtaagtgcgttacagccaaggacctcgagtcagatcaagccgtatgggccttatatgagcgctggtgcaagtcatacaacaagaagcgtgaccatgctgagatgattcgccggttcgacatattcaagctgaaagcatcgcttgtgcacagctggaacaattatgttcatgaagacaaagaggaattagctcgtgcaaaaaagagaagggatttaggcaaacctgtcgatccttggtacctacaagaggaattaggcccatccgccgatgggggagacactgttaaccaatactggcggggcatgttgaaggaaaatgaccaagggatggatctgcctgacatccaaggaggaaaaaaaatgagcactgaagattgaacatgttacataagagcgatttaatttgcttatggaaatcccttaccctcaaggagttgaacttagctccccatataaatcaactgtaataataagttatgatttgccgttccatgtgtagtctatgcttatgtcgtaccatcttatctaagtggtcatgaattccatatgcttccgcctgtgggaagtttgtgtattttagccctttgggtttacgggcacaagtgttcaaacagatcaagatcaagtgtgaagatggtatatatgtcagttgtttgtacatt

SEQ ID NO: 1994 - DNA, 1015 bp, Oryza sativa
  ref <308>: DATABASE ACCESSION NUMBER: AK104159
  ref <309>: DATABASE ENTRY DATE: 2002-08-28
aaaagccgaggaggagatcacgagacgagagagaggcagagcaatcgaagccccacgccatggtcaagatcaagatgcccgccctgttccgccgccggagcggctccaagtcgccgccgctgccgcaggccgaccccgcgtccggcggcgggtccccggcgccgacgccggaggaggagatggagcgggtgttccgcaagttcgacgccaacggcgacggccggatctcgcggtccgagctcggcgcgctgttcgagagcctcgggcacgcggccaccgacgacgagctcgcccgcatgatggccgaggcggacgccgacggcgacggcttcatcagcctcgacgagttcgccgccctcaacgccaccgccagcggcgacgcggccgccgtcgaggaggacctccgccacgccttccgcgtcttcgacgccgacggcaacggcaccatctccgccgccgagctcgcccgcgtcctccacggcctcggcgagaaggccaccgtccagcagtgccgccgcatgatcgagggcgtcgaccagaacggcgacggcctcatctccttcgaggaattcaaggtcatgatggccggaggcggctccttcgccaagatcgcctaggatcaatcaaccacccaatttcttcccttctcctcatcctcctcattgaccaactcctatccatccatccatccgagcgtgccgtgtgcggtggaaattttaagtgtatatacaaccgattaaaagaccactagccctagattctttctactaataattgcgattctcaactactactagtttctttcttggtagattggaaattggaggctaaaaagcagcaattctatcccctgcttttggttctaagacacgccaatgctttctctcttttttttccccacaagatgtaagcgtttgcgtggagtaagagtcttggatcttggatcttgcattcttgtttcgattgttcaccatctggaattctggatgtcagttaatctgatcttaatataatc

SEQ ID NO: 1995 - DNA, 1026 bp, Oryza sativa
  ref <308>: DATABASE ACCESSION NUMBER: AK059949
  ref <309>: DATABASE ENTRY DATE: 2001-12-06
ggctgctacactgctccggccatggccatcgtcgccgtcacggccggaggacggcgccctccctgccgccgcgtgccgcccgccgcttccccgcccgcgaggctctcctgccgctgtgccacccacaccgttcccaggaggaatgtactatccacaatgctatccacttcaacagtcttcctcttcggaccgaaacagatcacactggccgagacaactggtggtacattcagggagtacatcgacacattcgatggctactccttcctctacccaaagagctggatccaggtccggggagctggtgctgacatattcttcagagacccgttcttcctcgacgagaacatgtcggtcgagatatcgtctccttcgtcgtcgaagtacatgacggttgaagatcttgggcccccagagaaggctgcagagagagtgctgcagcagtacctgacagagttcatgtcgaccaggctaggcgttcgacgaacgtcgaacatcctgtcagcgtcgtcgaaggtcgctgacgacggcaagctctactatgaagttgaggtgaatatcaagtcatttgccagcaacaacgagctggcggtgatgccgcaggacagggtgcagcggctggagtgggaccggcgctacctgtcggtgctcggcgtcgagaacaagcggctgtacgagctccggctgcagtcgccggagaaggtgttcaaggaggaagaaggtgacctgaggagagtcatggactccttcagggttaacaagactgcctagcagcagtaagaagcagtgctttgtcatagttgagagcagaattttttgtatagctagcagattgtctgttctctgcattattctttcaccctccttttgttatcttgtacaagattattgccatatagtaccttatgtgtaagattatatatagtacctctgtaagatgctctggtgaggagcaaaaaaaagatccaaaacttgcaaaaatgcacgtcaaagactggtaaataccagtaacttgggaggtgtgct

SEQ ID NO: 1996 - DNA, 1059 bp, Oryza sativa
  ref <308>: DATABASE ACCESSION NUMBER: AK059950
  ref <309>: DATABASE ENTRY DATE: 2001-12-06
agcggcgcgcgaggctgctcggatctcgccgcggccatcgaaccgatggagctcgacgacgcgtctcgccacggattcggcaggatgggatttggatgcaagcactacaggaggaggtgcaggatccgggcgccgtgctgcaacgacgtcttccactgccgccattgccacaacgagtccacgaaagacggccacgagctcgatcggcacgcggttgaatcggttatctgtctcgtctgtgacaccgaacagccggttgcgcaagtgtgctacaactgcggcgtttgcatgggcgagtacttctgcagcgcgtgcaaattcttcgacgacgacgttgacagggaacacttccactgccaagattgcggcatctgcagagttggagggaaggataacttcttccactgcgaaaaatgtggatcatgctactcggtcagcctgcgcgacaagcactgctgcatcgagaactccatgaagaacaactgccccatctgttacgagtatctgtttgactctctaagggagacgtccgtgctcagatgtgggcacacgatgcacctgcaatgcttccacgagatgctgaagcacgacaagttctcttgtcccatatgctcgatgcctatctttgacatggacaagttcttgagggctttggacgctgagattgaagcaaatatgctgcacatagattacatgggaaagggatggatcgtgtgcaacgactgcagggacacgacgcaggtgtacgcgagggtggcagggcacaagtgctgccattgccagtctcacaacacctgcagggtggctgccccggtgctccctgcttaattaaattgagtaaatttcatataaaattcagctgcagatgctgtcagcaccgcagcatcatattattgatttatacttagtattcagtagtattggctgggttattttaagtagccaattaagtgtattttcagtccaacatgaactgcatgggtcacatcttgtatgcgaattatacacgttttatgtaacaaagcaaggtgaatttgaaaggcgaagaaacagttaggg

SEQ ID NO: 1997 - DNA, 1031 bp, Oryza sativa
  ref <308>: DATABASE ACCESSION NUMBER: AK059951
  ref <309>: DATABASE ENTRY DATE: 2001-12-06
gatcatcgtccaccggtcgtactcgatcgtatcgtatagtcgtctgtacaaaccaaccgacgcgatcgtactacgctagctaagacaggatgagcagcgagaatggagagaacggacacggcgccgccgacgaggtggtggagccgtatcagcagacgccgcggcccgggccgaagctgaacgagaggatcctctcgtcgctgtcgcggaggtccgtcgccgcgcacccgtggcacgacctcgagatcggccctgatgctcccgccgtgttcaacgtcgtcgtggagatcaccaaggggagcaaggtgaagtacgagctggacaagaagacggggctcatcaaggttgatcggattctatactcgtccgtggtctaccctcacaactacggtttcattccgagaacgctttgcgaggacaacgaccccatggatgtccttgtcctcatgcaggaaccagttcttcctggttcattcctccgagccagggccattggtctcatgcctatgattgaccagggagagaaggatgacaagatcatagctgtctgcgccgatgatcctgagtaccgccatttcaataatctcagcgagctttctcctcatcgccttcaggaaatccggcgcttctttgaagactacaagaagaatgagaacaaggaggttgctgtcaatgacttcttgcctgctccgacagctcgtgaagcaatccagtactctatggatctgtacgcacagtacattctgcagagcttgaagcggtagagcgtattccaattttttgatttacgaattcttcccgtgagctcaagcaaagagtggctctgcagaacagttaagatctgatgcatagccaagttatatgggttatgtatgtcaacaaatcattgctcccccccccccccagagatgtattagtctgtatttcggcattactcatttggaaatttgtttcaaggcttgtgctttgatctatgtacttctatttgttattggaaaaggaattaatatggcgattggtgttacttcgct

SEQ ID NO: 1998 - DNA, 981 bp, Oryza sativa
  ref <308>: DATABASE ACCESSION NUMBER: AK059952
  ref <309>: DATABASE ENTRY DATE: 2001-12-06
acaccccaaaccacacccctcctcccttcgccctcgcctctcaaacctcgccgcgacgccgccgcccccacccccgtcggctcggcctcgccgccggtggggctgtgcgctcctctgctccggcggcgcagcaggggcggtgcaggcgcgcggcggcacggccgcacggcagcgcgcagagatgttcgtgctcagccagatcgaacacaacctgccgatgccgccgcacctgctgagccggccactcgtcgacgccatcaaggctgagcttgagaggctcttcctcgacaaggtcgtcgcgaacctcgggctctgcgtctccgtctacgacatccgctccgtcgaaggaggcttcatctttccaggagagggctgctccacttacaaagtttcctttaggttgctgatgttcaggcccttcgttggggaggttcttgtcgggaagatcagtggatatgatgaaaagggtctgcatgtttcacttgatttcttcagtgatataagcattcccgggcacttgatgcagtatggcacggctagggcgctagatggtaggtggatgctgaagactgaagatggtgatgagctctatcttgatttagatgatgagatacgattcttggtatctagcataaaatacccgcctatcccagtcgagcaaaaggagactgacagggcatttgctccaatgcaaattattggaagcattaaaggagacggtcttggtcttcttgcttggtgggctgcagatgaagaggaaggagaggccgaggccgaggcagaggaatagtcccaagctactcctttctctagtttgctgtttttgtgcagtaagagatttataggattttttagctagaatgtcagtaatttatattctgtggtatctgcaacttggtcatcttctgttaggagcctgttccgttgctgtgacataactgatgctgacagccgctaatttataacagtaccaatgaacag

SEQ ID NO: 1999 - DNA, 1081 bp, Oryza sativa
  ref <308>: DATABASE ACCESSION NUMBER: AK059953
  ref <309>: DATABASE ENTRY DATE: 2001-12-06
acaggccactgagcccgcatcgtctcgtctccctctccctctcccaccccgcctccctcctcgacgagctccgagcggcggcgatggcgagcgacggcgcggcggccacgccggcgaaggcgagcccgaagaaggccaacctcctcgacccccactccatcaagcacctcctcgacgagaccatctccgacgtcgtgaagagcaagggctacgcggaggacacgcggctgggcaactggaagctggcgattggggcggccgtgatcgccatcgctctcctcgcgcagttctacccgaagaagttcccccagaaccgcgagttcctcctcggctgcatcgcattatatgtggtgttgaatgtggtgctgttgatacttagctataccaaggaaaaggatgccattatgttcacacaccctcctgcgggttctttcaatagcactggactagttatatcttcaaaattaccaagattctcggatatgtacactatcacaatagccagtgcagatccccagtctatttccgccaataagccagttcatttcactaagagtgttacaaaatggtttactaaggaaggagttctcgtggaaggcctgttctggaaggatgttgagaggttgattgatgactacaacactgagcgcaagggcaaatgaatgggtagtccatgtgactatgagacgttaattgtctagaaaagaaaccctcttgtggaattccttgcttggaagaatccttagcttaatcaaaatagacaattttgtcatacattactgtttcactggtgattgaaatactgtcgaagacacccggtaccatcccaattcttttttatgagcttacaagcctatcgatggttaatcatagataccagcactgagctctgtacgttctgcttatatgacaacatgaatgaaattgcctcaggaaaacagaaaaatgtattatgccaatagccaaaaatccttgtaaataattccttctgtacacatattttggactggtaaggtaccaacaactaccagtgtcgtcgaaatacgtactctcctcgtcccaaaatataagcatttttagc

SEQ ID NO: 2000 - DNA, 1328 bp, Oryza sativa
  ref <308>: DATABASE ACCESSION NUMBER: AK059954
  ref <309>: DATABASE ENTRY DATE: 2001-12-06
aagctcagctcagctactaatcgatgagctcgggaccatcacttcgctggtagctcagctgattcgatcgatcagccaacggcttcaacctcgccgacgtcatcgcgcagcatgtggggttcaagaagagcccgccggcgtacctctccctgacgacgccgggaagagacggcgaactccggcgaggcctcgtcggcgccaactacgcctccagcggatccggcatcctcgacttcattgggaacggcacaatcagccttggagagcaggtcaagctcttcaccaaaacaaaggaggcaatgatcaccgccggcgaggtcgacggtgagaacatcgacaacttgctctcccagtccttgttcattacctgcaccggcggcaacgactacaatgccttcactgatggcatcgtccccgtcagcgacgcgccggccttcatcgcccacatggttgccacttacatcaagcatatcaagacactgtacaatctaggggctcggaggctggggatacttgacgtgctacctctagggtgtctaccgatctccagggtccccattgaaaatggttcatgcagtggcactgacaactggcaggcacggctcttcaaccgtctcctccgacgagagatgaccgccgccgccacagcctccatgccggacttggtgtactccatcggcagcatttactacaccttctacgacatgataaagaatccatcttcggctggggtgagggaggtggcgagggcgtgctgcggagacggcaagctgaacgcggaggccgactgctcggcgaccacccacctgtgcccggaccgggacaactacatcttctgggacaaggtgcacggcacccaggccgcctaccacaactgcgtccacgccttcttccacggctcgccgcgctacgccgagcccatcagcttcacccagctggtcgcctcgccggccgtcgatctggggcggccgtccccgggcacaaaccggacggccaggatttgatcacccaatggactcatattggtataagcattgttcattggtaaacaatgaaaatcgctgggtttcctttggttttgggagtcaggagatggagatgttgaattggggttgatgatggtatatatgtgcataattgaagtgtggtgatacctcacggtacatcctaaggaccacagattctcagataagacattgtacaagtttttgtgtttttttcctgaataattcctcctatgctatagagcacttgttgtcatgcctggaaattaagcagtgtctagttgatcactgcaggaagaaagaaatgcttgactagagaagaag

SEQ ID NO: 2001 - DNA, 951 bp, Oryza sativa
  ref <308>: DATABASE ACCESSION NUMBER: AK059955
  ref <309>: DATABASE ENTRY DATE: 2001-12-06
acagcgagccacacaggttaagtcactttcacctgcaaatccacaagcacattgctcgatcaccgaggaagaaaactagctagcttaatcaccgggaagagttgagcaatggcggcaggattgcaggtgttcggccagccggcgtccaccgacgtcgcgagggtcctgacctgtctcttcgagaagaacctcgagttcgagctcatccgcatagacaccttcaagaaggagcacaagctccccgagttcatcaagctacgggatccgaccgggcaggtgactttcaagcatggcgacaagactcttgttgattcaagagcgatatgccgatacctgagcactcagttcccagacgacgggaacaggacgatctacgggacggggtcgctggagcgggcgtcgatcgagcagtggctgcaggcggaggcgcagagcttcgacgcgccgagctcggagctggtgttccacctggcgttcgcgccgcagctcaacataccggccgacgaggcccgcatcgcggagaacgagcggaagctgcagcagatgctgaacgtgtacgacgagatcctggcgaagaacaagtacctcgccggcgacgagttcaccctggccgacctgtcccacctcccgaactcccactacatcgtcaacgcgcggtcgccgaggggcaagaagctcttcacctccaagaagcacgtcgcgaggtggtacgaggagatctccaaccgcgcctcctggaagcaggtggtcaagatgcagagcgagcaccctggcgcgttcgagtgatatgcgcacgcgcagctcaaaaactctcttgcattctgcggcgagctctgctttgtctcgtccacggctttaattcgtcgggcttcatgcagtgatgtggttgtcgtctacgttaattgtcgtttcggctaagaataatatgaagccttcttgaggtctcctctc

SEQ ID NO: 2002 - DNA, 917 bp, Oryza sativa
  ref <308>: DATABASE ACCESSION NUMBER: AK059956
  ref <309>: DATABASE ENTRY DATE: 2001-12-06
gacgctcacgctgacgctgctgcctggaatcacgtcttgcgcacgcccacgcccacgcccacgcggacgcagcgggtggtgggttattcggtgccctccgccgccggctacctcccctcctccgctcctccccatcttcacaaataccatcccaaccagtgatccagatcgagccaaccaccacccccaatcggatccctcacccgattggcccggccagatcgccgccgatccgaccccgcgcaaccctctcccgcggccgcgagcgagcagaaccgaatccaatatggctgccttgccattagccacagccgaattatgtgatgcaaatgcacatttgatcatgaatggcgagcttcgtgctctccagcccgtcttccaagtctacggaaggcggcaggttttcgccggccctatcgtgacgctgaaggtctacgaggacaatgttcttgttcgcgagttcctggaggagaagggccaaggcagggttctcgtggtcgatggtggtgggagcctgcggtgcgccattttgggtggcaaccctgtgcagcaggcgcagaacaatgggtgggctggcatcgtcgtcaatggttgcatcagggacgtggatgagatcaatggctgcgacattggtgtccgagctctgaactcgcaccctatgaaagcaaacaagaagggcatcggggagaagcatgtgcctgtgaccattgcagggaccaggatttgcgacggggagtggctctacgccgatactgatggtattctcatctcaaggactgaattgactgtgtgaatctctctgtgtgtgtgtgtctgtacgagaattcggcgcataaatggagtgctgcttctgcccctcctggtgtattgtcaaaaactgtaataacgtactgttaaattaaatgatcacttggaat

SEQ ID NO: 2003 - DNA, 964 bp, Oryza sativa
  ref <308>: DATABASE ACCESSION NUMBER: AK059957
  ref <309>: DATABASE ENTRY DATE: 2001-12-06
tgtgagttagtggttttgagtgtatttttgtgtggcactctaggtacgtggttacctggggtgttacaccaccacctacgcggtcgaccgccgcgccgtcgccgccgccattccgcccacgcctaccgagctgccgccgcctcacgtacgccaacaacgttgtcggccctatccccgtcagcccatagctccgtcaaagacacggagaaaagaacaaacacgagagagaaggggggaaaagcagcaacaacaagaggaggaggcgccgcagccgagaccccagttccgattgatctccggttcccagatcggccagggtttgaggcggggggctctgtacttctggagatgatgctgcgaggtgggcggctggctggcttggcctctcggatggttggagccaagcctttcagcacggagatatttgtgagcaggctatcattttacacaacagaggaagaacttaaaaatgtcttctcaccatttggcgctgttgaggaagcgtagctcgattggtgagagacaaccaaactggaaggccaaagggatttggttttgttaaatattcttctcaagcagacgcagagaaagctgttaaggcaatggatggacggatcatacgtggaagactaatttttgtggaaattgcaaaagaataaaactgcatagggcatagtctatcaccatcgttgctgaactggagcagttttcctgccttaaagcgtactcgtacatgactacatggctaatctggcttagttccaacaagacctatgagcacttctcccggcctgaatgcgtacttttgtgacttctgttgagccaagtattggtttgcgaacaacattgtttgttttttaaagacaaagaaagctttcaaacaggaaaattgttgttggaaggttaagttgaatttatgaacccgagctggaaggttatatatgcgtagaatgctggatgaccc

SEQ ID NO: 2004 - DNA, 1178 bp, Oryza sativa
  ref <308>: DATABASE ACCESSION NUMBER: AK059958
  ref <309>: DATABASE ENTRY DATE: 2001-12-06
aaagagaagcgcaaagatcatctctttgcttctcgccttctcctcctcctcctcttctccctcctcgtgctccgcccgatccgtccgccgcctccagatccgcgcccatggcgtcgcgcaggcgaatgctcctcaaggtcatcatcctcggtgacagcggggtcgggaagacgtctctgatgaaccagtacgtgaacaagaagttcagcaatcagtacaaagcgacgatcggcgcggatttcctgaccaaggaggtgcagatcgacgaccggctcttcacattgcagatttgggacacagcgggacaggagcgatttcagagtcttggtgtggcattttaccggggagctgactgctgtgttcttgtatatgatgtcaatgttaccaagtcatttgaaaggctcaacagctggcgtgaggaattcctaattcaagctagcccatcagatccagagaatttcccttttgttgtacttggaaacaaaattgatgttgatggtggtaatagccggactgtttctgagaagaaagctaaagcttggtgtgcttctaagggaaacatcccttattttgagacatctgctaaagaaggcttcaacgtggaggctgcttttgagtgtatagcaaggaatgctatcaagaatgaaccggaagaggagatatatcttcctgatacaattgatgttggaggtgctggaaggcaacagcgctcgtcaggctgtgaatgctagaagatatggcaccagcgatatcgccagttgattctaccggatcggtgtagatcatcatcctcacctcttccactgtgtgatatctttagtttgaaagcctctatctatgtccaatgctacatattgtttttttagtgctccaacataattggagaagattcatttgtaactgtttttactcctacctttgtatctgctagatgctagagttgggatacctttttagtctttctacccttctgtttgattgctgcagtgcacatatcttttctgtttgattgcttcagtgcatatctggagagaccaaaacatgttctgtgaaagcttgtaaattgacagaacaacctatcaatctggttctgttctctgcccattttgatggtagagcgtgccagatctgtatctatatggcttgctacttgctaatacaatccttccattatgtct

SEQ ID NO: 2005 - DNA, 901 bp, Oryza sativa
  ref <308>: DATABASE ACCESSION NUMBER: AK104160
  ref <309>: DATABASE ENTRY DATE: 2002-08-28
acctgccactcgcccactcctcctcctcccccatcctccagtgctacggtgtcacgcagccatggcgctccgcacgctggcctcgaggaaaaccctagccgccgcggcgctgccgctggctgcggcggcggcggcgaggggtgtgacgaccgtcgcgctcccggacctcccctacgactacggcgcgctggagccggccatctccggggagatcatgcgcctgcaccaccagaagcaccacgccacctacgtcgccaactacaacaaggccctcgagcagctcgacgccgccgtcgccaagggcgacgcccccgccatcgtgcacctccagagcgccatcaagttcaacggcggaggccatgtcaatcattcgatcttctggaataacctcaagcctatcagcgagggtggtggtgatccaccacatgcaaaacttggctgggccattgatgaggattttggttcatttgaggcacttgtaaagaagatgagtgcagaaggtgctgctttacaaggatctggatgggtgtggctagctttggataaagaggcaaagaagctttcagtggaaacaactgctaaccaggaccctctggtaacgaagggggccaacttggttcctttgttgggaattgatgtctgggagcatgcgtactacctgcagtacaagaatgtcaggccagactacctgagcaacatctggaaggtgatgaactggaaatacgcaggggaggtgtacgaaaatgcgactgcttgatgttgtctgaaggcaacgctcatggttttttttcacctagtactgccatggatctttgtatgcaataaaaatgggcctattgcacttctggaccttgtgtacattgcgtagaggtggactaatgcataacataatatgcctgag

SEQ ID NO: 2006 - DNA, 1020 bp, Oryza sativa
  ref <308>: DATABASE ACCESSION NUMBER: AK059959
  ref <309>: DATABASE ENTRY DATE: 2001-12-06
aagcgaagccaccatggcggccgccgctgacgacgacgagcttcgccggcgggcggcggcgctccgggaggtattcggcgactcatcggacagcgaggccgacgaccttcccgttggcggggcgggccgggagcagtggaggtgggaggcggtggagggggtgagggggctatggctctgcgccgccttcctctccgccgacgagcagtcgcgcctactcacggcgatccggcgagaaggatggttcagcgatgcacgcaaccaagcaatgagatttggtgatcttccttcatgggctgttgagctttctgcgcttatccatgaggctatttgttttggtgatgtccgtgttggttgtggtttggagttgaaaaatgaggacgaagatgcatgtcctttaccatcagatttgctgtggaggaaaccgctttttgaccaaatgatcgcaaacagatacgagccaggtgagggcatctgtgctcatgttgatctgatgcgctttgatgatggaatcgcgatagtctcccttgagtcaccatgcgtgatgcacttcagtcgggcagaacaagaagttcctatctgtgagacactggagagtgtgcatgctgaacctacaaagatccctgtctacctgaacccagggtcccttgttctcatgtcaggcgacgcgagatacttatggaaacatgagataaaccgcaagccaggtgctcagcaatggggtggcagggagcttgagcagcagataagaacttcaattacactgaggaagctccttccatcaccaaactaataccagcagaacagttgtcaggaaatttctccagtttttttgttccgagccatctttactgtcatagagttcaccttctttttgagatgttgatgcttacgagattatgatcaaatttgggcacctaaatggttaggtgtctctgttagcttgtgatcagatttttgtacttctggttaagttggaaaccccaacatcgttttatttcttcctgctgtttttgtttt

SEQ ID NO: 2007 - DNA, 1002 bp, Oryza sativa
  ref <308>: DATABASE ACCESSION NUMBER: AK059960
  ref <309>: DATABASE ENTRY DATE: 2001-12-06
gcttggtgagccacccttcctactttgcccccaccaccgagcctccctgagcagtgaaaccgcggcgcgcggcgggcgtcggcgtcggcgtcggcggcggcggcgagggcgtagagatcgcgcgcgcgcgcgcgcggaggcgtagccgcggagtcgctctctcctcgtcctgcctcgcgactcggctccgcgaagcttcgaggaggaggaggaggaggaggagtacgacggggtgggagcggcggtgggtgggatggggagggacgagatgctgcggcggagcctggtggcgctagcggcggcggtggtggtgacgggggtggtgacggcgtcggtgcggaaggcggcggcgacgtacgggttcggaatcctggccatcgcgggcgtgctgctccccgactgggagttcttcgaccgcgactactcccagtggctcaccccgatgccggcctcccgccgcacggccgccgaagccgccgcggatcgcgagcacgacgtctggaaatttaagccctatcccctaaggatggctatgcttacgacaatctatgggtttggcctttacaagtggtggatgtacgtatctagctagtggaatccaccttcctctccgcctttgctctcatgtatggattagaagtttttgggagagtaccatcatcacattgccattcttggccatttatattgcctgattttattatacactgccaatacgaaacgtctaatggggattggggaacagtccccatcacaggttgatgtctgtaactaatggaggtttgtaatgggcaaatgccactctcagctcagctcagctcaatattcctagccctattttcttcttcgtttttctcctctcctccccttgatctcagtagcgcgtcttgttttgatacagagagcactatgaaaatgttctttgcacagaatgaatggtttatctgatacagtagtctcatgttttatcagacactcttgttattcaccagtatatcgccc

SEQ ID NO: 2008 - DNA, 1024 bp, Oryza sativa
  ref <308>: DATABASE ACCESSION NUMBER: AK059961
  ref <309>: DATABASE ENTRY DATE: 2001-12-06
aactaacgctaaaaaagtaacagtttctgtactttattgtgttctcacacttccaacccatcgctatgtccggtgtgatcggccacaaggctcccgccttctcgaccgaggctctgatgcccgacggcagcttcaagaaggtgtccctgtcggactacgccggcaagtggctcgtcctcttcttctatcccctcgacttcaccttcgtgtgccccaccgagatcatccagtactcggagcgtgtcgaggagttcaacaccatcggcgctgaggtcgtcgcggcgtctgtcgactccgtcttctcccacctcgcgtggaccaagcagccgcgcaaggctggtggcctcggccccatgaagatccccatcctgggcgacatcaccaaggaggtctccaaggcctacggcgtcctcaacgagggcggcgtcgccttccgtggtgtgttcatcatcgaccccgagcagaacatccgccagatcaccatcaacgatctccccgtcggccgtaacgtcgatgagacgctgcgcctgctccaggccttccagttcgttgcccagcacggtgaggtgtgcccggctggctggaagcccggcgcaaagacgatgaaggccgaccccaagggcagccaggagtacttcgctgcggccgctgctcagtgatgatcgagctcctcaagacagtgaacgggacaggagcgccttcaccgccgcactcggtttctctttcccccttacccttcaatgcgtacctcgacccaaaaaacggaacagcaggcactttacgattcagttcctccgcccaccccgacgccatcctccactcctcctctaacccccgacagcgaggcagacgggatcaaggggttacgctcacgtcgcgctatttttcttcgatcgcgactgacgaagcctccttccggtattgtctcgcttcaatcgtggtgctttggtgtgtggatactcgggagacattatcgagtgaaacgaatcgcgcgcgtcataccatcaaatcatcgaaaagaaag

SEQ ID NO: 2009 - DNA, 1086 bp, Oryza sativa
  ref <308>: DATABASE ACCESSION NUMBER: AK059962
  ref <309>: DATABASE ENTRY DATE: 2001-12-06
aaatcccgacccgatcaaaatcgaagcttccgccgagttccccgtcgccgactcgcctggatcggcccgccgtcgagctcgcccccgaccatccgctcgattggaggccggggagctgcgtctggtggtgaatcgcatccgccgcggagcggttcgatttcggcggcggatttcgcgggggtagaggagatcgaaggggggcagagcagccatgagcgaggtgttcgagggctacgagcggcagtactgcgaggtgtccgcctccctcttccgcaagtgcaccaccgcctccgccctcgatggagagaaaaagaagcagaagctgtccgagattcagtccggcgtggaggaggctgagtcgctgattcggaagatggacctggaggcgaggagcctacaaccgagcgtgaaggccggtttgcttgcgaagctgagggagtacaaatctgacctcaacaatctcaagagtgagcttaagaggatctcggcgcccaatgcaaggcaggctacacgggaggagctccttgagtcaggcttggctgacactctcgcggcgtctactgatcagaggggaagattgatgatgacaacagaaagactgaatcagtccaatgataagattaaagagagccgaagaaccatattggagacagaagaacttggtgtgtcaattcttcaggatcttcatcaacaacggcagtcactgctgcacgctcatactactttgcatggggttgatgataatgttggcaagagtaaaaagatcctggcggcaatgtcaaagaggatggacaggaacaagtggatcattggggggataattgcagctcttgttctagccatccttctcatactgtactttaagctcgcttattgagcttgctttctggtagggtcttcaaagcaatttccgctcagtaaatgtgtgataaaatagttgcctgaatgttgtacattgggcaacacatatctctgcaagcacacacttgtttccccaaacttatggtatttgtgtggctcatcgcccatgtcatgtaatgtacagttaacgtgcactccaatatgtgaaatgtctaaaaagggctt

SEQ ID NO: 2010 - DNA, 950 bp, Oryza sativa
  ref <308>: DATABASE ACCESSION NUMBER: AK059963
  ref <309>: DATABASE ENTRY DATE: 2001-12-06
agctctcgcactcgcaagcaagggaaagcgaggcggaaggaagctatcgcctagcagcggagaccgggagatcgagatgtcggcggggctcgtgacggaggaggtgatggtggggcggctggtgcggatccggcggacggtgatgcagatgctgcgggacagagggtacctggtggtggagcacgagctcgccatgggccgccgcgacttcctccgcaagtacggcgagtccttccaccgcgaggacctcctcatcaacaagtacaagaagaacgatccctccgaccagatatacgttttcttccctaacgatgacaaggtgggaatgaaacacataaagaagtacgtcgagatgatgaaagctgagaacgtctccagagcggtattggttcttcaacagaacctcactccatttgcaaggtcatttcttcaagaattagagccaaagatccacttggaaattttccaggaagccgaattgcttataaatatcaaggaacatgttctcgttcctgaacatcaagtgcttaacaatgaggaaaagaagacattattggagcggtacactctaaaggaaactcagcttccaagaatacaaattacggaccctattgcaaggtactatggcctcagacgaggacaggttgtgaagatcatcaggcccagcgagacagccggcagatatgttacatatcgttatgttgtataatagcagaaaaatgagatggagagcaccataaatctggtgatttttgcaggtatacatacatgaccatatgcttggagaaatcatatttctaaggagaagccatgttaatgatcccatggctgttatgtaagtgaattctcgtgagttaagcatatggaccatacataattcctcatgttgtacactttgtttcaagaactgtataaacagtacagaataaaaacaccagttttcagaggct

SEQ ID NO: 2011 - DNA, 908 bp, Oryza sativa
  ref <308>: DATABASE ACCESSION NUMBER: AK059964
  ref <309>: DATABASE ENTRY DATE: 2001-12-06
acgctcaccagccgcagcggcgcgcccctctctctctcctctccttttaactactactccccacgaggagcagccgcgaacaccacacaccacctcacgcagcagcagcggcagcaatggcgtccatcatcgtgctcgcctccgtcctcctcctcgacgtcatcgccttcggcctcgccgtcgccgccgagcagcgccgcagcaaggcgacggtgacgcccgactcggagaagctgtacgactactgcgtctacgactccgacatcgccaccggctacggcgtcggcgcgctcctcctcctcgccgccgcgcaggccgtcgtcatgctcgccagcaagtgtttctgctgcggccgcggcctcaagcccggcggatcccgcgcctgcgccctcatcctcttcctcttcgcatggttgaccttcctcattgctgaggcatgcttgatggccggatccatccggaatgcgtaccacacccggtacagggggatgttcgttggcgagtccgtctcctgcgagactgtgcgcaaaggtgtctttgctgctggtgcggccttcaccttcttcacagccatcctcagcgaattctactacgttagctactccaagtcccgcgatgctgctgggggtgccccgtacggtggctccaacattggcatgggcacttacagctaaaaggagcttgctgaacaggatgatccggtccttgagcttgttggattcaaggtggagcatgtgatcgtggagtgcattgttcttgttaacacattaccttagttacggtgtaattggttggggtttactatcccgttaggttgtatgagattacttggttgggttgtacactattcggattattggattggattctgaacatggaatacacgtatcctagtatgatgatgcgct

SEQ ID NO: 2012 - DNA, 1161 bp, Oryza sativa
  ref <308>: DATABASE ACCESSION NUMBER: AK059965
  ref <309>: DATABASE ENTRY DATE: 2001-12-06
ggcagacacgagaaaagggaagatacaagtgtcatcccgcatccaacaaccatggactccttgtatgatatctcctgctttgctgctggtcttgcaggcaacatctttgcgcttgctctcttcctgtcgccagtgacgacgtttaagaggatcctgaaggccaaatcgaccgagcgattcgacgggctcccttacctgttctcgctgctgaattgcctcatctgcctgtggtatggacttccctgggtcgccgatggcaggctgctcgtcgctaccgtcaacggcattggagcggtgttccagctcgcctacatttgcctcttcatcttctacgcggacagcaggaagacgaggatgaagatcatagggctcttggtgctggtagtttgcgggtttgcgctagtttcacatgcgagcgtctttttctttgatcaaccgcttcggcagcagtttgtgggagctgtgagcatggcttcgctgatctccatgttcgcttctccgttagctgtcatgggagttgtgattcggtcagagtctgtggagttcatgccgttctatctgtcactctctacgttcttgatgagcgccagttttgcattgtatgggttgctgctgcgagatttcttcatttatttccctaatgggcttggacttatcctgggagcaatgcagctggcgctctacgcttactacagcagaaaatggagaggccaggattcatctgcaccgttgctgctcgcatgatcaaaaccggagtgaatgattgatcgatcagctggttttgccatggtttggattcttgaaagagtgggtttatggtgaattgtacagttttggctcagtcttcacatgttggtactggaagctgtacttcaaactgcattcttcaaacatgttggaaagttttgcacaccaggggggcaaatgatggatttttttttaatttgattccctccttttccttgaatacttggtgtgcaaaattatttcagctatgcacattgagcctcacttcttgttatcaattatgacatgtcacatatgtataagttgcgatgatagttttgtttcgttgctgtttgtaaactgcaatattcttctcgccaaactgtgtgaacaacaaatcaatggccacgtcatatatgtacaagttgagatgat

SEQ ID NO: 2013 - DNA, 1285 bp, Oryza sativa
  ref <308>: DATABASE ACCESSION NUMBER: AK059966
  ref <309>: DATABASE ENTRY DATE: 2001-12-06
atgcaaattaaagatcacacggtctcgttctcgccgcctatatgtagcgccaccgattccccatgaaccattcaagtgtttgtacttggctttgctggcctgtttctgttttgattactcgagctccagagcacagcagcagagagacgcgagctgttcgtggtcgtcgtcgtcgtcgatggacgcggcgtggcgcggcggcgttggctgctcgccggtctgcctcgacctctgcgtcgggctgtcgccggtgcgggagccgtcggcggcgaggcacgagctgcttgaccggccggccggctgccgcggcggtggggattccaagtcgatgaccaatgacgaggcgaagatcgtcgaggcgaaggtcactcagatgagcgaggagaatcggcggctgaccgaggtgatcgcccgcctgtacggcggccaaatcccgcggctcggcctcgacggctcggcctcgccgccgcggccggtgtcgccgttatcgggcaagaagaggagcagggagagcatggagacggcgaattcctgcgacgccaacagcaacaggcatcagggcggcgacgccgaccacgccgagagcttcgccgccgacgatggcacctgccggaggatcaaggtcagccgggtgtgcaggcggatcgacccgtcggacacctccctggtggtcaaggacgggtaccaatggcggaagtacgggcagaaggtgacgcgcgacaacccgtcgccgagggcctacttccggtgcgccttcgcgccatcgtgcccggtgaagaagaaggtgcagcggagcgcggaggacagctcgctgctggtggcgacgtacgagggcgagcacaaccacccgcacccgtctccgcgcgccggcgagctcccggcggcggcggggggggccggtggctcgctgccgtgctccatctccatcaactcctccggcccgaccatcacgctcgacctcaccaagaacgggggagccgtgcaggtggtcgaggcggcgcatccgccgccgccgccggacctcaaggaggtgtgccgggaggtcgcgtcgccggagttccggaccgcgctggtggagcagatggccagcgcgctcaccagcgaccccaagttcaccggcgcgctcgccgcggcgatcctccagaagctgcccgaattctagcttcctttacaattctccaattcttcttacaggaaaaaacatagaggcgcatttcaatagagattagagcttaatctccccccaaatttgaaaattttatacagggtaagaattccgaatgct

SEQ ID NO: 2014 - DNA, 1244 bp, Oryza sativa
  ref <308>: DATABASE ACCESSION NUMBER: AK059967
  ref <309>: DATABASE ENTRY DATE: 2001-12-06
agttcctactaccagtacactacaacaccaccaatacaccatgggcgacgaggttcaggctcttgttatcgacaacggtacgggcatgtgcaaggctggctttgccggtgacgatgctccccgcgctgtcttcccctcgattgtcggccgcccgcgccacactggcgtgatggtgggcatgggccagaaggactcgtacgtcggtgacgaggcccagtccaagcgtggtatcctcacgctcaagtaccccatcgagcacggcatcgtgaccaactgggacgacatggagaagatctggcaccacaccttctacaacgagctccgcgtcgcccccgaggagcaccccgtcctcctcactgaggccccgctcaaccccaaggccaaccgtgagaagatgactcagatcatgttcgagaccttcaacacccccgccatgtacgtcgccatccaggccgtcctgtcgctctacgcctcgggccgtaccactggcatcgtgttggactcgggtgacggtgtgacccacactgtgcccatctacgagggttatgccctgccccacgccatcctccgtctcgaccttgccggccgtgacctcacggactacctcatgaagatcctcaccgagcgcggctactcgttcaccacgaccgccgagcgtgagatcgtccgcgacatcaaggagaagctgtgctacgtcgccctcgactttgagcaggagatgcacactgctgcctcgtcgtcggccctcgagaagtcgtacgagcttcccgacggtcaggtcatcaccatcggtaacgagcgtttccgcgccccggaggccctcttccagccgtcgttcctcggcatggagtctgctggcatccacgagaccacctacaactcgatcatgaagtgcgacgttgacatccgtaaggacctctacggcaacgtcgtcctctccggcggcaccaccatgttccccggcattgctgaccgcatgcagaaggagctgactgccctcgccccgtcgaccatgaagatcaagatcatcgccccgcctgagcgcaagtactccgtgtggatcggtggctccatcctcgcctcgctctccaccttccagcagatgtggatctccaaggaggagtacgacgagtctggtccttccattgttcaccgcaagtgcttctaagcggtatacgtcgccttctggcacatctgtgtcatcagaagcccagtagtaaatacaacaacttgtatacaacttc

SEQ ID NO: 2015 - DNA, 1133 bp, Oryza sativa
  ref <308>: DATABASE ACCESSION NUMBER: AK104161
  ref <309>: DATABASE ENTRY DATE: 2002-08-28
aggaggagggcggacatggaggcggcgatggatctgatgcggcggatgccgccggggagggcggagacggcgctgaacgcgctgctctccctcatccccgaccactccctcgacctcctctcccaggtcgacctcccgctccaggtttgcatggacaaggagagcgtgaaggaatacatcctatgcgagtacaaccgtgacgctgactcctacaggtctccttggtcaaacaaatacgatcctcctttggaagatggaacagttccctccgaagagatgaggaatcttgaagttgaggcaaatgatgttttctctgtctaccgtgaccagtattacgaaggtggcatctcttctgtgtatatttgggaggatgaagatgagagttttattgcatgcttcttaataaagaaagatggagaaggaaaaagagggcacatgcagattggttcatgggatgctattcatgtcattcaggttggtcctgaagaagaaggagcagcgcattactgcttgaacagcactgtgatgctatcattgacaacagataacaagcaatctggaactttcaacttgtcgggatcaatcaggcggcagatgagtatgactcttgctgtggcagatgggcacctggttaatatgggaaaaatgatagaagaaatggagggcaagctcagaaattcgttggaccaggtttattttgggaagaccagagagatggtttgcacgcttcggccaccacccgaagtattaaacaggaggctacctgacagctgagaaaacgcagagatgtgaatttttaacacaagaactatatattagtcttgcaatcatctccttagcgacctagagtctcttttcgtaattgatctgtatttaatagtagcagtctctaaaatggacaccactttgagccatcataggagtgtcttctccattgaattgtgaggaaactgggcaaagcttcttcatggcagctgtaacagagagtttaagcaaaagggagcaggagtttgcatttgccgaactcgttgtcactgcccctgagagcaatattctgtcatctttgtgaagatctacatcttcttgtgaccttacaatttgttaaatcaatgcaagaatatggttatctgctt

SEQ ID NO: 2016 - DNA, 935 bp, Oryza sativa
  ref <308>: DATABASE ACCESSION NUMBER: AK059968
  ref <309>: DATABASE ENTRY DATE: 2001-12-06
gtgctatgctcaaactctcttcgtttattgccgtcgccgcgaagcattgctaaggcgtttcaattccatgccctctcgacagtagtcccgagcggacacactacgtattgagactggagggcgtcggctgctggatttggatggatgggcgacgaggaagacgagagtagcagccgctgtggcgccgtctcgccgccgccatctcccgtctcccgtctcggctgcgccgctgcggctgcgtctcgcgtctcccagtctgtgccctaatgccgtggcgcccaacgggctgtgcgggatgggccaaacaattttgcaaggtccacgtgggatggccagcccgcaaatttgcgggcttttttgtggggcgggactgcgggccgaaaaaaaagcccgccccacttgcatccctagacatactttcagacgctgctaaaaaggttatggagaaccgcccttggctggccaaacaacaaaacgaatatatgcgtgctcctattcactatgccgccctctggggcatggtccgtgttacgagtattgctggaacatgattcttctctagggtacatcgtatcagacaataacaccgccactagatcctcttcttgtttctgccggaattcgagggcatattggcattgctcaagagattcttatccattgtccagatgctccctattgcacaaagactggttggacatgtcttcatggagctgtatccgcagaccaagtagagtatgttaagtttatcctgagcacaccacaactacggaaactcactggcatgcgagatagccatgggaaaactgctctacgtgttgctgtccataagggtaacccaaaaatggtggctgctttgttgtctcatagaggcactgatgtcacaatgcttgacaaccatggtaattgtaacgccccaattttcgttcgggatt

SEQ ID NO: 2017 - DNA, 1048 bp, Oryza sativa
  ref <308>: DATABASE ACCESSION NUMBER: AK059969
  ref <309>: DATABASE ENTRY DATE: 2001-12-06
cattgatccacaaagaaatcaagaagcgaacaaaaaagcaaggcactgcattcccctgccactgctgagcagtgagcacaaatcacagacacaaatggaagcagcagtggctactccttccttgctcttctctagctcaacccccaggaggccttcctcctgcttgcctcctcctcctccttgcagcagcagcagcagctacgcctcccatggtttcaagctgctgcagccgcagttgctgttcatcaatcggctaaccagcagaaacagcaacgggagtagcagaagaagcatttccattttgtcgctgaggtgctcttccagtggcactgacagcgcgtcttcttccgccacttcagaaagatgggttctcgagcctgcaggagacggcgattggcgtcatatcgggtaccgcgtcgcacgacccggcggcttccagatagcatccgaggcggcggtgacggtgggtcgggttcctgaacaggctgacatcgtcctgtctgtcgcaacagtttctgggacgcacgcacggctggagaagaaagaggggagcttgttggtaacagacctggagagcacgaatggcacctacatcaacgagaggcgcctcaccccgggtttccccactcctatcgatcccggcagcctcctcatctttggtgacatccacctggccatgttccgtgtctccaagatgatcgtcgatgtgtccagtgacaccaatgaagctgagcaggaagctgagacggctcaagtatcagcggcaactcaacaaaccaattagcaacctccctcttgccatctactgcttaatgctgaaggcaagcagctcaagaagcaccagctgttacccaatgcctgacatgaagcgcatgttacgaacgacagagtttctttgcaaataagtgcatacagatgttgtgtgataggaatgtcatctcatctgtattatctaaaaataatgaacgtcatctgtagccattaagaaaattcacgaagcaacaactctgcatatcaatagagagcacatattggcatccctacgatc

SEQ ID NO: 2018 - DNA, 1156 bp, Oryza sativa
  ref <308>: DATABASE ACCESSION NUMBER: AK059970
  ref <309>: DATABASE ENTRY DATE: 2001-12-06
aaacaccaccaagaacgaacaactcttctccccctctccccctccttccttgctcctcctcccatcttgtctcctccctctctctcgcaaagtcgcaacgcgctcctcctcggtgaaacgggagtgaggtgcgtgcggccatggcgtccagcgcctcccggttcatcaagtgcgtcacggtgggcgacggcgccgtgggcaagacctgcatgctcatctgctacaccagcaacaagttccccactgactacataccaacggtgttcgacaatttcagcgcaaacgttgttgtggacagcaccacggtgaatctgggcctctgggatactgctgggcaagaggattacaaccggctcaggcctctgagctatcgtggtgctgatgttttcgtgcttgccttctctcttgtgagccgagctagctatgaaaatattatgaagaagtggataccggagctacagcattatgcacccggcgtgcccattgtgttggttggcacaaaattggatctccgtgaagacaagcactacttgttggaccatcttggcatgatacctgttaccacagcacagggtgaagaacttcgaaaacaaataggtgctgcttattacattgagtgcagctcaaagacacaacagaatgtcaaaggtgtgtttgatgctgctatcaaggtagtaatccagcctccaactaagcagagggaaaagaagaaaaagaaatcacgacaaggatgctctatgatgaacatgttccgtggaaggaaaatgtcatgcttcaaatcctgattgatcgagatgtcccttacatgatgcaatgttctgggtgcaacctcaagctggcaacctttggagtctgaatgtgctggtagagttagatgcaaagttcttgtgtatatttgcatcttttggtaattaattactagagttagatggttaaactagtctgcttatgtaccgcacaatgctcttattattagctcttgttggtctagaaagtctgatagatgccaaaggaacaaggagacaccgttctgtcaggacaaaatcacagattttgtaatcgatctgaagtctcagtatcgtcattagaacattttatgattcgatggtagaactgaaagcagcaactacaaagctcgccgtccctagtgttttgt

SEQ ID NO: 2019 - DNA, 984 bp, Oryza sativa
  ref <308>: DATABASE ACCESSION NUMBER: AK104162
  ref <309>: DATABASE ENTRY DATE: 2002-08-28
atgcgcgccatttcggctcttctcctccgtccccttcctccgctggattcctccatggcttcctcttccctcccttctagaaccttctaccgccactcgcttccctcctccgcacctccacctccttcgagaggggcctgcgccgccgcatgctgctgcctccgcgcggccgtctcccggcggcgggcagccgcgcagctgctctccgccgccggattcttgatcgccgtctcgccgccttcgctagccgcgcggaggggccgcatggtcgtgtcgctggaggactacgtcacttcacctgatggcctgaagtactatgatcttgttgaagggaagggtccaactgctgaaaagggctcaactgtgcaggtccattttgattgcatataccgtggcatcaccgctgtgtcaagccgcgaagccaaactactggcagggaaccggagtattgcgcagccttatgagttcagtgtcggatcgctgcccgggaaagagcgaaagcgggaatttgtagacagtgccaatgggttatactcagcacaggcgtcaccgaaacctcctgccgcaatgtacacaataactgaagggatgaaagtggggggaaagaggagagtaattgtccctccagagctcggatatgggaaaaaggggatgaatgagataccgcctgatgctccttttgaactcgatatagagcttttggaagttgtccctcctgcagagaaatgaccatttttgtttgcaatggatggggaactttcatgagatatgtaaccaaatatgttcatatgatattttgccgggacatgacttgtttgcccactcacaaggagaaaatagaacaagaagcaaagtcaagtaggtaaaagacatgtactaattttgttattccttatgccgaagcaatattggatcaaaaatattctccacaatgtcgtggagcttgattgattatatggaatggtgatatgatctctctttgtg

SEQ ID NO: 2020 - DNA, 905 bp, Oryza sativa
  ref <308>: DATABASE ACCESSION NUMBER: AK059971
  ref <309>: DATABASE ENTRY DATE: 2001-12-06
aatttgggccttctcctccctcctcctcctcctcctcctcctccaactccctcgagatttctcatggcggcggcggcggcctcctcctcctcctcgtcggcggcggcgacgccgcagggggtgacggagcggcggggcatcccggcggcgtccttcgtcgaggacgtcgagacctacctccgccaggccgggctcgacgtcaactccggcctcgccttcctccaggaaaggctgcagcagtacaaaatagtggagatgaaacttctagcacaacagagagatcttcaggcaaaaattcctgatatagagaagtgcttggatattgttgcaactttacaagctaaaaaagctttgggtgaggcactcacagccgattttgaattatctgagggaatctactcccgtgcgaaaatcgaggacaccgattctgtgtgcctatggttgggtgcaaatgtaatgctggagtactcctgcgacgaggccaacgccctcttgaaaaagaatctggaaaacgccaaggccagtttagaagtccttgttgctgatctccagttcttgcgggaccaacaaacgatcactcaggttacaattgctcgggtgttcaactgggacgtgcaccaacggagaagcaagcaagctatcaaagaaacctgatcatcatacccgcagattctaccagccaaaatgagatcgcgacatttttgtacttcttgccacctctggcagtctaggccatcgtagcatgtgccctctgttggcgccttgccgtgtaacagtgtatcaggttttatggtgttggattgttggaactctgtttgccttgcaagtagaaattggtgtttgttttcacttcggttcgcgtgatggaacatattttgaggagtaaaaatcttagcggttttcag

SEQ ID NO: 2021 - DNA, 962 bp, Oryza sativa
  ref <308>: DATABASE ACCESSION NUMBER: AK059972
  ref <309>: DATABASE ENTRY DATE: 2001-12-06
aactaacgctaaaaaagtaacagtttctgtactttattgttcccgtacttcaaagcaaccatggccgccacctctgccgccgcccagctcttcatccacaaggtgtgcccctacgcgcaccgcgcttacctcgcggcgaccgagaagggtctcatcgccaaaggtgccatcgagctcgtcgaggtgtctctcccgacccccgactggtacaacaaggacgtcaacccccgtgagaccgtccccgcgcttcgtcttgcgaacggtcaagtcgtgcccgagtcgctgatcgtcgtgcagtacctggacgacgccttccccgaggtgccgctgctgccgaaggaccccaaggaccgcgcggacgtgcgcgtgtttgtcgccgacttcgactccgccattggtggtctctacaagatcatctttgagaaggacgagaaggttcgcgcggagctcgtgaagtcggcgctcgacgacattgcgtacattgagcgcgcgctcgtggcgaaatctgctggccccttcttcctcggtgagcagttctcgtacgccgacatcgcggcgctgcccttcatcgaccgcttccgccacaccctgctggagctccgcggtgttgacatccttgccaacgctccccgcctgacggcactcatcgctgcggcagagaagcgcccatcgttccaggccaccgcgcaaacgaaggactactacgtgtcgcactacaagaagtacgtggagtaaaaactctgtgtgcgtgtgttgtcatcgcgcccccctcttcttccttaccctcattccctacggtgagttgcccgcaactctttgaacttcggcccaggacgttgagcagtcccggcgaggcatatcctccgatgatccatcccacgatctgcgtgttcttcttttcaggggcgttacgacttcgtttttcgacgactttcgcgatatcaagacaacagcaacggctg

SEQ ID NO: 2022 - DNA, 1028 bp, Oryza sativa
  ref <308>: DATABASE ACCESSION NUMBER: AK059973
  ref <309>: DATABASE ENTRY DATE: 2001-12-06
atcgtttcgtttcctctctctcctcgtctcgtctcttctctctccatttttctcgaagcgagagtgcgttgcgttgcgagcgggaagcgaaaactcgaaaccatggccacggccggcgacgagcagcagcagcaggcggcggcggcgcagacggcggaggtgacggaggcggcggcgaaggaggtggtgtccgtggagatgccggcgccggaggggtggacgaagaagtttactccccagagaggggggagatttgagattgtttttgtttcaccaagcaacccaactgagccttccgcacccaaagctgctgctgctgctccagtagagaactccgcggacaaaggccctcaccaggacagccagccgccttccgccgccgcccccgccaaggagtcatcccctgtcaacaacgggcagctgccggctggtgcctctgccgtgaagtgcacctgaagatgaagatgaaaccccccaacgaatcatcatcctcctccccttgtccgtgatgtacgccttttaggaatcattcgcatttgcattgtgtaatcaaatcgaccaaggaactgacgttgctgggtgacagccggttattaggctctgcatcagtttagcttgcttgtatgtatggtatgattgtggtgtggcacagcaacatacatacatacatacgtgtaccctacccatcatgctcataatatctcttatcatgcctaacttgctgtaagcacattaatcttaggacatatataccgtcgtctgtccgtccgtctgtctgtgtttgtacctgtgctgtattatgtgtaatgacttgattagctatctatgaataaggttggatgtggatgtgcatcctcttatccatccatttaagattatccatcaacccatcaggcagggtggtttggatatattccccggtaatgcctgtgtaatactagtagtgatgtaatctaagttgtgtcttgtgtttgaacattgtagatcgatggtttgaacgaaatggaatttgggggagattgaatttc

SEQ ID NO: 2023 - DNA, 964 bp, Oryza sativa
  ref <308>: DATABASE ACCESSION NUMBER: AK059974
  ref <309>: DATABASE ENTRY DATE: 2001-12-06
atgcaccaatggccgctcccacgcgccgcctcctcctcctcaaccacgaacccaccaccacccccgcttcgtcttcttcgagttcgaggcaatccttccccacgctgctccccgtttttatcctcttcgtcctcctcctctgcttcctctctatcttcctcgtccgcgacctcctccacttcctctccctctgcctccgccgccgccgcctcctccttcgccacggggaggatcatgactcctcctccgtctccatgcagtcctcagcctcgccgattaatgcccaggcgccgcgcaagccgccgggcttggaccccgccatcctcgcgtccttccccacgctgcgcttcaaggcctccgccgccgcgccggagtgcgccgtgtgcctctccgacttcgccgccggcgacgccctccgcctgctcaccgtctgccgccacgccttccacacgccctgcattgactcctggctccgcgcccacaccacgtgccccgtctgccgctccgacctcgacgccgcgcccgcgccggcgcctcgccacgaggaccccgccgccgttgccgtcgacgtggaatgcgaccggaggggcggcgccggctgaccggtgaacgaccgccgccgtgctggatgacatgcaggatttcctttaattttgttcgcgccaaaattgattttgatttgttttgttttgtttgtggctgcctgcattaccgtgtaaatactcaacgacttgtatcgtccttgtgcattgtactgtcagtatttccaaattgttggaaatgataatgtagagtattccaggtagaattatgagctagtcaccacagcttcagctagctgtttaattcaattgcaagtctgcaatacctgtcaagaaaataaatcaactgtatcaatgtatcagttggaagcttttgcaatgttatttttagccacagaaatgggcggttgccggttggtacc

SEQ ID NO: 2024 - DNA, 1077 bp, Oryza sativa
  ref <308>: DATABASE ACCESSION NUMBER: AK059975
  ref <309>: DATABASE ENTRY DATE: 2001-12-06
aagaagcgagcagcagagctcagcgtttggagcgagatgatgagcagcagcagcagcttggtgtccgccatttctgcgtcaccgtctgccactgcaaaagctcgccttcgtcatgacgatgcagcaacagcaacaggagcagcagcagcagcagcagtagcagcgaggcagctaaagacggagcatggcggctgctgctgctgccggagcagaggccgggcggtggtggcgagggcggggcccgggccactgacggagatcgagcccgacctgaacgaggaccccattgataagtggcgcaccaacggcgtcagcccggacgacttcgagtatggagtgtatgatggtcaccacacatataatgaaacccaagataagaagggcttttgggaggatgtctctgagtggtaccaagaagctgaacctcctcagggcttccaagcactgatctcctggttgtttcctcctgcaatcatccttggcatggccttcaatgttccgggggagtacctctacatcggcgcagcagtgttcgtcgtcgtgttctgcgttatcgagatggacaaaccggacaagccacacaactttgagccggagatctacatgatggagagatcggctcgcgacaagctcatcgccgactacaacaccatggacatctgggacttcaacgagaagtacggcgagctctgggacttcaccgtcgacagaagagatgagattgtgaaatcgtcttagatatggtattcagaaatggggggtcacatttgttagatgcagctgcagaaacagttcagaaaatcagaaccactccaaagaaaagcagggtggcaaagctgcaagatgagtctcttcaaaataaagaactttgagatgaaatgatgtgtgtatggatcatctcatctactgtaaggcctgctttctatgtctctgacagtctcaactctgaagttctcagccaggtacaaaaggagactgaaaattctgtcatgtgtattttgttttccccccaatgtaatggagaaaatcctgtgaatgacatcactaattcaatagatatatatagtagtataatgg

SEQ ID NO: 2025 - DNA, 1090 bp, Oryza sativa
  ref <308>: DATABASE ACCESSION NUMBER: AK059976
  ref <309>: DATABASE ENTRY DATE: 2001-12-06
cgcaaccgtacgttcgcacacatgaaggagctcccagcgagtcgtgcgtggggagaagagtcgtcggctggccatgcgcagggaaggagcttgccatccagcaccgcgcggggagagaagctcccggccggccgtgcatatggagaggagtcgttgaccggttgcgcgcggcggagttgctcgcccgccggtcacacgggggtggggaggggggggagctcgccgaccggccgtgtgctgaggaggaggtcccggccggccacgcgcgggagaggagctcgctggccagccgtgcacggggagatagttgttggccaaccatgcgtggggggagcagctcgattgccggtcacgcccggggagaggtgtcgtcggccggccacgcggcggggaaggagctcgccaactggcgccgcgcagggagatgatttcccagctagccgcgcacgcgaagaggagtcgtcggccggccaccgtgatccccctcggccgtggtaccgtttgcagcgcccaagcacgtggctgtccaccccagacctaccagagaaagagataaggaagaagagaaggttaagatggttgacaggtagggcctactgttttttatttctaccattatcacttacatgtgggaccgttttctattttcaactcctttaatgactaggtgccacgtcagcacacttagatcaaatcaacttgccacatcagcaaaagccggttcaaaaaccactaaaggagttaatttgtaccagtttttaaagttgggggacatgttatacccggttttgaggttgagggatgtgattcaaccaagagcaagagttgagggaggaaaaatagacttatttcaagatttttacaaaatttattaaggaataagttcattggaggtccctcaacaaaatttaattttttttacaaattttacaaattaggattttttgagtttacttaaccataaaacgagaaatgtatacctctaaactcatacaaaccgtacaatcaaggtcctatagcagtatatataggtggcttgactgacgtggcattctagtcgagaaaaaaaagtccacatgtaagtgtgatg

SEQ ID NO: 2026 - DNA, 1015 bp, Oryza sativa
  ref <308>: DATABASE ACCESSION NUMBER: AK059977
  ref <309>: DATABASE ENTRY DATE: 2001-12-06
atcagtgctgatcttctcgccgaacggcacggcggagcgcgacgcggcgccgaacaaccccagcctccggggtttcgaggtgatcgacgccgccaaggccgccgtcgaggcggcgtgcccgcgcaccgtctcctgcgccgacatcctcgccttcgccgcccgcgacagcgtcaacctcaccggcaactccttctaccaggtccccgccggccgccgcgacggcaacgtctccatcgacaccgacgccttcacgctccccgggccaaacctcacggcgacgcagctcgtcgacggcttcaagctcaggaacctgaccgccgaggagatggtcatcctctccggctcccacaccatcggccgctcgcactgcgcctccttcctcttcaagaaccgtgaacgtttggcgaatgggacgattagcccggcgtaccaggcgctgctggaggcgctgtgcccgccgacgacggggcggttcacgccgatcacgacggagatcgacgtgagcacgccggcgacgctggacaacaactactacaagctgctgccgctcaacctgggcctccacttctccgacgaccagctcatccgcaacgccacgctcctccccttcgtcgacgccttcgccgccaacgagacgctgtggaaggagaagttcgtcgccgccatgatcaagatgggcaacatcgacgtgctcaccggcgcccggggggagatccggctcaactgcagcgccgtcaacccgtcctcgtcgtcgtcgtcgtcctccgccgggaggatgatcgagaccgtcttccccggcgccggcggtgaggtcgccgcgagctaagctatacccttgctgaccatgtaatatacgtcatatatatgatgataatgtaaaattaataatgcatgacacgcacttgcactgtgtgttgtacggccagggcaagtgtggttggttgatgaaggctttgtttgcacctacttgatgtgtgtagtgactctgccatgaacgatgcacgtatacaagtat

SEQ ID NO: 2027 - DNA, 1147 bp, Oryza sativa
  ref <308>: DATABASE ACCESSION NUMBER: AK059978
  ref <309>: DATABASE ENTRY DATE: 2001-12-06
tagttggacagatgatgatttcagaaaggttgtggaggaagttggtccaggagtattaaaagctgatctcatgaaggtctcaagtgcaaatcgcaatcggggttatggttttgttgaatactacaaccatgcatgtgcagagtatgcaaggcaggagatgtcttccccaacattcaaactagattcaaatgctcctacagtcagctgggcagatcctaagaataacgactcggcctctacttctcaggttaaatctgtatatgtgaaaaatctgcccaagaatgttactcaagcacagctgaaaaggctgtttgagcaccatggtgaaattgaaaaggttgttcttcctccttcaagaggaggtcatgataataggtatggttttgttcactttaaggacagatccatggccatgagggctctgcagaacacagagagatatgagcttgatggtcaggtcctggattgctcacttgcgaaacctcctgctgctgataagaaggatgatagagtaccactacctagttcaaatggagctccattgctcccgagttatcctccacttggatatggtatcatgtcagtaccaggtgcctatggtgctgctcctgctagtactgcacagcctatgctgtatgctccaagagctcctccaggtgcagcaatggttccaatgatgttaccggatggtcgtctcgtatatgttgtacaacagcctggtggacagttgccgctggcttcgccgccgccgcagcaagctggacatcgtagcggcagtggaggacgtcatggcgacagtggcggccgctatggcggtggtggtggcagctccggcagtagcaggccaggtgcaaagcggcagagaggagacgacaacagcagtagccgccacaaaggccggcgccgcccgtactgatctgatcagcatagctgtagctaccacttagaagatgtagtgtcgttgcagaaaattaccagaaaatctggtagaaataatttatactgtttgtactcgtcgatttattagaggaatgcgtttctgaaacaagactgtacatgcgtattttacctgtatcgcagagtgctgaatctgatggtgcactggtacagtataagccagtttcaggtctctttgtaagcctgtttt

SEQ ID NO: 2028 - DNA, 1161 bp, Oryza sativa
  ref <308>: DATABASE ACCESSION NUMBER: AK104163
  ref <309>: DATABASE ENTRY DATE: 2002-08-28
ctcctctttccctcccacctccacacgtcccctcctcttccccaatattccacgccaccgccgccgtcaacctccgccatcagcagcagcagcagcggtctcccattcccattctttgctcccacgcgaggctgcgcggagaacagctgcacaggtggggtgggggtgcagaccgagctgaggagtagccggagttggtggtgagagacgcgggtggggcgcggccatggcggggagggtggtgcggagctgcgtgcagacggggctcaaggcggtgaactccgtgctggggctcgccgggatggccgtcatcctctacgcgctctggatgctccgcgcatggtacagggacgtcgccgacctccactaccgcctcccggtcccatggtttatctacacttttattggcctgggagtctttatgtgcttgttgacttgctctggtcatattgcagctgaaactgcaaacagccactgtctctcttgttacatgatttttgtgtttattattattatattggaaggagcaatcaccactgacgtatttctgaatagcaactgggaggaggatttccctgatgacccatctggaaagtttgaagaattcaaggattttataagatcaaattttgagatttgtgaatggataggcctctcggttgtcgctgcccaggtgttgtcaatcgttcttggaatggtacttagggctcttggacctgaccgtgaaagtgactatgatagcgacgacgacccctctgtgcctgcaaggctgcctttactaagaaaccagtaccaacatggcataaactattctgaacataccttacctcaaagtagtgattcatggagtttgcggattttagataaggctaacaaatgaaaattttctgacgatgaacctttggatggagctatcaccatgcttcggcctgaaggtttagctcgacatgaggaaatgatacccttcttttttttttctaggtagcaatattgaatggcttcttttgattgcctaaacatgcacaactatttgagtagcatgcaactgacccttacagccccttgatgttatgggaagaatgttgtattttacagtgcttcagaaacagatgatggcgtgattccgtcactgacaaaaacacagttgaatgttttgtagtc

SEQ ID NO: 2029 - DNA, 1148 bp, Oryza sativa
  ref <308>: DATABASE ACCESSION NUMBER: AK104164
  ref <309>: DATABASE ENTRY DATE: 2002-08-28
atcccgctctctctctctctcgacgagagagagaaagtgcgaagatatgctttccgtcgcccgccggcccctctccgccgccgtccccgtcggcaacctcctcggcatccacctcttccaatgccctgacacggtgggcattgtggcgcggctgtctgagtgcatcgcctcgcgtggtggcaacatccacagtgtcgatgtctttgtccctgacgacaaacccgtcttctactcccgtagtgagtttacctacaatcccatgctatggccgcgcgatgtgcttcgcaccgacttcctcaatctgtcacaacacttcagcgcacaaagatctactgttcgagtccctgatcttgacccgaaatacaagatatctgtactcgcttcgaagcaggatcattgtttgtttgacttgctctatagatggcaagagggaaggcttccggttgacatcaattgtgtcataagcaaccatgatcgacttaaagataaccatgtcagacgtttccttgagagacatgggatcccctatcattacctaccgacaagcccaggaaataaaagagagcaagagattttagaattggttcaaggtaccgattttgtggtactggcaagatatatgcagatattatctgaaggctttctcaaggcttatggcaaagatattattaacatccatcatggtcttcttccctcatttaagggagggaatccttcgagacaggccttcaacgctggagtaaaattgatcggcgcaaccagccattttgttaccccagaacttgatgctggcccaatcattgagcagatggttgaacgggtgtcccacagagacacgctacagagctttgtggtgaaatctgagaacctagagaagcagtgcctagcagaagctataaagtcgtactgtgagctccgtgtgctaccatatgaattgaagaagacagtagtgttctgatatcttttgaaggaagcgattttgtttgtttgtttttatttgttgataagaggaaattactacagtacaaaattttgtggtgttgattgctttggtgataaggaggtgggtgtgtgggcgtggctggacagtgcattttgtaattgattgagtataacaatactccaaagcaaataaaatgataatgcat

SEQ ID NO: 2030 - DNA, 966 bp, Oryza sativa
  ref <308>: DATABASE ACCESSION NUMBER: AK104165
  ref <309>: DATABASE ENTRY DATE: 2002-08-28
gagggccatcaagcatatccatctccgattcacagattctttctggagatccatcatccagcgagagcgagagcgagagggagaggaagagggaaagccgccaccgccatgttggggcatctggttgggctggtgaaggtgcgggtggtgaggggcgtcaacctcgccgtccgcgacctccgctccagcgacccctacgtcatcgtccgcatgggcaagcagaagttgaagacacgagtcataaaaaagactaccaatccggagtggaacgatgaactcaccctctcgattgaagatccagcagttcctgttagactggaagtgtatgacaaagacacattcatcgatgatgcaatgggcaatgcggagctggacatccgcccattggtggaggttgtcaagatgaagattgagggtgttgctgacaacacggttgtgaagaaagtggtacccaatagacagaactgcctagctgaagagagcacgatatatatctctgaggggaaggtgaagcaagacgtggttctcagactaagggatgtggaatgcggggaaattgagctccagcttcagtgggtcgacatcccaggttctaagggtgtatgaactctgtactctgcctattgcttacagtcttgcatagctcgcaagtccaactctaagtttatcagtggacaatcaaataagcaacagcttatattgatgagattcttttactgtccttgaggaggcagatacctcccagtgcctcctcaatggctgtaaaatcattcttatgttgacacagcaagtgtctcgaagatcccccactaggtgtttgggcagagcaaagttgtacaatatgtctgcaaagtatagtttggtgttaccctgtctgtagaaaaataatcagtggcaggggttgtaactattgaaactttgtctgtctttcttcttgtacgccaaagaccaatgctatctgcgatt

SEQ ID NO: 2031 - DNA, 925 bp, Oryza sativa
  ref <308>: DATABASE ACCESSION NUMBER: AK104166
  ref <309>: DATABASE ENTRY DATE: 2002-08-28
cttcgttggtccgcaccttctcccctcacccgccgccggggatccgctccgccgtctcgcctcccgccccgtggatccaccttgccgctccagatggaatcctgcccttcggtgaagaacatccttctgctggattccgaggggaagcgcgtcgccgtcaagtactacacggatgattggcctactctctcggcgaagctggccttcgagaagtcggtgttcgtcaagacccagaaagccactgccggagcagaagctgagattgtaatgtttgatggccacattgtggtgtataagttcatccaagacctccatttttttgttactggaggagaggaggagaatgagcttattttagcatcggtccttcaaggattcactgatgcagttgacattattctcagaaataacgtcgacaaaagaacagcactcgaaaatctggatctcatcctattgtgcctcgatgaaattgttgatggagggattgtcctggaaacagaaggaagtgtgatagctgaaaaggtgtcagcacatggaatagaaggtgctacttcactcgctgagcagactatagttcaagccctaacaacagcaagagagcacttgaccaaatctcttcttatgtgatgtgctctgcttttggagctgaagatggagtagcatcccgttgttacatctctaggactgatacgttcattgcaatagaaacgacggaacagaatatctgaatccatttgcgtgtagagtggcacgttcccttcattgacactatctggttcagttttgcgagtatttaaaaaactgcacaaacaagattgtgaacggtgattgtttcaattttgattgttctttgttttgtagatttatatatatgttgttgtgcagtggatcaatatattgcttatggagatgaatgtctttcttt

SEQ ID NO: 2032 - DNA, 1175 bp, Oryza sativa
  ref <308>: DATABASE ACCESSION NUMBER: AK059979
  ref <309>: DATABASE ENTRY DATE: 2001-12-06
gtctatctagctcagtagctcacctgcttgtgtgcttaagctcgtgtttgcagcaaaccatggatgcagacagggaccccatcttcccggtgcaacagatgccatcactgctgttcccgccaccgccgccacggccattggcactcgactccacttcttcagcatcttcttcttttgtgcctcaccatccatccatcacgagcttcccaatactggtgctcaccgtcctgggcatcctcaccacctccgtcctcctgctcacctactacatctttgtcatccgctgctgcctcaactggaacagcagcagctcctccgacacgcggacggctggcctcatctcccgccgtcgacgcggtgccgcctccagcagcctcccggcagtggccgagccgcgtgggctggaggaggcggccatccaatcattgccggcgttcaggtacaggaaggccatcaaggacactactgctgattccagcaagtgtgcagtgtgtatcagtgagttccaagaagaggagagggtcaggctcctgcccagctgcctccatgtcttccatgttgactgcatcgacacttggctccagggcaacgccaactgtccactctgcagggcagccatagccaccaacgacagccagcttccattggatcagttcgtgagacctgaggtggtagtcattcaggtgatcactggcgcggaagaagaaggtgcacaagcaccacagcaggaggccaatacggcagcttctgatcctgcagtagatgctactagtacaaatcaacaggtcagtagtaagaagacgaagaaccagaatgcatggcatgtcagcatcagtaagggagatgagtgcattgcagtgaggagggacagaaatgttcttccattgaggaggtccttctccatggactcactgggtggtgctggagaggtgcatttgcagattcagaatattctgcagaggagcacccacttccacagggatatcagtgacagcagcagcagcagcactggaacattgtagggattactatgcctgcacattctatggccatgttctatgcgaattcttttggtggtcttgttcaccaatttttcttttctttttctgcaaaatgcaatattacatgtcaatttttctctaatggacacctataacatggtttgtgtgtgtccg

SEQ ID NO: 2033 - DNA, 1223 bp, Oryza sativa
  ref <308>: DATABASE ACCESSION NUMBER: AK104167
  ref <309>: DATABASE ENTRY DATE: 2002-08-28
catagatccggagattcccaaataggtcaaccttttgaactgcctgctgaatccatgagcaggcaagagacaacctggcgaactgaaacatcttagtagccagaggaaaagaaagcaaaagcgattcccgtagtagcggcgagcgaaatgggagcagcctaaaccgtgaaaacggggttgtgggagagcaatacaagcgttgtgctgctaggcgaagcggttgagtgccgcaccctagatggctaaagtccagtagccgaaagcatcactagcttacgctctgacccgagtagcatggggcacgtggaatcccgtgtgaatcagcaaggaccaccttgcaaggctaaatactcctgggtgaccgatagcgaagtagtaccgtgagggaaaggtgaaaagaacccccagtgggtagtgaaatagaacgtgaaaccgtgctgagctcccaagcagtgggaggggaaagtgatctctgaccgcgtgcctgttgaagaatgagccggcgactcataggcagtggcttggttaagggaacggaacccaccggagccgtagcgaaagcgagtcttcatagggcgattgtcactgcttatggacccgaacctgggtgatctatccatgaccaggatgaagcttggatgaaactaagcagaggtccgaaccgactgatgttgaagaatcagcggatgagttgtggttaggggtgaaatgccactcgaacccagagctagctggttctccccgaaatgcgttgaggcgcagcagttgactggacatctaggggtaaagcactgtttcggtgcgggctgcgcgagcggtaccaaatcgaggcaaactctgaatactagatatgacccaaaaataacaggggtcaaggtcggccagtgagacgatgggggataagcttcatcgtcgagagggaaacagcccggatcaccagctaaggcccctaaatgaccgctcagtgataaaggaggtaggggtacgtgtcggcggcggctgtgtgggcttgctaccccaacccacccctcccagatccggacggaggggggaggaggctgtggcggcggcggccaccccatgcaacggaggagttcaccggcgacgatgtcttcttttaagtttacatattgttcattgttgttaacttgctgtggatttgaatccaatacttttgtgttgcaactttacactatctgtgattggattttgtttcttggatg

SEQ ID NO: 2034 - DNA, 1106 bp, Oryza sativa
  ref <308>: DATABASE ACCESSION NUMBER: AK059980
  ref <309>: DATABASE ENTRY DATE: 2001-12-06
atcgaatcaaattactactagtctcccttccacgccacgcacacgcacccaatcccctatcgatcgagagacatggcctccaccaccgccaccgccgccggcaacggcagcggcagcatcctccccacccacaccaccacggcgccacccttcagagcccataaggacgccgacctggaatccacgacgcggcggcgccggcgacgctgcctgtgctgctgcctgctcgtcacccttgtggtgctcctcgtccttgccatcaccctcctggtcctcttcctcacggtgctccgcgtccgcgaccccaccacccacctcgtctccacccgcctcaccggcctctccccgcgcctctccttcccggccacgtcggtccagctcaacgtcacgctgctcatcaccgtggcggtgcacaaccccaacccggcctccttcacctacgccacggggggccacaccgacctcacctacaggggcgcacacgtcggcgacgccgagatcgacccgggccgaatcccgagccgtggggacgccaacgtcaccatggcgctcaccctgcaggccgaccgcttcgccggcgacctcacgcagctcgtctccgacgtgatgggcgggtcggtggcgctggacgcgagcactcggatccccgggagggtggccatcctgggcgtgttcaagcgccacgcggtggcgtactcggattgccatttcgtgttcggcgtcacggagatggccgtgcgtagccagcagtgcagcgaccgcaccaagctctgattgatcatgtgattccaacttaatttgcaagtttccaagcacgcaacgtaaggtgggcatgccgcatcgcgacgtgggacaagacgagaagccgtatgatatgctgctttgttacgcaggtgcactgcactagtagtacatagtagagtattatattctacacgggcggcacattagttcgttacagatagtatcagatcaggaattcaggattcagtgctacgattttcttcaatatttcttactgcgtgttgggattgatttgattcatgtatataacacggtgtcagtttggatatatatacagtaatttcactattctctatttcttc

SEQ ID NO: 2035 - DNA, 1250 bp, Oryza sativa
  ref <308>: DATABASE ACCESSION NUMBER: AK059981
  ref <309>: DATABASE ENTRY DATE: 2001-12-06
acagccgcagccgccttctcactcctcacctgctcctgtctccggagcaccagcccgaccaggctcccctcctcctcgctccgcctcccgctccgccgcggcccgctcgccgcgatggccacggccgcctccttccgcccggaggccgcgcggtcgcctcccgccgtccagcccccggcgccgccgctctccaagttcaaggtggcgctgtgccagctgtcggtcacggcggacaaggctcgcaacatcgcgcgggcgcgcgaggccatcgaggctgccgcggcgggcggcgccaagctcgtgcttctcccggagatatggaatggtccatattcaaatgacagctttccagaatatgccgaagacatcgaagccggtggtgatgcagctccttcattttcaatgatgtcagaggttgctcgcagcttgcaaattactcttgttggtggatccatatcagaacgttctggtaacaagttgtacaatacatgctgtgtctttggttcagatggcgagcttaagggcaagcacagaaagatccatctttttgacattgacattcctggaaagattacattcaaggaatcgaagactcttactgctgggcaggatcttactgttgtagacacagatgtaggccggattggtataggtatttgttatgacattcgtttccaggaattggcaatgttgtatgctgcgagaggtgctcatttgttatgctatcccggtgcatttaacatgactacagggccattgcactgggagttgctgcaaagggcaagggctgcagacaatcagctgtttgtggcaacctgtgcaccagctcgagacaccagtgcaggttatattgcttggggacattccactcttgttggaccttttggggaagtgattgctaccgctgagcatgaggagaccactataatggcagaaattgattattcattgattgatcagaggaggcaatttcttcctctgcaatatcaacgccggggcgatctctatcagttggtagatgtccagagatccggctctgatgagtagccagcctggatgcattgcgccactaggcgtgatccgtgaaaatattattcgtccgcgagatgcatgtgcccacccttatccgcagcagttcacccaggaacattgacttcgtgtgtgaagaggtgacctgtaacacgtaccttgccaaattgatttactataaacattatcatggtaataataaaaggtcgaaattaaatgct

SEQ ID NO: 2036 - DNA, 1187 bp, Oryza sativa
  ref <308>: DATABASE ACCESSION NUMBER: AK104168
  ref <309>: DATABASE ENTRY DATE: 2002-08-28
gaagaacactgggggagaagaacacaagtgtgcagcgtgcgtgtgtggaggcgagaggaggaagacgaaggcgaggagggaggaggtagctgcgcgcgggcgatggaggtggggttcctggggctgggcatcatggggaaggcaatggcggccaacctcctccgccacggcttccgcgtcaccgtctggaaccggactctctccaagtgccaggagctcgtcgcgctgggcgccgccgtgggggagacgccggcggccgtcgtcgccaagtgcagatacaccatcgccatgctctccgaccccagcgccgcgctatctgttgtattcgacaaggacggcgtgctcgagcagattggggaagggaagggttatgtggacatgtccactgttgatgccgccacttcttgcaagataagcgaggctataaaacaaaaaggtggggcttttgttgaagctccagtttcaggaagcaaaaagccagctgaagatggccaattggtcattcttgctgcaggggacaaggtattgtatgatgatatggtccctgcatttgatgtacttgggaaaaagtcgttctttttgggagagattggaaatggagcaaagatgaaactggtggtcaacatgatcatgggaagtatgatgaatgctttgtctgagggactctctctggctgataacagtggtttgagcccccagacacttcttgatgtcctggaccttggcgccatcgcgaatccaatgttcaagctgaaagggccctcgatgctgcaaggcagctacaaccctgcatttcccctgaaacaccagcagaaggatatgaggttggcacttgccctaggagacgagaacgctgtctccatgccagtggcagctgcttccaacgaggcgttcaagaaagcaagaagcttgggactaggggacctggatttctcagcggtttacgaggtactgaagggcgcaggtggctcaggcaaggcgtgaaactctgaacgctagaatccattcttcagaatctgcccattgccgtgcaggtttgctacagtgatcggcatcgaaccacgcagcatatgtcatcgtattgatactactgggtaaccagtgtgaacgatgtagttgcaggttaagtactacagcttgcgtgaacttcatcccaataataaagatatatatagctctgttatgcg

SEQ ID NO: 2037 - DNA, 1062 bp, Oryza sativa
  ref <308>: DATABASE ACCESSION NUMBER: AK059982
  ref <309>: DATABASE ENTRY DATE: 2001-12-06
accaccgcaagtcgttgttgcaaccgcgagcctcgctcgtctcctcttcctcctcctcctcctcgacatggtcagcgagcaaacggcgccggtggcgaccgccgaggcggagctggagagcagcgccgcgccgcccgtcaagcccgacgaggccgcggccaaggcgcagccggaggacgacgcccccgttgtggaggatgccaaggatgatgacgacgacgaagaagacgacgatgacgacgaggatgaggatgaagacggtgaacaaggtgcaatcggaaacgagggctccaagcagagcaggagcgagaagaagagccgcaaggccatgatgaagctcggaatgaaacccgtcacgggagtcagcaggattaccatcaagagagccaagaatatactgttcgtggtgtccaagcctgacgtcttcaagagcccgacgtcggagacgtacgtcatattcggggaggccaagatcgaggacctgagctcccagctgcaggcgtaggccgcgcagcagttcaggatgcaagacctgagcaaggtgatgtccaagccggacgcggcggcggcggcgccggccgacgaggaggaagaggtggacgagacagggatagagccccgcgacatcgacctcgtcatgacgcaggccagcgtgtcgcgggccaaggccgtcaaggcgctcaaggcgcacgacggcgacattgtgagcgccatcatggagctcacggcctgaagccccctcctgctgctgcattggcaccacctctcttcccccatttcagtatcgtgtttttttttatggcgtttcgtcgtgggtttgcataagatgccctgtttgttcagctgctggactttgcatcaaacttttcatagcatgttcccatattagtgtcatcttaaatggagttttcagacttgtttgaacggcaacaccaatagagttcgatattttgagtcaattaagaggagaaataagatgttcaccaaatccatagcatgccagcgcaatggtaatataaatttattggattaatgcattgttttgtttacacattgcacgac

SEQ ID NO: 2038 - DNA, 858 bp, Oryza sativa
  ref <308>: DATABASE ACCESSION NUMBER: AK104169
  ref <309>: DATABASE ENTRY DATE: 2002-08-28
gaaacacgccaaggaagaaaaaaaaatgggcgtccagcatctgctcaagctgaggatggcgtcgccccacccgcacccgcaccccggcgcgccgctcgccgcgcgcccgctctccgcgctcgcctccttcttcctcgcccggccctcctccaccgccgccgcgcctcctcctcggcacgtcaccctctcgtgctcgcggccgcactgcaaccacaaccagtgggccgccagccggtgccgcgggacggcgggccggcggcggctgcaggtcgtcgtggcgatgtcctcgtcggcgccgccgccgcctccgggatccgtgcagaagtcggaggaggagtgggaggccatcctctcgccggagcagttccgcatcctccgcctcaagggcacggagtatcctggaacaggtgaatatgacaagctcttcgctgagggtgtttatgaatgtgctggatgcgggactccattgtacaagtcatctactaaattcaactcaggttgtggttggccagcattctatgaaggatttcccggagccatcgcacgaacgcctgatcctgatggcaggcgaatagagatcacctgtgcggcttgcggaggacatttaggacatgtcttcaaaggggaggggttcaacacgcctacagatgagcggcattgtgttaacagtatctcactcaagttcattccagcctcagaagatagtaagctttgagcatggaagtataagcccgcaatagaacagtctgcgcagtcatagtaaacctgtgattattaaaaaagtatcggatttttcagaaagcaatttatactctgcggtttgtcaataatgcgaaataccaagtctgatgattgtcg

SEQ ID NO: 2039 - DNA, 1203 bp, Oryza sativa
  ref <308>: DATABASE ACCESSION NUMBER: AK104170
  ref <309>: DATABASE ENTRY DATE: 2002-08-28
tccatcgcagccatttttacccctagccccctccgcttcctcctttttacatccaaacccctcttccactcccctcgccgccgccgcctccgccgtcggggaggatgggaggggcgcacttccccgatgagggcgaggtggtggccggggagggcgacgccgtcgtccccctccgcgacgtgggcaagatggagcacgggtgcgagcattacaggaggagatgcaagatcgtggcgccctgctgcggcgaggtgttcgcttgccgccattgccacaacgatgccacggcttcaggtgatcggcataccatttgccgccaggatgttgaaaaagtagtatgtctactctgtgatactgaacagccggtgtcacaagtgtgcataaactgtggtgtcaatatgggagagtacttttgtgatgtatgcaagttttatgatgatgatacagagaaagggcagtttcattgctacgattgtggcatatgcagggttggtggcaaggaaaactacttccactgcgcaaagtgcgggtcttgttatgctgttgctctgcgtgataaccatcagtgtgtggagaactcaatgaggcagaattgcccaatttgttatgagtatctatttgattcattaaaaggaacacgagttctcgactgtggacacacgatgcacatggaatgcctttctgagatggtggaacataacaaatacacttgtccaatatgctccaagacagctcttgatatgacacatcactgggcattgttagatcaagagattgaagcaacaatcatgcctcccgtctaccgttacaaggtttgggtgctctgtaatgactgcaacaaggtctcagaagtggacttccatgtgattggccacaagtgcagccactgcaactcgtacaatactcgatcgacatcacggcctgcggatttatcaggaagcagttctccctcgacgtcagattcgtccgaaaacaatccgtagataacatgccatgttggtgcccaacaagatctacagtttagacaatcaagtcccagattcatacatatacaagtagtagaaggaacattgttttgcggctagcctatccaagtgcctacccaattcttcaagattcaattgattccttgaatcttcatgtgttggaactgctactagacaaaagctattgtgatgataccatatgttgtgttgaatcttt

SEQ ID NO: 2040 - DNA, 1084 bp, Oryza sativa
  ref <308>: DATABASE ACCESSION NUMBER: AK059983
  ref <309>: DATABASE ENTRY DATE: 2001-12-06
aatctagcccgtgacctcctcgccggggctacttctccatcgccatcgacctcgacctcgccgcctcctcctcctcctcctccccgtgcgaactccgggctcgtgccgagggggtggacgcgccggtggtgagagcggacgcggtgcggtgggccatggcggtggggtggcggccggcgatgctggtggtggtggtggcggtggcggcgtggcgcggggaggcgctgtcggtgacggtgaccgacacggagtgcatccacgagttcgtgccctacgagggggacaccgtgtcggggaacttcgtcgtcgtcgaccacgacatcttctggagctccgaccaccccggcatcgacctcacggtaacttcaccaggtggcaacactgtgtatacattgaaggggaagtctggtgacaaatttgaatttaaagctccaaggggtggaatgtacaagttctgcttccataatccatatggagcacctgaaaccgtttctttctacattcatgttgggcacatacccaacgagcacaatctggcaaaagatgagcacttggaccctatcaatgtgaaaatagcggagctgaaggaagcattagaatctgtcactgctgagcagaaataccttaaagcccgtgaagctcgtcaccgacacacaaatgagagcacaagaaggcgtgtcatgttctacacaatagcggagtacctagctttcatgggtgcaagcgctttgcaagttgtttacatccgtcgcctattcagcaaaaacgtggcatacaacagggtgtagaacagagtctacttcaaggcagcagaaaatggttggagcaggaaaaaaatatttccaacatattgtgttagcttttgcagccattttttttgggtttagtctaaaacgtggcacttttaaatttattgccttgtactttagaacttcagtgagatatgaagcacatttgttgctgaacaagtgaacacagatccgtaactaatcttcaaagggttgatgtctcaaagcaccacttgtgttattgtgttaatatgacttatgagggtcttcgttctgatataaattgatcaaatttt

SEQ ID NO: 2041 - DNA, 1077 bp, Oryza sativa
  ref <308>: DATABASE ACCESSION NUMBER: AK059984
  ref <309>: DATABASE ENTRY DATE: 2001-12-06
acatctcaactgaattagtaatagtagatctctcgccgtcgccgcctccgcctccgccgccggaatccccagcaacaacccgccgccgcgatgtctcgccggtacgacagccgcacgacgatcttctcgccggaggggcggctctaccaggtggagtacgcgatggaggcgatcgggaacgcagggtcggccctgggcgtcctggcggccgacggcgtggtcctcgtcggcgagaagaaggtcacctccaagctcctccagacctcgcgctccgccgagaagatgtacaagatcgactcccacctcgcctgcgccgtcgccgggatcatgtcggacgccaacatcctcctcaacacggcgcgcctccacgcccagcgctacgccctctcctaccaggagcccatccccgtcgagcagctcgtccaatccctctgcgacaccaagcaggggtacacccagttcggcggcctccgccccttcggcgtctccttcctcttcgccggctgggacaagcaccatggcttccagctctacatgagcgacccctccggcaactacagcggctggaaggccgccgccgtcggggccaacagccaggcggcgcagtccatgctcaagcaggactaccgcgacgggatgacacgggaggaggccgtcgccctcgccctcaaggtgcttagcaagaccatggattcgaccagcttgaccgccgagaagctggagctcgccgaggtgttcttgctgcccggcaccggggaggtgcagtaccaggtgtgctcgcctgaggcgatggggaagctgctcgccaaggccggcctctcgcagccggcgcctgaggcttgatctactgagatggtttgcttcttgttctcgcaattcggttggtgtttaatccatgtgatggtaaacagttgatgaatttagtataaattttcttttaagagttgccatcagctatggtttgaaatcaatccagattgttgtgtgttatcgtcctatttcttatcagcaagaacccttcttagtgattatatggttatattgagtatatttatagagcccaaataccttggacat

SEQ ID NO: 2042 - DNA, 963 bp, Oryza sativa
  ref <308>: DATABASE ACCESSION NUMBER: AK059985
  ref <309>: DATABASE ENTRY DATE: 2001-12-06
tcaatcgcactcctccaacctaccactgtccgccattacattacaaaccacactgcgcgccatcaattctccgatctcatctcgctctcgccatctgctgcttgccaccaccacatcgtcgccggcggcgagagtggcctggagagatcgtcggcgatggcgggggaggggaggaagctgcgggtgtacgggatggcgctgtcggcgaacgtggtgcgggtggcgacggtgctgaacgagaagggcctcgacttcgacctcgtccccgtcgacctccgcaccgccgcccacaagcaaccccacttcctcgccctcaaccctttcggccagatccccgtgctgcaggatggagacgaagtcctgtacgagtcccgcgcgataaaccggtacatcgcgaccaagtacaaggcggagggcgccgaccttctgccggcggaggcgtcgccggcgaagctggaggtgtggctggaggtggagtcgcaccacttctacccggccatctccggcctcgtcttccagctcctcatcaagcccctcctcggcggcgccacggacacggccgccgtcgacgagcacgccgccgcgctggcacaggtgctcgacgtctacgacgcccacctcgccggcagccgctacctcgccggcaaccgattctcgctcgccgacgccaaccacatgtcctacctgctgttcctctccaagacgcccatggcggagctcgtcgcgtccaggccgcacgtcaaggcgtggtgggacgacatctcctcgcgcccggcgtggaagaagaccgccgccgccatccccttcccgccggccgcctgaccgccgccgccgctgccgcctcgccggccggtgcccgcatggatatgggacgataaataatttttttactactcattaatgtacgccgttaattatatgtcaaatactgtgctcgcgttttatcaattcacatgctttgag

SEQ ID NO: 2043 - DNA, 1121 bp, Oryza sativa
  ref <308>: DATABASE ACCESSION NUMBER: AK059986
  ref <309>: DATABASE ENTRY DATE: 2001-12-06
actctcctcgaacgcgcgacgccgccgccagagtctccggctcgccgcacttcccgcctcgccgtcgccgtcgccgtcgccgtcgcccctcccgccggtaggagaaggtagctcggcgcctcggtgacttggcgtcgcgctctgcgcccctgccgctctcggtcggtaggctctcgtctcacgcggccccttccaccgcttcacgccgccggcagtgagcagtcagctgcgaggacccgctccaccgagagagctaacgccgccgccgcccgcggtgcgcgtagtgctcgagactgctgctggtgttgatagtgttatctgggatttttagtctgaggatggggagggcgaagagcaagggccctaagttcgccgccgtcaagaagatcatcaccaagaagaccatccagaagtacaaggaggatgtgttgaaccccaagaagaaggataacgagaaggagaagctcgggcggaatgtgcctcaggtctcttcggcgctgttcttcagctacaacacagcgctcgggccgccataccgggttattgtggatacaaacttcatcaatttctccatccagaacaagttggatttggagaaaggaatgatggactgcctttatgcaaaatgcacaccatgtatcacggattgtgttatggcggagcttgaaaagctgggacaaaagtatcgtgtagcattgagaattgcaaaggaccctaggttccagagattagcatgcacacacaagggaacttatgctgatgactgtatcgtagagagggttactcagcacaagtgctacatcgtcgcaacatgtgatagagatttgaaaaggaggataagaaaggttcctggtgttccaatcatgtatatcactcggcacaggtactcgatagaacgactccctgaagctacaatcggaggagcaccaagaatctgatcggcacggacataaaaaatggggaatgtttcactgttcaacttgctggccaagaatactgctgtagtagccttttgaaacaaatgctgtagtgagctgtgctaattgtaaccacttcaaagttttgtaccaacctcatgaggatattactgttatcgagatccaagagatgtgtttgcttcc

SEQ ID NO: 2044 - DNA, 1312 bp, Oryza sativa
  ref <308>: DATABASE ACCESSION NUMBER: AK059987
  ref <309>: DATABASE ENTRY DATE: 2001-12-06
aaaaatcatcagatccgcctccgcctcctcctcctccacctcctcccaccccctcgccgatccagatccatcgccggggaggcgccagccatggccggcggcgggggcgccggcggcatgtcggagtcggtgctccgcaaggtgctcctctcctactgctacgtcggcgtctggatcttcctctccttcgccgtcatcgtctacaacaagtacatcctcgaccccaagatgtacaactggcccttcccgatctccctcaccatggtccacatggccttctgctcctccctcgccgtcgccctcgtccgcctcctccgcgtcgtcgagccgccctcgtcgcccgccatgaccccgcagctctacacctcctccgttgttcccatcggcgcgctctacgccatgtcgctgtggttctccaactcggcctacatctacctctccgtgtccttcatccagatgctcaaggcgctcatgcccgtcgccgtgtactccatcggggtgctcttcaagaaggagaccttcaggtcgtcctccatgctcaacatgctctccatctcgttcggcgtcgccatcgccgcatacggcgaggcgcgcttcgatgttcggggtgtcgcgctgcagctcgccgcggtggcgttcgaggccacgcggctcgtgctcatccagatcctgctcacctccaagggcatctcgctcaacccaatcacctctctgtactacgtcgcgccgtgctgcctcggcttcctgctcgtgccgtgggtgttcgtcgagctgcccaggctgcgcgccgtcggcacgttccgcccggacttcttcgtgttcgggaccaactcgctctgcgccttcgcgctgaatctggcggtgttcttgctcgtcggcaagacctccgcgctcaccatgaacgtcgccggggtggtcaaggactggctgctgatcgccttctcgtggtccgtgatccgggacacggtcacgccgatcaacctgttcggctacgggatcgccttcttgggggtggcatactacaaccacgtcaagctgcaggcgctcaaggcgaaggaggcgcagaagaagatcagccaggctgatgaggaggctggctcgctgttgcaggagcgcgatgggcacagtgatcgcaagagcgataaccaggcatagagccaccaccagatctgatcctggcacacacaaattggttggttctaaatccggctgtgttatctcttttggttgcactctcaatgtgtttgttctttaccttgatccgttgtaggagagcaataaattatggagtaaaatgtgatcttttacattt

SEQ ID NO: 2045 - DNA, 1266 bp, Oryza sativa
  ref <308>: DATABASE ACCESSION NUMBER: AK059988
  ref <309>: DATABASE ENTRY DATE: 2001-12-06
gagctccggggaaaccactagtagccacttgagcttcttcttcgccactgaggggaaggggaagagggatcggaggagatggcgagcaacggcggcgaggagaagagccgggtggcggcggggtacggcgggggagggtacgggtacggcgggtacgaggggcgggacgacaggaagtggtggccgtggctcgtgcccaccgtgattgtcgcctgcatcgcggtgttcatcgtcgagatgtacgtcaacaactgccccaagcacggcagcgcgctcggcggctgcgtcgccggcttcctccgccgcttctccttccagccgctccgcgagaacccgctcctcggcccgtcttccgccactttgcagaaaatgggagctcttgactggaacaaagttgttcatcagcaccaaggatggcgtctcattagctgtatctggctccatgctggcctaatccatttggttgtgaacatgctgagtttactgtttattggaatccgccttgaacagcaatttgggttcgttcgcattggtgccatatacctgctatctggttttggcgggagtgtgttgtctgcgcttttccttcgtaataactacatctctgttggagcctctggagctttatttggactgcttggatcaatgctttctgagcttattatgaactggactatttattccaacaaggcagcagccataataactcttctatttataatcgcaatcaacttggctattgggatactacctcatgccgataactttgctcatatcggtggatttgtgacgggcttccttttgggatttgttttgttggcaaggccacagtttggttggatggaacgacatgagttgccccaaactaatcagcctcccaaatacaaagcataccaatatgttttgtgggttgtggcattcgttttgctgcttgtcgggtttgtggtttcactagtgatgctcttcaagggtaagaatggaaatgacggatgccactggtgccactacctgaactgcgtacccacatcgaagtggaagtgcaatacctaaggagtttagttttctgttgaattttcggcaaaaaaaaaaaaaaccgtagtattcagaggaccattttatgcttgtgtgtttgtagatatatgaacaaatttgtttatcatgtttgttctttactgtatcgcgatttgttcttcctgtaaatttgttccgtcggccactgaagtttatataggttgagcattctagttatttttatgctttcccgtt

SEQ ID NO: 2046 - DNA, 923 bp, Oryza sativa
  ref <308>: DATABASE ACCESSION NUMBER: AK059989
  ref <309>: DATABASE ENTRY DATE: 2001-12-06
cagttcccaactcccatcaaccatccttctcgactccactgaccaaacaccccagcggaccaaatcgccgcagcagggcgcgccatggagccggcggcggagaagagggaggccgagcaggaggagctgcagcagcagcacgacgagcccgccgtcccttccgccgacgacgacgaggctgaggcggaggagaacgagcgccgcaaccgcgagctcaaggccggcttccatccccttaggcgtagattcgtgctatggtacacgcgccggactcctggggcgaggtcgcagtcctacgaggacaacatcaagaagatcgtcgacttcagcactgttgagtcgttctgggtttgctactgccacctcacgcggccggttagcctgccgagccccaccgacctgcatcttttcaaggagggcatccggcccctctgggaggatcccgcaaataggagcggtggcaagtggatcataaggtttaagaagaccgtctctggtcgtttctgggaggatttggtgttggtgctagtgggtgatcaacttgattatagtgatgatgtttgtggcgttgtactcagtgttcgtttcaatgaggacattctaagtgtctggaaccgtaatgcatctgaccaccaggctgtgatgacattaagagattcaattaagaggcatctgaagctgccacacagctatctgatggagtacaaaccacatgatgcttcactgcgggataactcatcttacaggaacacgtggttgagaggataagctccatggtcacatatttagctgttatcttcctctaaactatcgcctcgtggatttcttttgaacctgtgcttgcatgggactaaaccttgctatgtgttgtgcatccaaactctgttatgctatggacaatcaaaatgcccagaattatcgtg

SEQ ID NO: 2047 - DNA, 1192 bp, Oryza sativa
  ref <308>: DATABASE ACCESSION NUMBER: AK059990
  ref <309>: DATABASE ENTRY DATE: 2001-12-06
gtaacgcgtaagaacctgcccttgggaggggaacaacaactggaaacggttgctaataccccgtaggctgaggagcaaaaggagaaatccgcccaaggaggggctcgcgtctgattagctagttggtgaggcaatagcttaccaaggcgatgatcagtagctggtccgagaggatgatcagccacactgggactgagacacggcccagactcctacgggcggaatcagcggggaaagaagaccctgttgagcttgactctagtccgactttgtgaaatgacttgagaggtgtaggataagtgggagccctcgggcgcaagtgaaataccactacttttaacgttattttacttattccgtgagtcggaagcggggcctggcccctccttttggctctaaggcccgagtccctcgggccgatccgggcggaagacattgtcaggtggggagtttggctggggcggcacatctgttaaaagataacgcaggtgtcctaagatgagctcaacgagaacagaaatctcgtgtggaaacggagacaacacacgcagctcgccgaccagagacagagagagaccatctgctagcttagctgccatggccgcctccaccgtctccggcctcgccggcgccaccctcgcccgccggccggccttctccaccggcttcacgacgggcgcccgggtgtcggcgaggaacccgctgctgacgaggaacctggagaggaacggcaggatcacctgcatgacgtttccgcaggactggcttaggagggacctgaacgtgatcgggttcgggctgatcgggtggatcgcgccgtcgagcgtcccggcgatcaacggcaacagcctcacggggctcttcttctccagcatcggccaggagctctcccacttcccctcgccgccggcgctcgactcgccgttctggctgtggttggtgacgtggcaccttgggctgttcctggcgctcaccttcggccagatcgggttcaagggcaggaccgagggctacttcgacaagtgaatgaatccatagtggcttttggttagcttgactgtacggacggatgtgtgcgctgcatatccttccttttgtatagggctctgatttgatcctcttgcggatgtacgctgttgtaattctcctcaactccttaaaactttaaaggacaaatatatgtgttgtggct

SEQ ID NO: 2048 - DNA, 1012 bp, Oryza sativa
  ref <308>: DATABASE ACCESSION NUMBER: AK104171
  ref <309>: DATABASE ENTRY DATE: 2002-08-28
gtgctcagtttcactcttatcagtgaattagatcatatacttgtgtccttgatagctcgttaattagcatggctaggtcactcgctgctgtcctactccttttggtcgccgccgcgggagccagccatgccgcgtcgccggcggagatgtactggaagatcgcgctcccgacctcgccgatgcccggcgccattcgcgacctcatcagcccagcgagctcagtgggctcagcttcgaaggaggacacggtgggcaacgtgttcttcctcgagaaggacctcttcccgggctccaagatgacgctccacttcacccgcgccaccgccggcgccgcgctgctcccccgcggccgcgccgagtccgtcccgttcgcctccgaaaggctcccggagatcctctcccagctctccatcccggccgtctcgccgaccgccgacgccatgtggtccacgctcgccgagtgcgaggccgcgcggctcgccggcgagacgaccaagcacaagcactactgcgccacgtcgctcgagtccatggtcgagttcgtcgcgtccagcctcggcacccgcgacgtccacgccgtgtccacggaggtgatcagcacgttgacgccgacgccgaggcaggcgtacagggtggaggccgtgaggcccgtggcggtgcccggcggcgacatggtggcatgccacgggatgccgtacgcgtacgccgtgttcgggttgcacgggctcaagggcgcaggcggtggccgcgtgccacggggacgtggacgggcacggcgcggtggcggaggcatacaagaggctcggcgtggcgcccgggagcgtggccatctgccacttcctgcctcaggacgacatgatctgggtgcgcaactgaattaatgaagcagctaccttgcgcgccatccatggctaattattttagacatgctccttcctatattttggatctacctgccggctatcatgttatcataaatttacgcgtgtgcgcgcgacgatccgacatgccc

SEQ ID NO: 2049 - DNA, 1232 bp, Oryza sativa
  ref <308>: DATABASE ACCESSION NUMBER: AK059991
  ref <309>: DATABASE ENTRY DATE: 2001-12-06
gatgctgagatacttaactcgatggctgttacaaatgatcacttcaagactgcactagggacaagcaacccgtctgctctccgtgaaactgttgttgaagttccaaatgtctcttgggaggatattggtggactggagaatgtcaaacgggagctgcaggagactgtccaatatccagtggagcatcctgagaaatttgagaagtttggcatgtctccgtccaaaggtgttctgttctatggccctcctggctgtggtaagactttgttggccaaggcaattgctaacgagtgccaggctaacttcattagtgtcaagggacctgagctgcttaccatgtggtttggtgagagtgaggccaatgtgcgtgagatttttgacaaggctaggcagtcagctccttgtgtcctcttctttgatgagcttgactcaattgctacccagagaggaagcagtgttggtgatgccggaggtgctgctgatagagtgctgaaccagttgttgactgagatggacggcatgaacgcgaagaaaaccatgttcattattggtgctactaacaggccagatatcattgaccctgccttgctaaggccagggcgtcttgatcagcttatctacattcctctgcctgatgatcaatctaggctgcagatcttcaaagcttgcctccggaagtcacctgtggccaaggatgtagacctgaatgctcttgccaaatacacccaaggtttcagtggtgctgatattacagaaatctgccagcgtgcatgcaaatacgccatcagagagaacattgaaaaggacatcgagatggagaagcggaggaaggacaaccctgaagccatggaggaggacgaggttgatgatattgctgagatcaaggcggctcacttcgaggagtcgatgaagtacgcacgccggagtgtgagtgacgccgacatccgcaagtaccaggccttcgcccagactctgcagcagtctcgtgggttcggcaccgagtttaggttcgctgaccagccagcgtctggcgccggcgccgccgctgaccccttcgcatccgctgccgccgcagctgacgatgatgatttatatagttagatcgctgtgctatttatatttaacctccgtgcttttgttcagtatgtctatttcgctttggtaaactttatcatatgtaacatacggggaaacagtgtactatttttaagttaatattttgagaggtactg

SEQ ID NO: 2050 - DNA, 1104 bp, Oryza sativa
  ref <308>: DATABASE ACCESSION NUMBER: AK104172
  ref <309>: DATABASE ENTRY DATE: 2002-08-28
attccccatctcttccaccatctctcctctccctccccacaagaaaaacctcgcgcgaacaatgtacagccctctcggcagcggctgcgcgttcgcggccgcggccagctccgcgttcccgccggccaccgtccccggcgggatattcgcggggaggaggaggaggaggccggcgaggctggttcttgcgtgggcgagctcggatggctcggacggtggtggtgccgccgctggtgcagtggcggccgaggcttccgctgtgggagagagcaaagaaggggaggtggccagtggcggaggttcttccgctgagtcgtcggcggagaagaagccggctcctgttgatcccaagattgagaaggagctcaagaaggcagttcagaagaccgcagcaacgtttgcaccaagggcgtccactgccacaaagaaccctgcagtgcctggaacagctctgtacactatctttgaggtccagggatatgcctccatgctgttgggtggagccctttccttcaatctcgtgttcccgtcgaatgagccggacatttggaggctgatgggaatgtggtccatctggatgttcactataccttctcttcgggcccgtgactgctcaagtaaggagaaagaggctctcaactacttgtttctactggtccctctaatcaacgtcattatcccgttcttcgtgaaatccttcgctgttgtctggtcagcagatacggttgcattctttgtgatgtatgcttggaagcttggatggctgcaacggtcagagtgaacaatttcctgaacgaaggagcatttgaactgcaaattttgcctaagtgaattttggagggcacgctacatgcgatgaatttttcctagatttagtttcgtgtacatccatggagtgtaaagaagcttgctatgtagatgtaccttaaattgtcaacattagtgttgactaggaactgggcatctctcaacctgttatggtttcccagtagatcatatatgtctgcgcgctggcatgaaacggttgccaattgcatctgcttcgttcttggggctacaattcgcaactgaatttgctatatatttgtcgacaaattttccacc

SEQ ID NO: 2051 - DNA, 966 bp, Oryza sativa
  ref <308>: DATABASE ACCESSION NUMBER: AK104173
  ref <309>: DATABASE ENTRY DATE: 2002-08-28
accaacgacgtcgtgatgactggccctgtagctggcgccggcgacgtgcaggccgctgagacgttccgcgtgttcgtcgggtacgactcgcgcgaggacatcgcgtaccgcgtgtgccggcgctccctgctgcagcgctcctccgtgccggtggccgtgatcccgatcgtgcagcaggagctccggtctgcggggctgtactggcgggagcgcgggcccacggagagcaccgagttctccttcacccgcttcctgacgccccacctggccggctaccgcggctgggcgctcttcgtcgactgcgacttcctcttcgtcgccgacgtcgcggagctggcgcgcatggccgacccgcgctacgcggtgctgtgcgtgcaccacgactacgcgcccaaggaggccaccaagatggacggcgccgtgcagacggtgtacccgcgcaagaactggtcgtccatggtgctcttcaactgcgcccacccaaagaaccgcgccgcgctgacgcccgaggccgtgagcacgcagagcggcgcgtacctgcaccgcttcatgtggctggacgacgccgacatcggcgaggtgcccttcgtgtggaacttcctcgtggggcacaaccgcgtcgaccccgccgacacggccgggacggcgccgcgcgccatccactacacttccggcgggccgtggttcgagcagtacaagaactgcgagttcgcggagctctgggtccaggaacgtgacgcgtatgaggccgaggcggaggaggacgaggagaaggaagagcacgagcccaaggccatcctgcatgcccctgctgcgccgtcggcagttcccgtggacgcctgagcctcacgtgcggtgcctactgttttctaataatatgattggaataaactcatgacggccacacctcaagaatgataagttctatatattgttgatcatatggttaaatattactttgaggct

SEQ ID NO: 2052 - DNA, 1014 bp, Oryza sativa
  ref <308>: DATABASE ACCESSION NUMBER: AK059992
  ref <309>: DATABASE ENTRY DATE: 2001-12-06
gcaactgctgctacgccgcgccttctcctcctccttcctctcctccccattccgccgcccgccactccaccccgcccgctccttcgttcccccccgcgccgccatggcatcctccgccgcgccgttccacatggtccagatccagcgcgacgacacgacttttgatgcctatgttgttggaaaagagaatgctcctggaattgttgttttgcaagagtggtggggggttgactatgagatcaagaatcatgctgtccacatttcccaaattggtgaaggatacagagctctcattccagatttgtatcgtggtaaggttgctcttgatgtagcggaagctcagcatctgatggaaggtctagactggccgggtgcggtcaaggatattcaggcttcagttaaatggctcaaggcaaatggatcacccaaggttggtgttactggatattgcatgggaggcgctttgtcaattgcaagtggagtttcagtcccagaggttgatgctgttgtggctttctatgggacaccaccttctgagcttgccgatgcttccaaggcccaggctcccatccaggctcattttggggagcttgacagttttgttggatttgcagatgtcacggcagccaagtcgctggaggagaagctcaagtcatctggcgtgccacatgaagtccacatctaccctggctgctcgcatgcttttatgaacacatcacctgaggccgtcaagaggaggaaggagatgggtctgactgatgagaaccaggcagcaattgacctggcctggtctcgcttctcgacttggatgggtcgtttccttggatcggcgtgagccatttacgcatatatgttgtcaacctgtcaggttgtatgaataaaatcattcaggccagatgcagagtaattaagtatacccaaaccaaataattgtgctgtgttggactatgtgaacatgccatgctttggtttgcgaattatctgtggttttactgtgctttcgagattgcatat

SEQ ID NO: 2053 - DNA, 917 bp, Oryza sativa
  ref <308>: DATABASE ACCESSION NUMBER: AK104174
  ref <309>: DATABASE ENTRY DATE: 2002-08-28
attccacttctcttctctctcgtggtcgcatgatctcatcaggagcgcagatgctacggcgtccttgagaattgcagagaggcaaaagaagaacaagcagagagcaagaacaagcagaagcagaagcaaagaggcgatggacggcgacacgctgtcggcggcggcggcggaggacgggaaggtgctgcacgcgttccagacgagcttcgtgcaggtgcagagcttgctggaccagaaccgggtgctgatcaacgagatcaaccagaaccacgagtccaaggtccccggcgacctctcccgcaacgtcggcctcatccgcgagctcaacaacaacatccgccgcgtcgtcgacctctacgccgacctctcctccctcttcgccgcctcctcccccggccccgccgcctccgagggcgcctccgtcggcaccgccgtccgccacgccggccacaagcgtgtcaggtccacccacctcgactgaacaagaaccattctcattttctcaattaaccacctccaattctccaattccaattccaatttcggctagcttagcttaaagatcgagctcttgcttgcttgtatatctagctataatctataaatctacatatgagcaattaacgccccctcacaactactcccgatgtttcatattataagactttctaacatttgcctacattcatatatatgttaatgaatctagacatatatgtgtgcctagattcattaacatctgtatgaatgtgggtaatgctagaaagtcttataacctaaaacggaggtagtacaatcatcttcggttctttcttgtagctgttgtttcatcttgttgtagctgatatgatgagctattatatggattttgatgcaacaatgccaatacaagagagtgagcacttctctgaattccc

SEQ ID NO: 2054 - DNA, 1000 bp, Oryza sativa
  ref <308>: DATABASE ACCESSION NUMBER: AK104175
  ref <309>: DATABASE ENTRY DATE: 2002-08-28
ccccatttcgaagcccaccgaattccattcctcgcgattcctctcccctcgcctcctcgtcctccccctcctaggggatcgccggagaggaatcgcgcggaggaaaaaaaaagaaaagggcttcctcgtcgtctaagttaaaaggaagccatggagcacaaggagactggatgccagcagccagaaggcccgatcctttgcatcaataactgcggcttctttggcagtgcggctaccatgaacatgtgctcaaagtgccacaaggagatgataatgaagcaggagcaggccaagctggcagcctcctctatcgacagcattgtcaatggtggtgattccgggaaggaaccaattattgctggtcacgctgaagtagctgttgctcaagtcgaggtgaagacgcttgttgcgcagcctgctgagattgctggtcctagtgagggggtcacggtgaaccccaaggggagggaaggaccaaatcggtgctccacttgtcggaagagggttggtcttaccggattcaactgccgatgtggcaacttgtactgcgcaatgcaccgctattccgataagcatgactgccagtttgactatcggaccgctgctagggatgctattgccaaggctaatccggtggtgaaggcggagaaacttgacaaaatttaggggtttcatatggttggtgaacgaagcgtcacaatctgcggtcttcatcatccatctttgctgcattatccatgccttttcctttcatgttggctgctacaatctagttgttcggcatttgtgatgcatggcacaccacggcagcttcaagaaccctcatctctggtcagtccgaatggtttgcatgttggctatgttgtgtaagctttatttatgatcgtcttgcgctgacggtattgtggcttcgcatttagctagctctgtaatgtactattgtatccgaagtgttacattgcaaccagtaatagtaatcagcaatcgtccgttatatggt

SEQ ID NO: 2055 - DNA, 1055 bp, Oryza sativa; identical to SEQ ID NO: 154
  ref <308>: DATABASE ACCESSION NUMBER: AK104176
  ref <309>: DATABASE ENTRY DATE: 2002-08-28

SEQ ID NO: 2056 - DNA, 1058 bp, Oryza sativa
  ref <308>: DATABASE ACCESSION NUMBER: AK104177
  ref <309>: DATABASE ENTRY DATE: 2002-08-28
accacacgcgcacacgacacgacgcaccaatggcgctcgtctccgcctcctcctccaccaccgccgtcgcggcgctccccggcgccgccagggcctcctccttcctcggcggcgccggcaggagcggcaggctgctgctgaggcaggccgagtcgtcgtccgcgcgggcgtcgttcgccgtgcgcgccgcggcgcccgacaggccaatctggttccccggcagcaccccgccgccgtggctcgacggcagcctccccggcgacttcggcttcgaccccctgggtctcggatcggacccggagagcttgcggtggaacgtgcaggcggagctggtgcactgccggtgggcgatgctgggcgcggcgggcatcttcatcccggagttcctgaccaagatcggcatcctcaacacgccgtcgtggtacaccgccggcgagcagcaatacttcaccgacaccaccaccctcttcatcatcgagctcatcctcatcggctgggccgagggccgccggtgggctgacatcatcaagcccggctgcgtcaacaccgaccccatcttccccaacaacaagctcaccggcaccgacgtcgggtaccctggtggtctgtggtttgacccgctcggctggggcaccggctcgccggagaagatcaaggagctgcgcaccaaggagatcaagaacgggcggctcgccatgctcgccgtcatgggagcttggttccaggcagagtacaccggcaccggccccatcgacaacctcttcgcccatctcgccgaccccggccacgccaccatcttccaggccttcacccccaaatgaggagttcttcaggtgttggagtgttagcaatggctgccaatggaggaagatgaaaagactgttcgtcgacgcgacttacctctcttttttgggatcggagtaggctgtgaatggtggtggtgtattgggatgtaattgtggatggagcactgcatgccttgttgattgtgtacctgtactatgatgtaaccgatgtaaaaaacaagttgatactcttttagaagtgaagttctcttc

SEQ ID NO: 2057 - DNA, 1045 bp, Oryza sativa
  ref <308>: DATABASE ACCESSION NUMBER: AK059993
  ref <309>: DATABASE ENTRY DATE: 2001-12-06
tgctatctatgttcctgcttgcacttatgaaggagacaatgttgttttgctattgcaggttgcaaggtttctaatgaagactgtatcccagttagcttctggaaaacagcctgttggtacaacggcttacatgggcaacatacagtacttgatgcaatgcaaatgtggtgtaaatacagctgaagattggctaaatcctgctgccatacgagaggtatttgaagctcgggctctcaggatggcggtgaattgtgcccagaacataaacaaggcgccaagccaagaagaagggttttatgagctatcccctgatctgcttgaggtggcggtggcccatatccagttgataattgtaaccaagttcatagagaaattagagcaggacatccctggtgagggagtgaaggagcaactgtgcatcctttgcaatgtgtacgcgctgtatcttgttcacaagcatctgggtgacttcctgtcgacggggagcatcacagcaaggcagggagcgctggcaaacgagcagctgggaaagctgtatgcgcaggtgcggccgaacgcggtggcgctggtggacgcgttcaactacaccgaccactacctggggtcggtgctggggcgctacgacggcaatgtttacccggcgctgtacgaggaggcgtggaaggaccccctcaacgacacggatgtgccggacggttaccaggagcacctccgccctctgctcaagcagcagctcaagctctccaggctatgatcatccatccatcatcctccctttcttgctctatcaatcatatcatactgcatacgatttgagtagtagtaaaataacaccagcatatgcaaggtgctggctggctgctagtattttctttttctttataatttatttatttggggagagctggtattgtcttatttatttgggaagagctggtattgtatgtctggtgatttggtatagctgtaactgtgaacttcaccacatctcccccttctcaagggcatatgcattctactcctatggctgtgtttagttccttcc

SEQ ID NO: 2058 - DNA, 1126 bp, Oryza sativa
  ref <308>: DATABASE ACCESSION NUMBER: AK104178
  ref <309>: DATABASE ENTRY DATE: 2002-08-28
gtgctcagtttcactcttatcagtgaattagatcatatacttgtgtccttgatagctcgttaattagcatggctaggtcactcgctgctgtcctactccttttggtcgccgccgcgggagccagccatgccgcgtcgccggcggagatgtactggaagatcgcgctcccgacctcgccgatgcccggcgccattcgcgacctcatcagcccagcgagctcagtgggctcagcttcgaaggaggacacggtgggcaacgtgttcttcctcgagaaggacctcttcccgggctccaagatgacgctccacttcacccgcgccaccgccggcgccgcgctgctcccccgcggccgcgccgagtccgtcccgttcgcctccgaaaggctcccggagatcctctcccagctctccatcccggccgtctcgccgaccgccgacgccatgtggtccacgctcgccgagtgcgaggccgcgcggctcgccggcgagacgaccaagcacaagcactactgcgccacgtcgctcgagtccatggtcgagttcgtcgcgtccagcctcggcacccgcgacgtccacgccgtgtccacggaggtgatcagcacgttgacgccgacgccgaggcaggcgtacagggtggaggccgtgaggcccgtggcggtgcccggcggcgacatggtggcatgccacgggatgccgtacgcgtacgccgtgttcgggttgcacgggctcaagggcgcaggcggtggccgcgtgccacggggacgtggacgggcacggcgcggtggcggaggcatacaagaggctcggcgtggcgcccgggagcgtggccatctgccacttcctgcctcaggacgacatgatctgggtgcgcaactgaattaatgaagcagctaccttgcgcgccatccatggctaattattttagacatgctccttcctatattttggatctacctgccggctatcatgttatcataaatttacgcgtgtgcgcgcgacgatccgacatgcccacactaacgtgttttactttgttaattaataagtctgcatacccaggtcatcttgtacggtgctactccctctatcccgaaataaaacaacttatagagattgaagtttgtccc

SEQ ID NO: 2059 - DNA, 1147 bp, Oryza sativa
  ref <308>: DATABASE ACCESSION NUMBER: AK059994
  ref <309>: DATABASE ENTRY DATE: 2001-12-06
atcgattcctctctccggcgaacacgcgggtgggcgggtcgggtctcctctcgccgaagcgccacctcggctcggtgtgaaggtaattcggtgattcggcaagggctgtatttatgcagaatggttctctgtcaaggcttatctgctggacacgctcagctgcttgcctttcctgcggctaagcataatgtctctttcgcgagaacatcgtgcctgggtactccggcgggatcatggagtgtaaaacgtgcgcgacttcatgccgaaaggaagagtttttccatgggagctttgcgagttggcactggttttgttcagaatgacatgcttgcatcgttcggaagggatgattctatcaagggcattccatcactggcagcacgacacagtcagcatcgaagacttgaagttggctgtcgagcatcctctttagcgtcattcagctaccctgagttgacttcgaaacccagatggtggtggaggactgtagcatgtgtgccctacttgcttccactccacaacatgtggtcatatgccgatgtcatctaccagctacacacatacttgcaggggttttcgttggtgtacaccttcatcgatacaatgacactgtttccaggatggcttttgctggtgatttttatgacagtgtacttctttgtcgtgagacggaagtggtcgccgcactttctaaggttccatgtcatcttggctatcctcctggacactggctcccaagcagtggcaacaatgtgcacctggatgcccagcatcgtgtatcaggggacgcctatgcagtatttctggatggctattgctttcatacagatcttcacagtgctcgagtgcatgcgatgcgctcttgctgggatgtacccgaatgtccctttcatatctcacacggcatttatccattctgatctgaatctgttcaggtagccaactgcccaccatatcagtatcagaagactgaagggaagaagagcaagtagggtagtagtttattttgtcatagctgcttacagttatatagactgtatttaatttatttatattttctaagcctcctgtaattgctataaacatcaccttttgctgttgcaacaaaatttgaacagcaataagattagatatctcggatatgttg

SEQ ID NO: 2060 - DNA, 1094 bp, Oryza sativa
  ref <308>: DATABASE ACCESSION NUMBER: AK059995
  ref <309>: DATABASE ENTRY DATE: 2001-12-06
ttgaaatcctcacccagctagagatgcaagttgatgctacctccaatccaactctgacccccaggacaccaaactttagcacaggggacttccccgcactgccaacagttgaagaccaaaatggtttttccaaaggcaatgcagatattctaagcatcttcaatggacgcagctcaccctctgtatctactggtactggtgattttgtttcagctgttcgcaaacttgcatcgcaaaattctggccattggaagtataagaaaggtcctgaatacggtaatggtgtttcaactgtttctgtacccaagcagtacagttctacgaccaaaacatcttctggaaacaagtttcaaagtgttagcagtgcaagagctgctccatggctcgaaactggagatgcagtagcaaacatgtactcagaatcaaggggagaagcccgtgattttgcccgcatccgaaatgcatgttttgagcaggctagacaggcttacctgattggcaacaaagctctagccaaggaattgagtatgaagggacagacatataacacacaaatgaaagcatctcatgagaaagcaagagaagctatttatcgacagaggaacccatcttcgcaacgagggagcgaccgtctgatcgatctacatggtctccatgtgaacgaagcaatccatatacttaaggtcgagctcggtactcttaagagcaccgcgagggctacaggtgagaggatgcaagtcatgatatgtgtcgggacaggtcatcacaccaagggttctcgcaccgccaggctgcccatcgccgtcgagcagtttcttctggaggaaggcctccactacacgcaggcacaacctggtttgctccgtgttgtggtgttctaacatctcttaggtcagcagcacgaagaaaaaagaagcaaaacaaaaaaaggagaaagagatgtagggaaaagaaaaacctaaaaaaaatggccgctgttgcagcactgtaattttcttgtagttgtatattaaaagaggcagcaggagaatagcctgacaacagaatacagtgtaaaattatacatagcttcattcaattcacattccattccc

SEQ ID NO: 2061 - DNA, 989 bp, Oryza sativa
  ref <308>: DATABASE ACCESSION NUMBER: AK059996
  ref <309>: DATABASE ENTRY DATE: 2001-12-06
atccatctctacacatcagcaatatttagctacacagagctagctaggattagctcagcaatggcaggtgctcctcgaggactagttctcctcggcgtttgtgccgtcttgatggcggtcgccgtcggcggtgaggcggcgtcggttgtcgtcggcacggccaagtgcgccgactgcacccggaagaacatgaaagctgaggatgctttcaagaacctccaagtggcgatcaagtgcaagaacaccaacggtgagtacgagagcaaggctgccggaaagctcgatggcaccggcgctttcagcgtccccctcgacgccgaccttgacagctccgactgcatcgctcagctccacagcgccaacaacgagccatgccctggtcaggagccatccaagatcgtgccaatgtcggagggcacctttgtcgccattgccggcaagacacactacccatcagcgttgtgcgcgtcagcgaccatctgcggtcccatcaagaagaagatcatagaccacttccacaagaagccggtgccacccaagccggagccgaagccggagccacccaagccgaagcctgagccggaacaccccttcctcgaccatatccacaagaaggagaagcacttcttcgaccacttccacaagaagccagtgccacctaagccagagccgaagccagagcccaagccagagcccaagccgcagcctgcgccggagtaccacaacccgagccctccggcaaagaactgatgaatatgatccgcactggacgtttgatcatgccgtcctgccccctgtcagattgtctgcataataacagtttgagatcgaagtcatgcattagctttcatcgacaggagttttaatttgtacttgtatctatttcttctctatcaaatgcagttatatatggtaagataatttatttatatttaatcagtactgttgtggcggactattcactgtatcagccaaagccattggatcgt

SEQ ID NO: 2062 - DNA, 1082 bp, Oryza sativa
  ref <308>: DATABASE ACCESSION NUMBER: AK059997
  ref <309>: DATABASE ENTRY DATE: 2001-12-06
atgccttcccacggcgcccgacgacggtcgctgcctttcttcccatcctcctctcctctcgatctccctcttgccacccatacgccgcctgctcatggagcctgtagctagccgccgccttcccctcgggctcgccaagctgtagccgctgctttcctctcaagctcgctggaccagccgctgccgccaccgccgtgcggagccagtggttaccatcgtcgtcttcccatcaagcaagcggcgactgccgccgccttcttgcgagttcgatgtccactgctgccgccatttcatctccttccccatcccacgcggacttggttctgcaagatctgtgccgcatcgagcacccacaagcacgcggtaaccaaaaggtgaagctcgacgcctggagctatttttggaagcacaaacgtaaggatcacatatattatcctatcataacattaacaacgttggaccatacttttggtgggtgctgcatgcagttattattatcaaagccatgaaaggttcaaggcttccagctgcttggcaattgctcttcaggatttctctacctattaactgttattgcctggcatgggcgcatagaagagaccacaatatgaggcaaacattggaccatagctaacataactgaatatgtgatgccactttcactgatgcttctatgaccaccggtgcggtgtgggatatgcatgctcttcattactgtatatggtatgctcttcatgaagatatggggtatccataatctccacaagacccacgacaatgcttgatttgtattgtattgctcagaagctattttccagtcatcaaaatctcatttggataagcagttgtgttctgctatatattttttgtccactgactctgtgaacaacccggcgaattatactaaaaccaaacaaaggtacatgaacaattcacctgcaaaatcatttctatcaaacacattattcagtttttattcaagagctaataggcaaacccttctaagacgtattgtgtcttgatgcatctatttacatgtgtcctgaccagtttctttacttccagaaagcaatcctttgcat

SEQ ID NO: 2063 - DNA, 1043 bp, Oryza sativa
  ref <308>: DATABASE ACCESSION NUMBER: AK059998
  ref <309>: DATABASE ENTRY DATE: 2001-12-06
gttcatggttattgcgttaatttagatctagatatcacatttcacctccggcccggaaaagacgacaagaaaggacgaagcatccccggtgccacagattctaaggcgctcctcctcaactacaatcacctgtccgggccattaccggtgaacatcggtttctccaagttaagctacctggccctcgccaacaacaggctcaccggcgcaatcccgccatcaatcttgcatttgcaagactccctcctcgaggtgctcctcctgaacaaccagctctccggctgcctcccccacgagctcggcatgctcaccaaggccgcagtgttcgacgccggcatgaaccagctcaccgggccgatcccctcctctttctcatgcctcaccagcgtcgagcagctcaacctgggcggcaaccgcctctacggagagatccccgacgcgctctgcaagctcgccgccgtcccagccggccgcctcgccaacctcacgctgtcgagcaactacttcacgtcggtcggaccggcgtgcttgtcgctgatcaaggacggcgtcctcaacgtcaggaacaactgcattccgggcttcgccaaccagcggcggccggcggagtgcgcgtcgttccacagccagccgaaggcgtgcccggcggcgagcgccacccacgtggcgtgccccgccggagctgccaacgctgcggcggcgccggcggacagggtggtcaaggactactccagctacgtgacgtacgccaccctgcacgagtgagcccggcgccacggcacgggcgcacgacgtgcgtgcatgcatgcagtaggggacagctagaagctagcgtctcggggtggtatttgctcttgtattcttgtgttcgtttgttgtgctcgtgagtcgtcattgtggtttgttttctctgcacgtgtggctagctatggctgtcacgtctagatctcacctcctgtactcttgtgtactgtactatgtgaaaatcattggtgattactaaagtttggtgtgtgccctgccctacatgtttgataaagttt

SEQ ID NO: 2064 - DNA, 974 bp, Oryza sativa
  ref <308>: DATABASE ACCESSION NUMBER: AK104179
  ref <309>: DATABASE ENTRY DATE: 2002-08-28
acaaagaaatcaagaagcgaacaaaaaagcaaggcactgcattcccctgccactgctgagcagtgagcacaaatcacagacacaaatggaagcagcagtggctactccttccttgctcttctctagcccaacccccaggaggccttcctcctgcttgcctcctcctcctccttgcagcagcagcagcagcagctacgcctcccatggtttcaagctgctgcagccgcagttgctgttcatcaatcggctaaccagcagaaacagcaacgggagtagcagaagaagcatttccattttgtcgctgaggtgctcttccagtggcactgacagcgcgtcttcttccgccacttcagaaagatgggttctcgagcctgcaggagacggcgattggcgtcatatcgggtaccgcgtcgcacgacccggcggcttccagatagcatccgaggcggcggtgacggtgggtcgggttcctgaacaggctgacatcgtcctgtctgtcgcaacagtttctgggacgcacgcacggctggagaagaaagaggggagcttgttggtaacagacctggagagcacgaatggcacctacatcaacgagaggcgcctcaccccgggtttccccactcctatcgatcccggcagcctcctcatctttggtgacatccacctggccatgttccgtgtctccaagatgatcgtcgatgtgtccagtgacaccaatgaagctgagcaggaagctgagacggctcaagtatcagcggcaactcaacaaaccaattagcaacctccctcttgccatctactgcttaatgctgaaggcaagcagctcaagaagcaccagctgttacccaatgcctgacatgaagcgcatgttacgaacgacagagtttctttgcaaataagtgcatacagatgttgtgtgataggaatgtcatctcatctgtattatctaaaaataatgaacgtcatctgtagcc

SEQ ID NO: 2065 - DNA, 963 bp, Oryza sativa
  ref <308>: DATABASE ACCESSION NUMBER: AK059999
  ref <309>: DATABASE ENTRY DATE: 2001-12-06
atccatctctacacatcagcaatatttagctacacagagctatctaggattagctgatcagcaatggcaggtgctcctcgaggactagttctcctcggcgtttgtgccgtcttgatggcggtcgccgtcggcggagaggcggcgtcggtggtcgtcggcacggccaagtgcgccgactgcacccggaagaacatgaaagctgaggatgctttcaagaacctccaggtggcgattaagtgcaagaacggcaacggcgagtacgagagcaaggccactggaaagctcgacggcaccggtgccttcagcgtcccccttgacgccgacctccacagctccgactgcatcgctcagctccacagcgccaccaacgagccatgccccggccaggagccatccaagatcgtgccaatgtcggagggcacctttgctgccgttgccggcaagacccactaccgatcggcgttgtgcgcgtccgtgaccatctgcggcccaatcaagaagaagatcatagaccacttccacaagaagccggtgccacccaagccggagccaaagccggagccacccaagcccaagcctgagccggagcacccattcctcgaccacatccacaagaaggagaagcacttcttcgaccacttccacaagaagcccgtgccacccaagcctgagcctaagcccgagcccaagccgcagcctgcgccagagtaccacaaccctagccctccggcgaattaagcaatggaagtttgcatgcatgcatggttcgtttggttagtacgtttggtgttgttgcatatgatttcctgtcatgtcagtttgtctgcagaataatggttttctttgatgcattagcttttactcacaagtttaatttgtgtgtgtgtgtctatttgtttggtatcagcaagtaattaatataatcagggatgtgcataatatatgtgcaacttgtttgatctc

SEQ ID NO: 2066 - DNA, 1061 bp, Oryza sativa
  ref <308>: DATABASE ACCESSION NUMBER: AK060000
  ref <309>: DATABASE ENTRY DATE: 2001-12-06
aaacacaaccaaacccaatttagtcaaattttacccaatcgccagcgagagcttgctttgatttgatccgcgcgcggagaagacgaagcgagagagagagggagaggtggaggaggctagctagggttgcgagcgatctgcagcgtgggagatggggaaggggttcatgtcgtacctggcgatgaagacggacgcggcgggaggggaggcggcgcaggcggcgctgatcgacgccgacctgcaggagctgggcgtggcggcgcggaagctcgccaaccacgcgctcgtcctcggcggcggcctcgggttcggcaccaccttcctcaagtggctcgccttcttcgccgccgtgtacctcctgatattggataggacaaactggaagaccaacatgctgaccgctctcttggtcccttacattttctttacactgcctggtgggctgttctctctgttgaggggagaaattggaaaatggattgcgatcattgctgtcatccttcgtctcttctttcctcgccatttccctgattggttagagctgcctggtgctgtgatccttctcattgctgttgccccgaacctgtttgcgagcaccttccgaggcgacttagttggcatcttcatatgcctcatcattggatgctacctgcttcaagagcacatcagggcgtcaggtggattcaggaacgccttcaggaagggcaacggagtgtccaacagcattggcatcctcttgctcttcatctaccctgtctgggccctggtgctgaactttctgtaggcgccaccgcttcagcgcttctctacaccatccagctccgatcgctgttcgttcttgtgtacatgtcttgtacggtgatttggtatctggtgatctggtagtatcgttttgaggagatggataatgtatgtttggacctcctgcctcctgatgcacgttttcttggcattttcgtttgttgtagctttgctatcagcccgtgtttcgtcgttctgagtgtacaagcgtcaataaattcatctctgttgccttctgtaaatttaaagagcttttatcc

SEQ ID NO: 2067 - DNA, 940 bp, Oryza sativa
  ref <308>: DATABASE ACCESSION NUMBER: AK060001
  ref <309>: DATABASE ENTRY DATE: 2001-12-06
atatctaacgcccctctctctctctctctctcactcagcaacagctcgcagctcactctctcactctactactcgtagctaagctagctcgcgccgccgccgccgtcgccgccgccatgagcaaggagaagcaccacaagcgggagcaccacctccggcgatgctgcggcgggatggcggcgtgcatcctggcgctggtcctcgtcgtcggcttcatcgcgctcgtcgtctacctcgcgctccgcccctccaagccgtccttctacctgcaggacctccagctccgctccgtcgacctcggcgacccctccctctccgccaccgcgcaggtcaccctcgcctcccgcaaccccaatgaccacgtcggcgtccactaccgccgcctcgacgtcttcgtcacctaccgcgacgaacccgtcacggtgcccgtctccctcccgccgacctaccagggccaccgcgacgtcaccatctggtcgcccgtgctctccggcgagtccgtccccgtggcgggcttcgtcgccgacgcgctcaggcaggacgtcgccgccgggtacgtcgcgctgcaggtgaaggtcgacggccgcgtcaagtggaaggtcggcagctgggtctccggcagctaccacctctttgtcagctgccccgccatgctcgcctccgccggaccaggcggcgtcggccccatgcctctcggcggcgcctccgccgccgtcgtgaacggcaccggcgccggcgccgtcgcgtcgctcaggttcacgcagccgacagggtgcagcgtcgaggtgtgagtcacaaatttgagtagcggctagtggcaatatggtaattaattaagttcatcggtcgcgttaatccgcaagctgttaattttttttttgtgttcatgtagctcatgcatactctatgtgagagaataaagttacgtacgttcatatgt

SEQ ID NO: 2068 - DNA, 1012 bp, Oryza sativa
  ref <308>: DATABASE ACCESSION NUMBER: AK104180
  ref <309>: DATABASE ENTRY DATE: 2002-08-28
acagcctcctcgatctctcctctacagcagctcatcactgctcaagagaaaggagacggcaacaatggcgacggcgaggttgctcctagtgctcacggtggtggcggcggcgggcagctgcttctgcagcgcccaggaggcgaagccgccgccgtactgcggcagcgtgaggacggccattgaggcgcacaacatcatcggctggaagacgttcacggcggattgcgccaaatacctcgccgactacctcaccggcgatcgatacccccgcgacgccgacgtggtgatcaacgaggccatcgcctacgccgagagcctcaagctctccggcagcggcaaggagatctgggtgttcgacgtcgacgaaaccgcgctctccacactgccctaccaagccaaccatggctacggagttcagccatatgatcaggcaagcttcatccagtacgtgtccgagggaagcgcaccggcgctgcaggggacgctgcggctctaccaacggctgctccagctcggtgttaagccagtattcctgactgaccgcaccgaggaccaaaggacagtcaccaccaacaacctcctctctcagggttactgcagctgggagaaactgttgttccagccggttgggcttcagaccacaacacaggcgttcaagactgatgagcggcagaagcttgtggacgccggctatgtcatcgtcggcaacatcggcgaccagtggaccgacatcctcggctcgccggagggctgccgtacgtttaagtaccccaaccccatgtactatgtcgcctagctcggctgccggcctgcgccataatgctagcttcgctagctagccatatctcgatgatccataattcgcgtgtgtttcatatatttacttgatttcttctcatgaactgtttgtagtagttaacctttgaagcatatgcttgatttcctttcttagctattgatgagaggtgagatttgaatttgtaataacccttgtttggcatgggttggccat

SEQ ID NO: 2069 - DNA, 1237 bp, Oryza sativa
  ref <308>: DATABASE ACCESSION NUMBER: AK060002
  ref <309>: DATABASE ENTRY DATE: 2001-12-06
aaaaaaccccaaaacccccacgtcctcctcctccgccgccgccgccgccaccgtcgccgtcgacgagccatgccgccgcggaagcgcccgccgccgccggccaaggcgccggaagccccaccggaaaccaagcccaagatctctccgcccgctaaacccatcgccgcggcgccgccgccgccgaaggcggtcctctcggacaccgtcctcgccgccttgtcgcagcacgagcgccccatctacaagctcgtgttcgccggcggggacaagggcatgtcgcagacggagatccggatcaagaccgggatgccgacgagcaccctcaccaagcacctccgcggcctcacctccaagggcgtcctcaaggtggtcaacagcgtccacaagcgcgccgagaagatctacatggacgtccgcatcgacccgtcgccggagatcaccgggggaacctggtaccgcaacggccagctcgactccgacgccgtcgcctccgcgcggcgcaggtgcctcgaccagatcgacaagctcggcgtcgccacggcggagtccatccacgagggcatcagcagggaatgctccaacctagcctactcgaccgagcaggtcagggacatcctgcgcaccatggcgctcgacagggaggtcgaggaggtgaggagcaccggggcgggggagttcggcgacctcagggcagggagggtgtgctaccggaggggcggcccggtgcagggcggcatgatggagaggatcccgtgtggagtttgccccaggatcgatgagtgctcgccggatggcgttatctcgccgagcacctgcgtctactacaagaagtggctgcagatggacttctaggtggtgagctctcttccgcgccgctgtttatggtgcgatcgcacgcacaattcagcttccaattgctcaattggcatttgatctatgctatggaattgccacagttcatacattgcggcatgtgatcccggataggcccatgagatagacatactagatgatatcatctgattatcttatgtttgtatttaaattagtaagatttgtttctataatcattattacttagccttttcccctgttagtctttctcatgtatttatctgcaacaagtttagaaacctgtccaacatcaatattccaaattctagggtgcgtgagagtttcatccattgttactcaatcataatatgggacctgagcacaataaagcaattgcttcttt

SEQ ID NO: 2070 - DNA, 986 bp, Oryza sativa
  ref <308>: DATABASE ACCESSION NUMBER: AK060003
  ref <309>: DATABASE ENTRY DATE: 2001-12-06
ctccttccatcccctcccctcccctcccacgcgacggcggcggcggcggcggccggagcgcgcgcctccttcccaccaccgggctccatctcgcctcgaatcgaagggtagtagtagtagtagaggatacacgatgcagtctctgctgcggcgcgtctatcttgccggaagccatggctccgcggcgaagctcttggaccgtgcagcttctggagtcgcgcagtcgggtgctaacctgctgtccatcaagcacctgagttcttgcagctggattcgtccatttgggaactcaatcgtctccggtgatagtgttcattcccatgggttctgcgtgaataccatgccaatgaggggtctatcaacagtggggagtgctgaggtttctgtcgaggaggaaagttctgactctccaggagtcgagcatcctccgcgcatcaagtttaagaggcctgacaagacggccaggcacattatgaatatcttgaacaaggaggctgttgacaaggtccgtggggaaagagagattcctgatgtgcagcctggatgtattatccaaatgagattgcaagttcctgagaacaagcgtcgtgagtctacgttgaaaggcattgtcataggaagacgtaatgctgggatcaatacaactttcagactgcgtagattagtagctggtgttggagtcgagtctgtctttccactttactctccaaacatcaaggaaatcaaggtcttggacaggaagaaagtcaggagagcaaagttgtattacctgcgggacaggatgaatgcacttaagaaatgagactgctttagctccccttttattttttttagttgatctgcaaggtttcttgtgacataaagctttcagttcaggatgcacattttgttagttccatctcctaaaagctactgtttgtatttctgatacttggttctttcaagtacacaagcagtgcaggcagcaatctgctcccgtggttctg

SEQ ID NO: 2071 - DNA, 990 bp, Oryza sativa
  ref <308>: DATABASE ACCESSION NUMBER: AK060004
  ref <309>: DATABASE ENTRY DATE: 2001-12-06
aggagcggccaatgcgaatttctccatctcctcagcctcaggctcaggctgcactgaaggcagagacgcgatggccaagctccaccagtggccagtactcctcctcgccgccgtcatcgtcctcgccgcctcgttcgcggtgccggcctctgcggcgcggcggcgggcggtgcggctgcacttgtacatgcacgacatcgccggggagacggccgtgcaggtggtgaagggcacggggcctctgcatccgtcaatgccgccgggaaacaggcacttcggcgacacgacggtgatggacgacctcctcaccgagggccccagcctcgactccaaccccgtcggccgcgcccagggctcctacgtcctcgccggcctcgtcgaccccgtcgtcgtggtcaccgccaccttcaagctcacccacgggccctacaacgggagcaccctcgtcatcgccggccgcgacgaggtccttgcggaggtgagggagctggcggtggtcggcgggacggggaagctccggcgagcgtccgggcacgtgctgtggaggacgctagaggtgttggagggggcgcactatgtgctggagctggacgtgtacgcctcactgcccgctactgctgctgctgctgcatctgctcttgctcttgctaccaattaaacgtcaccctcacccctcctcctcatgctgcagcctgcagttgggaatggagaggaagattaatagtatgatgacttgagagaaggaccatatatacctctgaatctctgatgatgggaaattaagagttacaggatcacgtctcgtcgactacctatggcgtgactcatcgtcacatgctcatagtggctaactggctatggatactactactacaataatccatttggccacacaatttgtcacaatgcccttaatcattgtgcttttcaataattaacatatttcatgttatgaataataccatccatatataaactgcactacgtctc

SEQ ID NO: 2072 - DNA, 935 bp, Oryza sativa
  ref <308>: DATABASE ACCESSION NUMBER: AK060005
  ref <309>: DATABASE ENTRY DATE: 2001-12-06
atcacctctactagctagctatagctctagttctactctaattgcgcagtcgatcgaacgtacactgccaatcaaatcaactgcgagcttgcaatggagagaggagcgagctttgcagtggtgatggcggccatggcggtggttctggccaccacatcgacggcgcaggcccagaccacggcgaccgacatcgtcaacatccacaacgccgcccggagcgccgtcggcgtcccggcgctgtcgtgggacgacaacctggcggcgtacgcgcagggctacgcgaaccagcgcgccggcgactgcgcgctgcggcactccgatcgcaacaactatcagtacggcgagaacctgtcgtggaacccctccgtgcaggcgtggacggcggcgagctccgtcgaccagtgggtggcggagaagggctcctacgactacgccagcaacagctgcgtcggcggcgccatgtgcggccactacacgcaggtcgtgtggcgcgacaccaccgccgtcggatgcgccgccgtcgcctgcaacgccaaccgaggcgtcttcttcatctgcacctacttccccgccggcaacgtccaaaaccagaggccgtactagctaccgtatacgtatacgtatacgtacgtacgtaacgtatatgctatggaatatattttgctactactctagtatatattgtacgtataaatctttctgctctcagtagatatatatgcgcatatatgtacgaactactatgtatgttcgtatgtatatatgtacgcacatcgatctgcatgcgtatgcatgatcagtgtgttggatgcaataagtacgtcatgatgcagacgtattgagtatctacaaatacagatatatatgtatccggtgtgtatttttattacaaattactccctccgtattttaatgtatgacgccattgatttttc

SEQ ID NO: 2073 - DNA, 1097 bp, Oryza sativa
  ref <308>: DATABASE ACCESSION NUMBER: AK060006
  ref <309>: DATABASE ENTRY DATE: 2001-12-06
agagaaagcaaagcaaccaccgtaccgcaaccgcaaccgcgagagccgagagagaagcccttttccccgatcgattcccttctctccgctccgcatcgccatggcctcctcagcaccgacgccgccgccgctcctcccggtgaccaacccggcagccgcggggtcgtccccggccgccaccgccgtgggatctgacgcgccgatcgcaaccccggcgttccggctcttcctgagcaagctctccgactcggcgcggcgctcgctgtccgaccggcggccgtggacggagctggtcgaccgctcggcgttctcgcggccggactccctctccgacgccacctcccgcctccgccgcaacctcgcctacttccgcgtcaactacgccgccgtggtggccttcgcgctcggggcgtccctcctcgcgcaccccttctcgctcctcgtcctcctcggcctcctcgccgcctggtgcttcctctacctcttccgcggctccgaccagcccgtcgtcctcttcggtcgcaccttctccgaccgcgagacgctgctcggcctcgtcgtcgcgtcgttcgtggccttcttcttcacctccgtcgcgtcgctcatcatctccgggctgctcgtcggcggggccatcgtcgccgtccacggcgcgtgccgcatgcccgaggacctcttcctcgacgacgctgacgccgccagcggcaacagcgcggcccagggtctcctgtccttcctcggggcgcccggatctagggtttgaggcggcggcgggcgacgagatctggtaggcttctttggctcgagtgtttcgcgttactctgtaattgatctggatctgatctcgttggatctatatcacatttgttctctaattcatcattctgcaatccgtagctacagatctactacttgtttacctatattttggatcgatgtatcactttgcgaagttgtgctgaatatattgagtctcttgacgagatttagtgttaaaattactaccttatattgttttgaattaatttagcatgaatgtatgaagagtatgtcgacttatcactgtttaaatagtagagaagaatatatgatggttc

SEQ ID NO: 2074 - DNA, 1028 bp, Oryza sativa
  ref <308>: DATABASE ACCESSION NUMBER: AK104181
  ref <309>: DATABASE ENTRY DATE: 2002-08-28
atgtgcatatgcaaacctctcctacctcacactccaccctagctagcccactacacctcctacaccctcaccatccaatagcgcagtgacagtgccaatggcctctcacaccaccctcatcctcctcctccctctcctcgccgccgcggccgtcgccgccgcggacgtcgcccctgcgccggcgccacctgcggcgcagacgatcaacctcacgggcatcctcgagaagggcgggcagtacaacacgctgctccgcctcctcaacgccacccgcgtcggcgagcagctgggcagccagctgaagaccacctacgacggcctcaccttcttcgcgccgacggacgccgccttcgccgcgctgaggccgggcacgctcaacggcctgagcgaccaggagcaggtgcagctggtgctctaccacgtcctcccgcgctactacaccctcgccacgttccagacggccagcaacccgctgcgcacgcaggccacgggccccgccggcgtgtacaccgtcaacgtcaccaccaccacggggcagagcctcgtcaacgtgtccaccggcgtcgccgccgtccccctcggcaccacgctctccgccgacttcccgctcgccgtctactccgtcgacggcgtgctcctgccggagcagatgttcgggaaggccaaggctcccgcgccggccgccgcgcccgcgtccgccgccgggaagggcgccaataaggagcacaagaagggcggcgccatgcccaagaatgaggtcgcggccaccgcgccgacggccggagctggaggagaagattcagatgacagcgccaccaccaatgcggtggccgttgcaggcgcggccggtgtggtgtggactgctgctctcgtggggattgccaatcttgtcatcgcgtagaaagtgtgtgcttgtctttttctccttcgccgttttctttcgttttcgtcgttgcatatgtttcattgcacgtgtcctattttgtatgtatgcaagagtatttatatatgttgatgatgattcactc

SEQ ID NO: 2075 - DNA, 1115 bp, Oryza sativa
  ref <308>: DATABASE ACCESSION NUMBER: AK104182
  ref <309>: DATABASE ENTRY DATE: 2002-08-28
gcttgaagggaaagtaagaaagaaagaaaagaaaaaaaaaaggaaaatcgtgtctcgtctcgtctcgtcttcgtctcccccgattcccgagcagcttctcgaaaccctcgcggcctcgattccggcgatggcggagcccaacccgcaagtggagagggaggtggaggtggaggaggtgaggaggccgaagctgaggtacttggagttcgtgcaggtggcggcagcgcaggcgacgatctgcctcgcggggctctacgcgcttgccaaggaccacgccggcccgctccgccccggcgtcgacgccgtcgagtccgccgtcaagggcgtcgtcggccccgtctacggccgcttccatggcgtccccctcgacgtcctcgccttcgtcgaccgcaaggtggatgacacggtgcaagagctggaccgacacctcccgccgacgctgaaggccgcctccgccaaggcttgcgcggtggcccgcggcgtgccggacgtggcgagggagctcaccgcggaggtgcagcagtcgggcgtcaccggcgccgcgcgcgtcgcgtacgccaaggtcgagcccgtggccaagggcgtgtacggcaggatccagccggcggccaaggacctctacgtgcgctacgagccggcggcggagcacctcgccgtctccacctggcgctcgctcaacaacctgccgctgttcccgcaggtggcgcagatcgccgtgcccaccgccgcctactgggccgagaagtacaacaaggtgatcgccgccgcggccgacaagggttacaccggagcacagtacctccccgccatccccaccgagcgcatcgccaaggttttcggcgagttatcgccggaggcccagccgtcgaagagcgagtcggcgaagacccagtaggtgaggtcaccgcgcctgaaggtgagaggtagccttcgcctgaagtcctgaactgaataagtaagagtggggcgcttatggcagcagaaaaatggtgttttagatgtatgcatgtgacgacattttcgtggatgatgatgttctacttagctcttttactttgtgttgtggcgtacgtttaatcctcctggttttgtataaaagctgtggttgatgtcgc

SEQ ID NO: 2076 - DNA, 1234 bp, Oryza sativa
  ref <308>: DATABASE ACCESSION NUMBER: AK060007
  ref <309>: DATABASE ENTRY DATE: 2001-12-06
acttatgcatgccaagaggtttaacaagatggctcggccgtcgtcgtcgtggtggatggcgctgctcgtcgtcgccgccgtggcgcagctcggcgcgtccgacctgaggacggactactacaacagcacgtgccccaacgtcgagagcatcgtgctcggcgtggtgaaggacaagatgcaggccaccatccgcaccatcggctccaccgtccgcctcttcttccacgactgcttcgtcgatgggtgtgacggctcggtgctgatcacgtcgacggcgggcaacacggcggagagggacgcgcccgacaacctctcgctggcgttcgagggattcgagacggtgaggagcgccaaggccgccgtcgaggccgcgtgccccgaccaggtctcctgcaccgacgtgctcgccatcgccacgcgcgacgccatcgccctgagcggtgggccattcttcccggtggagctgggcaggctggacggcatgaggtccagcgccagcaacgtcgccggcaagctgccgcagccgaacaacaccctcagcgagctcgtcgccatcttcaaatccaacggcctcaacatgtctgacatggtcgcgctctcagcggcgcacagcgtcgggctggcgcactgcagcaagttctcggaccggctgtaccgctacaacccgccgtcgcagccgacggacccgacgctgaacgagaagtacgcggcgttcctcaagggcaagtgccccgacggcgggccggacatgatggtgctcatggaccaggccacgccggcgctcttcgacaaccagtactaccggaacctgcaggacggcggcggcttgctcgcctccgacgagctgctctacaccgacaaccgcacgcggccgacggtggactcgctggcggccagcacgccggacttctacaaggccttcgccgacgccatcgtcaagctcggccgcgtcggggtcaagtccggcggcaagggcaacatccggaagcagtgtgacgtcttcaactgagaaaaatggcactacgacggcgacgactacggaccatttgtagattgtgtatacacgatcgattgaaaatgtgtgtgttgacacgtatataaattgcaaaggagtgattcgttgggtttgccagttttctgtttgtacatcgatcgatcggtcttgttcaattcgttgtgttaaaatatgtgtgtttctgcacataatttggattcaatgaagtaataagtgaat

SEQ ID NO: 2077 - DNA, 1021 bp, Oryza sativa
  ref <308>: DATABASE ACCESSION NUMBER: AK060008
  ref <309>: DATABASE ENTRY DATE: 2001-12-06
atttcgaagcccaccgaattccattcctcgcgattcctctcccctcgcctcctcgtcctccccctcctaggggatcgccggagaggaatcgcgcggagaaaaaaaaaagaaaagggcttcctcgtcgtctaagttaaaaggaagccatggagcacaaggagactggatgccagcagccagaaggcccgatcctttgcatcaataactgcggcttctttggcagtgcggctaccatgaacatgtgctcaaagtgccacaaggagatgataatgaagcaggagcaggccaagctggcagcctcctctatcgacagcattgtcaatggtggtgattccgggaaggaaccaattattgctggtcacgctgaagtagctgttgctcaagtcgaggtgaagacgcttgttgcgcagcctgctgagattgctggtcctagtgagggggtcacggtgaaccccaaggggagggaaggaccaaatcggtgctccacttgtcggaagagggttggtcttaccggattcaactgccgatgtggcaacttgtactgcgcaatgcaccgctattccgataagcatgactgccagtttgactatcggaccgctgctagggatgctattgccaaggctaatccggtggtgaaggcggagaaacttgacaaaatttaggggtttcatatggttggtgaacgaagcgtcacaatctgcggtcttcatcatccatctttgctgcattatccatgccttttcctttcatgttggctgctacaatctagttgttcggcatttgtgatgcatggcacaccacggcagcttcaagaaccctcatctctggtcagtccgaatggtttgcatgttggctatgttgtgtaagctttatttatgatcgtcttgcgctgacggtattgtggcttcgcatttagctagctctgtaatgtactattgtatccgaagtgttacattgcaaccagtaatagtaatcagcaatcgtccgttatatggtactgatgaccattcctgtgtgcagt

SEQ ID NO: 2078 - DNA, 1095 bp, Oryza sativa
  ref <308>: DATABASE ACCESSION NUMBER: AK104183
  ref <309>: DATABASE ENTRY DATE: 2002-08-28
ataaacatcagtagacgacggcgatggcgcccaagcgacttgtctgcttcttggccgtggccgccgcgctagccaccacctgccacgggtggggcgccggcgccggcgatgtcgtgtcgtcgtcggcggcggcgctctcgttcgtggacaggctgaggcagatgatgatcccggcggccgtgggcgacggcgactactgcgacagctggcgcgtcggcgtggaggcgaacaacgtgcgggggtggacggcggcgccgcgcaagtgcgacaactacgtcgagaactacatgcgcggccaccactaccgccgcgacagcaaggtcgtcgtcgacgaggccgccgcctacgccgaggccgccgtcctctccggcgaccccgccgccgacgccaacgccacctgggtgttcgacgtcgacgagaccgccctctcccacgtcaagttctacaagaagcacggcttcgggtaccacagaaccgacgagccggcgttcatggagtggctgatcgccggcagagcgtcggcgttgccgaacacggtgacgctgtacaagaagctgctcctcctcggcgtcaagatcgtcttcctgtcggacaggccggacacgccggagctgaggaacgccaccgccaccaatctcatcaaggaaggcttcgactgctgggacgagctcatattaaggtcggagaactcgacggcgacgggatcggtggtggagtacaagtcgggggagaggaagaagctggaggaggagaaggggatggtgatcatcggcaacatcggcgaccagtggagcgacctgctgggctcgccggagggccgccggaccttcaagctgcccaaccctgcctactacatcgacaactacaagcgcgccggcgccgccgtccgcgccgccgtagccattacagcctcctcctcgtcgtcgtcgtcgtgaagcaaacgatgcctagctagctatagtactcaactttgaattgcatttttttttcagacacataagttcagttaataatcggtcgtgtacgtacctgccgtgctgtgcactgttgtatctttttggtgagacgattgaaatatctttgggtttatctttt

SEQ ID NO: 2079 - DNA, 939 bp, Oryza sativa
  ref <308>: DATABASE ACCESSION NUMBER: AK104184
  ref <309>: DATABASE ENTRY DATE: 2002-08-28
ctcgatctcgatctgagcgaggcggcgacgaggacgacagaacgaagatgagttcgtacatggaggcggcggcggcggcgagggcggcggaggcgaagacggaggggcttctccggggcgcgtgcgcgctgctggcggcggcggcggcgctgctggtggggctcaacacgcagacggagacggtgctgttcatcaggaagaaggccaccgtcaaggacgtccaggccctctgggtgttggcgatggcggcggcggcggcggccggctaccacctgctgcagctgctaagatgcttctacctcagccgcttcgccgacggcaagccctgccggcatcgcagggccatagcctggctttgcttcctcctcgacaagggttgtgcattcataacattcgcgacgacggtggcagcggctcaggcatgcgtggtggcactatatggcacgcacgcgttgcagtggactaagctttgcaacatctacacccgcttctgcgagcaggttgctggtagccttgtgtgtgccatgctcgctgccgtcggtactgccctcctctccgtcgtctccgcccgcaacctcttccgcctctatccctccatgctttcacctccgccgtcttccttcgtgggatagacattgtccaccgcccctctccctaggccttcgtttgtactcttatattgggctgcatagaaaaattaagcccaactatagacccaagtaaagcatacctaccttttatttttcttaacttttgttagagtgcatttaggagtaatacttatccacatgtagtatatactccacagaaggtatatgttcttgtacctctctctcaaaaaagtgtatccataggtaatgtgctttgcttcctctctctctcataagaacaatagtagagaagatggttgtaaggtaattaaggaccaacctttgtggc

SEQ ID NO: 2080 - DNA, 1037 bp, Oryza sativa
  ref <308>: DATABASE ACCESSION NUMBER: AK060009
  ref <309>: DATABASE ENTRY DATE: 2001-12-06
agctgctcacgctgcccaccgtgctcaccattggccgcgtcgccgccgtgccgctcctgataagcactttctacatggaggggccttgggcagcaactgcgacaactggcatcttccttgctgctgcagtcactgattggctagatggttatattgcgagaaagatgcagttaggaacaccttttggtgcatttcttgatcctgtggctgacaagcttatggtagctgcaacattagtgttgctgtgcaccaaacctttggaaatttcactgctcagagatgggccatggcttctaacggttcctgccattgctattattgggagagagatcacaatgtcagctgtgagagaatgggctgcgtctcagaataccaaagttcttgaggctgtggcagttaacaatttggggaagtggaagaccgcaacgcagatgacagcattgactatcctccttgcgagcagagacaaaagtcttcctgcacaagatgctctggttacttccggcatcgcattgctttatgtatcagctggacttgccatatggtccctagtggtgtacatgagaaagatatggcggatacttctaaaatagccgtagcacatagtgtaatagaaggaacaggagcaagccagcaaggtgatattacatttcaagagcatacaatttttgaactgcggagttgattgatggacctagaattggttgagatcctcagctacttacgcattgtctcagtttggcggattagttgctaagttgctgtgcctgcaagatctccgtagaaacaaaaaacatagtagcaagtagtatgttgcccgggtgattacttcttcgaaagctattttcagagcctatcacggctcgagtgttggacactgggtgtaatgatctgcaaaactgaaaaatgcagaagattgtaaccgtatacgaatacaaaaccatgaggtttgagtgtgtgactctggggtttctatagtttctaccattgtaagtttacccatatgatatgtcagaagcgaacattattctttggac

SEQ ID NO: 2081 - DNA, 1021 bp, Oryza sativa
  ref <308>: DATABASE ACCESSION NUMBER: AK104185
  ref <309>: DATABASE ENTRY DATE: 2002-08-28
aaaccaaagcaaagactagtgtagagtagaagagaagagtccaccaagaaaccaagaagctagaagcatcatggggaaggattgcggcaagcacggcgacgacgacttccggcagggatgccggcgattcatcaccgtcctcgtcgtcctcgccatcctcgtcggcatcatcgccctcatcgtctacctcgtcctccgccccacccaccctcgcttctacctccaggacgccaccctccgccagctcgacctctccaactcctcctccaccgccggcggcgtcctctccaccaccatccaggtcaccgtcgcctcccgcaaccccaacgaccgcgtcggcgtctactacgaccgcctcgacgtctacgcctcctacaagtaccagcagatcaccgtcgccgcctcgctcccgccggtgtaccagggccacggcgacgtcgacgtctggtcgccggtgctcgccggccccagcgtccccttcgcgccctacctcgccgacgccatctcgcaggattgccaggcgggctacctcatcctccaggtcaagatcgacggccgcgtccggtggaaggtcggcagctggatctccggccactaccacctcttcgtcacctgcccggccttcctcgtcaccgccggcggcaatggctcccccggcgccagcggcttcaggttccagactaccacctactgccacgtcgaggtctagctaagctagttatgttatgatctactactgtgcccaccgccgccgccggaatctgctatctccggctagtcgccggcgaggtaggtttgatttcttggaggtggtggtgttcttgtgcgtccatagtgaaaaagagatgatggtggtaataatgaattattatgtgggttacaaaatgtaaaggaggtggagaggcaatttaagtaggattaatggtatggttaattataatgctctcttgattattagcttaattgttaataatcccttttttgtcttaattaaggagaaatgcatgtttagttatttgtc

SEQ ID NO: 2082 - DNA, 1166 bp, Oryza sativa
  ref <308>: DATABASE ACCESSION NUMBER: AK060010
  ref <309>: DATABASE ENTRY DATE: 2001-12-06
acacacacactagtgcaagcagctcgagcttgagctccacctcgccatcgccggcgacttctcctgtcctgaccggccggagctccgatcttggcggtgaccaagagacctgacgagacgatgtccgccgccgccgccgccgcatcctcccccgctccccggttggaaagcaaggttgcgctggttaccggtggtgcttcaggtattggtgaagcaattgttcgcctctttagagagcatggtgcaaaggtatgtattgcagatatccaagatgaagcaggtcagaagctccgggactcccttggaggtgaccaagatgtcttatttgtccactgcgatgtttcggtggaagaggatgtagcccgagcggtcgatgcaacagctgaaaagtttggtactcttgacatcatggtcaacaatgctggctttacaggccagaaaatcacagatatccgaaacatcgacttttctgaagtcaggaaggtaatcgacatcaatttagttggtgtattccacgggatgaaacacgcagcgcgcatcatgatccccaataagaaggggtccatcatctcattgggaagtgtttctagtgtcattggagggttgggacctcattcatacacagcaaccaagcatgctgtggtgggtctaaccaagaatgtagctggggaattggggaagcatgggatacgcgtgaactgcgtatctccctatgcagtgcccacggctctctccatgccgtatctgccccagggcgagcgcaaggatgatgccctgaaagactttttcgcctttgttggtggtgaagcaaacctgaaaggtgtggatctgctacctaaggatgttgctcaagcagtgctctacttggcaagcgatgaagcgaggtacatcagcgcgctcaacctcatggtggatggtggctttacctctgtgaatcacaatttgagagcatttgaagattaacagaagttgttaggcacaattggtactctagtttcagatgctatgtaccattctgattttagaactttgatcaattacctaaagtaagaatgtcaataaggaatgcaatcttgtatctgtggtattgtatagtactatgattgtattgccggtgcttaaggacaatcattgattattatcagcactattatgttacagttctg

SEQ ID NO: 2083 - DNA, 1348 bp, Oryza sativa
  ref <308>: DATABASE ACCESSION NUMBER: AK060011
  ref <309>: DATABASE ENTRY DATE: 2001-12-06
gatgagaatggccgcgccgcagcaagtgcatgtgcgtgccgccccgctcgcgcgcgcgctccgaactcgcgtcgccgccgccgccgcgtctgcgagctctcccgaacgcgcgctcctcggcctctccgaaccggatctccggcagctcgccgtcgacctcggccagcaaagttacagggggaagcagcttcacgacctcctctacaagtccagggccaagcaaatccaagaatttagccacgtaccaaaggtgttccgtgaggccttggtcggcgctggctggaaggttggccgctcgccagtgcaccatgctgtgacggcctccgatggcactaccaagatacttctcaagttggaggataacagattgatcgaaacagtagggatccctgtcgatgatgacaaaggcccgtcaagactcactgcctgcgtttcatcacaggttggctgccccttgcgttgctcattttgtgccactggcaagggagggtttgcaagaaaccttcatgcacatgagattgttgagcaggttttggccatagaggagacgttccaacacagggtgacaaatgtagtgttcatggggatgggtgagcctatgttgaacctgaaatcagttttagaggcacatcgatgcttgaacaaggaactaaaaattgggcaaaggatgataacaatctccacagtaggtgttcccagcactataaaaaagttagcatctcacaagcttcagtcaacacttgcagtcagcctgcacgccccaaatcagaaactacgggaaacaattgttccaagtgcaaagtcatatcccttggaggcactaatggatgactgcaagaattacttcctcgaaactggacgaagggtatccttcgagtacactctgctagctgggattaatgacgcaaaggagcatgctgaagaacttgcagagctactgcatacatgtggcggtggttatcatgtgaacctaattccttataatccgattcaaggttctgaatacaagaggccctacagaaaagtggttcaagcgtttgttgatgcgctagaagctcggaagataactgtaagcgttcgacaaacccgtgggcttgatgctaatgccgcttgcggacaactaaggaatgagttccagaagaatccactgcttgaatcatcaccttcatcagagcccaacctcgtaccagcttgatgagaagactgagttcatgatggccatgcacaatgattgcagattatcagtccatcacactgaaagctgatattgtactcgtagttgttttcggcatttcctgatgtatttgaattttcaagagttgttataagtagatatatatttagtgcc

SEQ ID NO: 2084 - DNA, 1058 bp, Oryza sativa
  ref <308>: DATABASE ACCESSION NUMBER: AK060012
  ref <309>: DATABASE ENTRY DATE: 2001-12-06
aacccgaccaccaccgcgccacgccacgccacgacacgccgcgccgccgcgccgcgccgcgccgcccgccccccgccggcgaccatgtccttggcggcgaccttcgtgttcctcctcgtctcggcgctgcagatgctcgaccaagtcctcgatctcgtcaagaagaggggatcgattactgatgaccagctcaagctacggctagaaatcacgcagattctcaaggaggctagtgcactatccacgccctcaacgtttgcacaagccgcaaaactcaagcggctggctgctgctaaagaaaaggaactggcaaaattgcaacagcaggacatcaaagggaagcagtctttatacaaccaatacggacgagttatgttgttttccaaggttctaatctacggcttgctcattctgtggttttggagtgctcctgtaactactgttcccaaacatcttctgcaaccttttggacggatgttttcctggagaggtgttgatgctgccacaggccgtgttgtggttggaattatcccatggctacttttaacctctcgtgtcagcaagttattgtgccagaaacttgcccctatatttctgcacccatagctccttttgaagagttcgatttgctcactgtggttttcagttttgttcttacagttttaaactgtagactttctacatgtagctatgcaacatcatggttcctatgatgccacttcctgtaaaattttgttgcgcctatctgcatccacagctccttctcatagtgtttcttttttttaaccatgtttatattttgcaaatttacacacactgcatggctgcctgtgtggcacattgtgacttcctaaaagagttactggtgcgactatgcccctagttgatatatctagaagagtatgttgtagttgtagtaggtatatttcttttgtttagcatttacttattgcttagttcaaaaggcttaagtaatgcagtgtaaaattccaccctggttgtgtcggttggaatatgagattacagcccatcatcaatcttactgggatttcattttt

SEQ ID NO: 2085 - DNA, 1041 bp, Oryza sativa
  ref <308>: DATABASE ACCESSION NUMBER: AK104186
  ref <309>: DATABASE ENTRY DATE: 2002-08-28
ctcgcggaataataacctttttttttctttttccaagcgcccttcaaacccatctcctctcccctctccctcccaattcgatgcagccgcggtagcaattcgcatcgccccgccctcctcgccgcgcggattcgctcgccgcccccgccaccgcacccccatggacgcctccgccggatccggcaatgcctccggtggcgccggcgccggcgcgtccgcgtgctgctactactccctgctcggcatccggaagaacgcgtccgccaccgacgtgcgcgccgcctaccggaggctcgccatgaagtggcacccggaccggtgcgtgagcgaccccggcgaggccaatcggcggttccagcggatccaagaggcgtactccgttctgtccgacaaggggaagcgagccatgtacgacgccgggctgttcgatcccctcgacgacgacgaccaggatttctccgatttcatgcaggagatgctggtgatgatggataacgtgaaaaacgagaagccggacacactcgaggacctgcagaagatgctgcaagacatcgtcagcggcgacggcggaagccgcggcggcggcgtcggtggccgcgtgccgtcggacggcacacggaggacgcgcgtcgcgccctacccggcgcagtcgcgcaggtgaccggcgcgccggtgtacgagacgtgcacacgcctctaagtgatgaaaagagagacaagcagaagaagagaggaagcaaacgggaaagaaaaaccaataaaatttggcagaatttgtttcccttttttttaggtcatcagatgattgactccgtttagttcgctgggttgggttgggtcgggtgtgccgttcgattccggccgcgtcacccaagaattggtgcgtgcgtggccaaagattccaatatcttgtcgacatttcgtcctgaatttcactctcttgttgatgtgttcatcatgcgtcctcttctgccttcctgtgtcattgtccctgtcctactcccacagtgtattcccaatttgttacactactggtgctact

SEQ ID NO: 2086 - DNA, 1000 bp, Oryza sativa
  ref <308>: DATABASE ACCESSION NUMBER: AK060013
  ref <309>: DATABASE ENTRY DATE: 2001-12-06
ctctctccggcgtgctcactcgcacacagtccccaatggcctcccggaacgccgacccgccgcgtcaccacccctcgacgccgcctctcctcctcgccatgcgccacctccccttcccgggcgtccaccggccgcgcgcgctccccgccccggacctcgcgcccctcgccgcccgcctcgaagagctcgctgccgccgcggccgcgcacccgctcctgaagccgctcttcgccttccactcccacctcgccgccttctcccagagcaggaggcgggcgatggcgacgatgcgccggcggcggacgacgggcgagtgcccgctgtccggcgagcactgcttcgcggcggtgctgggtgactccgtggccggtgtggtggtgtccagcggcatcaacaacttcctcagcctgtacaacaccgtcctcgtcgtcaggctcgtgctcacctggttccccaacacgccgcccgccatcgtcgcgcccctcagcacgatatgtgatccgtatctgaacattttccggggaatcatcccgccgctggggggaacgctcgacctgtcgcccatcctcgcgttcctggtcctcaacgccttgtccagcaccgccgccgcgctcccggccgagctcccggacccagcaccgccgacgtctcgcggcgcaacctcgtcaagctccgtgctcaccgcaaaccggaggaaatggatgcggagaatccgcccggtaaaatcgcaggaaggagaggaggaaatgtgatgctctatctaggtgggacttcgtttgaaccagtttggacagatggaatcgctgtctcactgacatggtggccatcagactaagagtctgggcatgttcagacgcgaacgatcatcaattaagcaggcggaattgttttggttgtgttgcttcagaagatttttgcttgtacgctgtagaatccatcccattgaggcttcgtgttttctgcatgtatgcagaggaacaacctgcttgactagtttgac

SEQ ID NO: 2087 - DNA, 911 bp, Oryza sativa
  ref <308>: DATABASE ACCESSION NUMBER: AK060014
  ref <309>: DATABASE ENTRY DATE: 2001-12-06
acttttgatatcaatatcttcagagttttctattttcgcttggcatttgttgggttttttttttcaattccatggagattttgtaatactcaattcgatcctgacagtgacagatcggttaccttgtcacaggatttagctagtaatccaagctgacaagtgacacctatggcgaattagtttacgtacgggtcaggattaatcgaggccgtgtgtgacttttggcactctcatgtgcagggacaggcaagaggccgccgctgtcgccgctcttcgtgcatgtggcggccgccgacgacatgggcggcctcggccggctcgtccacacgccggtggccggcacgccgggagggaagtcccggcggctcgggcggcagccggcggcgccgtggctcgatccccggagggtggtcttcttcttcgccacactgtcaagcgttggaacgttgatcctgctttacttcacactctccatgagcaagatgggcggcgacagcggcggcggcggcagcagcgatgctcggtgaaacgccggctgttgaaactgaagaaaaattttcgttttgttctcaaacctcaatgcaatctgtaaaggaggcatgatgttgctacaaagacccaggcatcaaaaaaactgatgctcttctaagggtcaaggaagaatatagagtgaatggcagtgaagagatcaggctgaatggggtctgatggtgaagtatgcgatggtagttgcattctcttctctgttgctgtcatgatttcttcagttatttttctcttcttttttttgcataaaaaggggtacatcatacatgtcgctttgaagcgatgatactagatttttcatccttgatgttgttgcagacacacaaacaatcaaaaatacaaatggacacagatgtatttgaaag

SEQ ID NO: 2088 - DNA, 1199 bp, Oryza sativa
  ref <308>: DATABASE ACCESSION NUMBER: AK060015
  ref <309>: DATABASE ENTRY DATE: 2001-12-06
acaacgaggagaggaacagcagagcaaagccccacctcctcccctcctgcgcatctcctctcctccccggaatctgctctccgccgccgccgcccggcagaggagatggacggcagcagcctcaagtcggcgcagctcctcgagcagatgcgcctccacatggccaccgacgccggcaaggacatcgccaagaaggtcggcctcgtctactagttcaacatcgcccccaagaaaatcggagtcgacgaggagatcttcgtcgtcgacctcaagaagggcgaggtcaccaaagggccgtacgaggggaagccagatgcgaccttctccttcacggattctgatttcctctcgatcgccacggggaagatgaacccacagatcgcgttcattcgaggcgcgataaagatcaaggggagcataagcgcggcgcagaagttcaccccggatatcttccccaagccttccaaactgtagaaggttagaggtatattgtttgggcgaggttggtaataataagggttgctagttgcaatactgtgtttgatagaatggggggagaaaactggaaacaggaacaacacacgagtgcctgatgttatggctggaaatcggatatcgctatggttaatgttatcactgatatcaagttcaatccttgtttgttgtgactttcttttatatatcataatatgatccaaatgtctgttgatgtttcttgacgaatatacccactatagtgatgatatcagatttctataatgaaactagcaattgcttggcagtgccgttttaccctgcactgcattgtgctgtgaagatctactagaatgacttacattgtgaaacggaggaagtagttttaaagggcctagcaatgtattgtataatatagttcgttctgttttacagggttatactggttcttgagtttgatggggttatgctgggttagagcaggatttgtagccatattagtgtgcagctgtttcattttcctgttaccacaataacagtttaaccatccgcatattcagtacatagtgtactaccctgataagtccatgcctccatggttgatagggctagcattgacagttgtgatagagagatccatgaccatgatgttagcaactgccaattgtgtaatcagctatcactcattttctcataattgctaataatgaagaaggcccacaaat

SEQ ID NO: 2089 - DNA, 1104 bp, Oryza sativa
  ref <308>: DATABASE ACCESSION NUMBER: AK060016
  ref <309>: DATABASE ENTRY DATE: 2001-12-06
tgctgcaatatgtgctgcaccagctgtcgctctaggatcatggggtttgctgaatggattgaaggcaacttgttatccttcattcatggataaacttccttcagaggtcaatgctgtagaatcgagggtgcagattgatgggaactgtgtgaccagtcgaggaccaggaacggccatggagtattctgttgttttggtcgaacaattatatggcaaagaaaaagctgatgaagttgctggtccaatggtcatgcgcccccagcatggtgtggagttctcattgaaagagttgaattcaactagttggaatgttggtgaaacacctcagattcttgtaccaattgctaatgggacagaggagatggaagcaactatgataatcgacatcctcagaagggcgaaagcaaatgttgtcgttgcgtccttggaggaaactttggagattgttgcatccaggaaagtgaagatggttgctgatgttctgttggatgatgctcttaagcagcaatatgatctcattttgttaccaggtggtcttggtggtgcccaagcatatgcaaagtcagataaactgattggtctgatcaagaagcaagctgaggcaaacaagctatatggagctatatgtgcctcgccagcaatcgcccttgaaccacatggcctgctgaagggaaagaaggctacatcctttcctggtatgtggaacaagctctcggaccaaagcgaatgcaagaacagggttgtcgttgatggcaacctaatcaccagccaaggtccaggcacatccatggagttctctctcgccatcgtggagaagctgtttggtcgggagagggccgtcgagctcgccaaaaccatggtcttcatgtgagttgtgttgttacatactacgtgtaagacaacaccatagtcagactctgaatatgaggcatccttttgctcgtagctggtgtggtggaaagcacttcgtaatccttttttttggctttctcttccacaataacacgacgtcttgttatgtgtacaaccgtacaaatgcaataaaaagagatggatattgcacctttgggttggggggggggggtatatgatgatggtaaaaag

SEQ ID NO: 2090 - DNA, 1076 bp, Oryza sativa
  ref <308>: DATABASE ACCESSION NUMBER: AK060017
  ref <309>: DATABASE ENTRY DATE: 2001-12-06
caatctgtggtcacgccctctggaagccgagagcccgagaaggcggagaccccgggagcagaggggagagcagcgcagccgccatggaccgcgtgcagctcgtgctcctcggcctccccatcctcctcttctgctccgacctcgtcacgctcttcgggccggagcagctgcccaccccgcagcccgacctgccgccccaccccagccccgacgcggcctccgacgccgtccagcccgacgacatcgccgccgatgccgccgcttccgcgcagattgctgagccgcaggtggatgggcctgcctccggcaccaccgtcgagttgaagttctgcgcctcctgctcttataggggaaatgcagtcaccgtgaagaagatgctggaaacctcatttcctggtattcatgtcgttttagaaaattaccctccaccattcccaaaacgcgcactcagcaaagctgtaccttttcttcaagttggagcaatggcaactttaatggccggtgatcagattttccctaggtttggaatggttccacctccatggtactactcgctccgtgctaatagatttggaacaatggcaacaatctggctgtttggcaatttcgcccagtcatttctacaaagttctggtgcctttgaagtttactgcaatggacaattggttttctcaaaattatccgaacagagatttcccagcgagtttgagctacgggagctcattggcaacaggttaccagattctcaattcgggaaaaatctggaaaaggtttggtcatagatgttgatgtcaagagagcccacttcatttacctgctatttaattgatagaaccgcttgaaagtttacgcctaattgtcaatcacatgctatttgtcttcttcttttgtgaaggcaggtacttttctttttgttgtaaataatgttttaccctcgcaaagaaagtgaaggagttctgtggctatgttagtttgttagaactgtcatatttactcaaagaggatgtgaaccataacgccccttctcgagtattcctaattaattatcagaaataattactctgactttggattgg

SEQ ID NO: 2091 - DNA, 1294 bp, Oryza sativa
  ref <308>: DATABASE ACCESSION NUMBER: AK060018
  ref <309>: DATABASE ENTRY DATE: 2001-12-06
attttccatcccctccatcatgagctccaattagccgcacaccgatcccctcctcttcttcccccccttctcctctctcctctttttttcctcatccgtgcgcgatactgcgcttagtttgtgggtggggggagtgatcatcaccaaagccacaaagggggcgcggagagatattatatattctttgggaaagcgttggattagtttttctcgctttgggctttttatccggagttggagtgtgtgtgcgccgggagtggtggtggtgatggcggccggagaggaggtgatggatcggtcgacgtcggccgaggacgggtactgcagcgccggcacggactcgccgcgggcggagtccgtcgacgagcaaggggccgccgaggagtcgtcgccccggggagggcagaagcgggagctcccctcgccgtcggcttcgccgtcgtccccgctgccacctgccgcgaagcgcagccggaggtcagtggagaagcgggtggtgtccgtgccgatcgcggagtgcggcgaccggccgaagggcgccggggaggggccgccgccgtcggactcgtgggcctggcgcaagtacggccagaagcccatcaagggctctccctacccaagggggtactacaggtgcagtagctccaaggggtgtccggcgaggaagcaggtggagcgcagccgcgccgaccccaccgtgctgctcgtcacctactccttcgacggcgccaaagcctgagccggtggctgacggacagcaccccgagccagcggagaacgaatcgtcggcgtcggcggagctggaggtaccggagccggagccggagcaggaatctgagccggttgtgaagcaggaggaggagcagaaggaggaacagaaggctgtggttgagccggcggcggtcacaaccacggtggcgccggcgccggcggtcgaggaggaggatgagaacttcgacttcggatggatcgaccagtaccacccgacgtggcaccggtcgtacgcgccgctgctgccgccggaggagtgggagcgcgagctgcaaggggacgacgcgctgttcgcggggctcggcgagctcccggagtgcgccgtcgtgttcggccgccggcgcgagctcggcctggcggccaccgcgccgtgctcctgatgatcacctcctcttttctttttcctccccttttacaatttccctttttttttttgcttttctttagttctccttggagtaatttggattggaggttagtacatagcttgggtgatcaatgggagtgagtggcttaactgttc

SEQ ID NO: 2092 - DNA, 1103 bp, Oryza sativa
  ref <308>: DATABASE ACCESSION NUMBER: AK104187
  ref <309>: DATABASE ENTRY DATE: 2002-08-28
accaacaacagtaacccaaccagagagcttgcggaagcgggggtttggtgcgggcgcgcgcgtgtgaggggggagagaaggccaggaggaggcgacgccgtcgcccgagggaggcaaaaatccgatcctcctcctgccctgctcgctcgctcgctcgcctgcgctgcgcgcacttggccccgtcccgtccgttcccgctcgccaggcatagaaagatggtgctctgggtcttcggctatggctccctgatctggaaccccggattcgacttcgatgagaagatcctgggcttcgtcaagggctacaaacgcaccttcaatcttgcttgcattgaccatcggggcacgccggagcatcctgcgaggacctgcacacttgagtccgacgaggaagccatatgctgggggattgcatactgtgtcaaaggggggcttaaaaaggagcaagaagcaatgaagtacttggaaagaagagagtgtgagtatgaccagaagatctctgtggatttctacaaggaaggagattctttgaagccagctgtgacaggtgtactagtctttgtatccactcctgatccagtaggcaacaaatactatcttgggcctgctcctttggaggacatggcaaggcaaattgctacagccaatggccccaatgggaataacagggattacctgttctcaatggagaaggcattgtccaacatatgccatgaagatgattcaatcatcgagctagctaacgaggtcaggaaggtgttgagccggccgaaggagaagatcactggctccgatagcccacaaaaatctcacgctctcgtacacctgtctgcgcttcctgagggcactgttgtggactcaagatagcaagctcggcggtggaagagatgagatctcctctgacctactcactcttgacgctggattgaacgagtttaacagtctgcttcgagctccctggcacactggggaaccagaatgtgctgattttctttcgcaaccgctgcggcaatgctgtaactttcattttgctaatactagagccgagactggtgtgctgctgtttcctttgacacactaaataataaagggattccatgagct

SEQ ID NO: 2093 - DNA, 979 bp, Oryza sativa
  ref <308>: DATABASE ACCESSION NUMBER: AK060019
  ref <309>: DATABASE ENTRY DATE: 2001-12-06
cgaagccagcgctatcgtgggagaagaggtacacggcagcgatcggtgtcgccgaggccctgagctacgtccactccggccactcgcggccagtgatccaccgggatgtcaagtcgtccaacatcctcctcaacgatgagttcgagccccagctgtctgattttggtctggcgatctgggcgccgtcgaacccgggctcactgacgcacagcgatgtcgtggggacgtttgggtacctggcgccggagtacttcatgtacgggaaggtgaccgacaaggtggacgtgtacgcgttcggcgtcgtcctgctcgagcttctcacggggaggaagcccatcagcgacgggtcgcctaagggccaagagagcctagtcatgtgggcgagtccgatacttgacagcggcgacatctcagatctgctggacgccgacctggacgtgaagcacgacgacgccgaggtgaagcggatggccttggccgcgtcgctttgcctcaggaggtcggctcgcctcaggccgaagatatcgcaggtactgagcgtgctccgaggagagagcgaggtgagcctcgacgacctgaaagccgagccggcggactgcgtggacgacgagacctacccggcggcgaacgtgaggacgcacctgggcctcgcgctgctggacgtggaggacgccgagtccatctcaagcacagagcacagcaacctcagccccctcgaggagtacctgcgagagcggtgtagtcgatcgtccagcttcgattgacaagcttgctgtttgctttggctgcttcctttttcttctctttttgttactaaatttttgtttggggttgggttggcattgtttggatacggcttacaaacacatgtacagaaccacatgcgccaaattttcggcgatgagaggattctggttgttccaaaaagaaccaagagaaatgtgagcgctttgtacagaaataaaagttgcccgttgct

SEQ ID NO: 2094 - DNA, 1296 bp, Oryza sativa
  ref <308>: DATABASE ACCESSION NUMBER: AK060020
  ref <309>: DATABASE ENTRY DATE: 2001-12-06
aaaagctcccttcccagtttcccccaaagctcctttcccagagaccccaaaccaaagcagcttgcttgcttgcttgattgtttgttgcttcttgagcccctctcctccttgcccaagtctgtgtttttgtggcagacttcagcataagggtgaagcaaagcatagggtctggttttgggttcttgacagaagtcatgtttcatggtggcaggcctttgtccctcaggggctctctcaaggcgcttgaagctgatatccaccatgccaacaccctggcgcatgctatacacagggcctatgggggtgcctgtgtgcagatgaggctgtcttacagctccatggctccaatcatccttaacctcatccagtggatggattgcagctgctccctttcatataccctccctagttacctaggtctccttgaggttcttgtgtacaaggtatatgttgatgaggatgcctctatatccaccaacattgaaaggagagcaagcctcaaggaattctatgctgtaatatatccattcttgcaacaactcgaggggaatttgatggagaaagactgcaacgagaaaggatggtgcaaggaggcggcctccggtggcggcggccggaagctttacgccgacgataaggacgacgagagggaagatgagtgcggcatttgcttggagacttgcaccaagatggtccttccaaattgcaaccatgccatgtgcatcaactgttatcgagactggtacacaagatctcagtcatgcccgttctgccgcgggagcctgaagagagtccgatcaagggacctctgggtgctcaccggagacgacgacgtgatcgacaccgtgacgctggagaaggagaatgtgaggcacttccacagcttcatcgacagcctgcccctcatagtccctgacaacctcttgctggtgtactacgactacctagtctgacgaagctcagctctcctcttctgaaagatattgagattcagagttcagtacgtgttccgggcagccgaccatcctctgcagattgagtctggctagcgaaatgccatgccgtcaatggcgaagacgacgacaccattgctccttattagggctgggctctgcgtaatcgcattgtttgttgtaataagtgtatatacagaattaaaaagagatattggggaagatggttttctcatgtttaactacttgtttggcacttctgctctggcaaattgccaaatgattcagaaaagggacaggtgctgggtgtttattgacctgcaccaactgtcgatttatttgc

SEQ ID NO: 2095 - DNA, 1182 bp, Oryza sativa
  ref <308>: DATABASE ACCESSION NUMBER: AK060021
  ref <309>: DATABASE ENTRY DATE: 2001-12-06
aatccagcggctgagatcgcgccacgtatgttcccccgcttgctcctcgcccaccgcctcctcgccggcgccgccgctcctctcccccgccgccggacggccgccgccatgtccgccgcggcgccggggacgcggctgctgcgcggcgtggtgttcgacatggacgggaccctgacggtgcccgtcatcgacttcccggccatgtaccgcgaggtgctcggcggggacgaggcctacgcggcggcgcgcgcggcgggcgggggctccgtcgacatactccactgcatcgagggctgggcgcccgacgagcagcgccgcgcctacgaggtcatcgcgcggttcgagcaggatggcctcgaccgcctccagatcatgcccggtgcctctgagctctgcgggttcctggacgcaaagcagatcagaagaggtttaatcacccgcaatgtgaagaccgcagttgatttgtttcaccaaaggtttggtatgatgttttctccagccttaagtagagaattccgcccctataagccagatccagctcccctgcttcatatttgctccacttggaatattccaccaaatgaggtggtcatggttggtgatagcctcaaggatgatgtcgtctgtggtaagagagcaggagcttttacttgcttgcttgacgaaacaggacgatacggtccccatgattctttgcctgaaggtgttcgacctgacttcaaggtttcttcgctttccgaagtattctctgtgctggaagagcattttgatttggcaccggtggtttcagagagtagaatctgacaggaaagtattagttatctgtgatctaacatggaacccagctcctgtgtcttaatactatgaacctccatcagtggtgtttcaagtaccagaaacccttacggcctatgaagattatgctctccaccaaagtggattgcagtttgattttgccacttgccctcaaaatgattcatcgttcattgtcagccggtttgatgtatatcactatgtcctgtccactatacctgttagtattctgtggcacggacagtgcgttctgttatagacaaaaatcaaccctcgcgatgactggcagaatttgccgtagtatttgggtgattcagaatcttttatctgtggccatctttcatattcattcatttgttcatctctgtg

SEQ ID NO: 2096 - DNA, 1071 bp, Oryza sativa
  ref <308>: DATABASE ACCESSION NUMBER: AK060022
  ref <309>: DATABASE ENTRY DATE: 2001-12-06
ctcatttccatttccagttgcagcaagagctgcctcctagctctcttcctgccatccatggcaaatgcttccctccaatcctttcttcttcaccaccaccattctttccttagcaatggtatccatgagggctcctccccttctataattctcaagctcacaacaaacagcaacagcagcatttcattcaagctcttctccaacaccacctcctcctcatcatcatcagtgaccaccacagcatcaacccccaactcaccggtgacccctgctccggtaacagcctcgtctccgccaccgccttcgctggagctcctgggcgcccagctcgccgagagggattaccggcaggccgacgagaccacccgcgcgctcctcatcgagctcgcgggcgagccagctcggcgccgagggtacgtcttcttctcggaggtgcagttcatctccgccgatgacctccgggccatcgacgcgctctggcaggagcacagcggtggccggttcgggtacagcgtgcagcggcggctgtgggagaagtcgcggcgcgacttcacccgcttcttcatcagggttgggtggatgaagaagcttgacaccgaggtggagcagttcaactacagggccttccctgatgagttcatctgggagctgaatgatgacacgccagaggggcatctccctctcaccaatgccctcagagggacacagctcctgggcaacatcttcacacatcctgcctttgaagaggagcaagaagatgaattagcagcagaggagaatgacacacctgataacactggtcagagtaaggatggcagcaaagggaaggagaggccaaagttcatgagagatttcttcaagcctgactactccttttgagattggggggtaattaaaaagcatgggagtttgtgatgcagagatgctggtcatggtgcaattgatttagaaaaaaaaaaaaaggaaacatgtatccgtagttcatctggattgttatgtcctgtaaacatgcgtgggaaactgcacaatatattatgaatataattgtttgagatgtttgctctgcacatg

SEQ ID NO: 2097 - DNA, 1442 bp, Oryza sativa
  ref <308>: DATABASE ACCESSION NUMBER: AK060023
  ref <309>: DATABASE ENTRY DATE: 2001-12-06
tcacctatggccggccatgggacgcaagagatggagtgttgcttcgtagtgcccagcgagaagacgccgaagcatgtcctctggctttctcccctcgacatcgtcttggccaacagaggagccctcaccccgctcgtgcacttctaccgccgccgccatgatgccgccggcggcggcggcggcttcttcgacgtgggcaggctcaaggaggctctggccaaggcgctggtggccttctaccccctcgccggccgcttccgcgtcggcggcgacggccggcccgagattgactgcaacgccgatggcgtcttctttgcggtggctcggtcggagctcgccgtcgatgacatcttgactgatctcaagccgtcgccggagttgaagaggctgttcatcccccgtactgagccgccgtctgccgtgctcgccgtacaggtgactttcttgagatggggcggtatagtgttagggacggcgatgcaccatgccgccgtcgacggccatagcatgttccacttcttgcaaacatgggctgctttctgccgggacggcgacgccgccgtggtggagctgccctgccacgaccgcgccctcctccgcgcgcgcccccggctcgccatccaccctgacgcctcctccgtgttctgccccaagctaaacctccgtccgccgtcggcgtcgggctcgggcctcatctccgccaagatcttctccatctccaacgaccagatcgccaccctcaagcggatctgcggcggcggcgcgagcaccttcagcgccgtgaccgcccttgtgtggcagtgcgcctgcgtcgcacgccggctgccgctgtgctcccagacgctcgtccgcttccccgtgaacatccgccggcgcatgaggccacccctcccggaccgctacttcggcaacgcgctcgtcgaggtgttcgccgccgccgcggtggaggacatcgtatcggggacgctggccgccatcgccgcccgaattaagggcgtgattggccgcctaaacgacgacgagatgctgcggtcggcgatcgactacaacgagatggcggggatgcccgatcgtccggacaatggcagcctgccggagacggagctgcgggtggtgagctggctgggcattccgctgtacgacgcggtggacttcgggtgggggaagccatgggcgatgtcccgtgcggagtcattgcgcggagggttcttctacgtgatggacggcggggcagcggatggtgacggcggggacgccgccgccgtgcgggtgctcatgtgtatggaggctgcaaatgtggaggagttcgagcgattgcttcgtgccaagtttgtgtacccgaggatttgatttagcatgtgtcggttggctttgttggagtctctcttctctgtgttgtgtaagcgcatatttattgggactagctacacaatttatgacag

SEQ ID NO: 2098 - DNA, 861 bp, Oryza sativa
  ref <308>: DATABASE ACCESSION NUMBER: AK060024
  ref <309>: DATABASE ENTRY DATE: 2001-12-06
gttatcctctgctgcttctctgcggtttgagcgagcgagggaggaagaggaggggaggagacgaagatggccggggtggcggcgttgcagggcgcgatggcgtccctctccatctctgcgccgggggcggcgagcaccagcagcttctggggccacccgctctccaccttcgccgccgcgccggctggggttaaatttatgatcaagacatgcccaattcaaatgaggcttaagcgatgggagaggaagaagtgtaaaccaaacagtcttcctgtcctgcacaagatgcatgttaggattggcgatacagtacaagtcattgcaggccgtgagaaaggtaaagttggagaagttacgcggctttttaagcacaacagcactgtaatagtgaaggacttgaacttgaagtccaagcacaagaaaggaacagaagatgaaccgggtgaaatcgtcatgattgaaggccccattcacagctcaaatgtgatgctctactcaaaggaaaagaatgtggcgagtagggttggacacaaattccttgaggatggaacgaaggttcggtacctggtcaagactggtgaaataattgacagtgctgagaattgggtcaaggtgttcaaggaaggaagttcggagtgatcatggtagcatgggagtcctgcacattttctgaactgcactttttgtatgcccaaatgagttgatgcttttctagattcagatttcagagtcttgtaaatttctatacagttgccaacatttttttgtatccaatgacatgcttggcttgttaaccagctactagaatggttcagctacattcgctcatacaaatgattttgtaatgttgttgctgtcccc

SEQ ID NO: 2099 - DNA, 1093 bp, Oryza sativa
  ref <308>: DATABASE ACCESSION NUMBER: AK104188
  ref <309>: DATABASE ENTRY DATE: 2002-08-28
atccccaaatccccaattcttccccgacctctcgctcgcggaggaggagcgagaatccccgaaccctaggcccgatctcccgcacccgccgcgggcgatggacggaggcggagaccccgttgacgagttcctcatcggcggcggcggcgaggacggcgacctcggcgtcttctgcgacggtgtgccgacgctgccctgcgatggaggacttgggattgatgatgtcagtggagatacttgttgccttgaccaatctgttttagggaaaagaggtagagatgaatcatcatcatctggtccaaagtccaaagcttgccgtgagaaaattcggagggatagactgaatgacaggttccttgagttatcttccgttatcaatcctgacaagcaagctaagttggataaagcaaatatcttgagtgatgcagctcgtctgttggcagaactcagaggcgaggcagaaaagcttaaagaatctaatgagaagctacgagaaacaatcaaggaccttaaggtggagaagaatgaactccgtgatgagaaagttactctgaaggcagagaaggagaggctggaacagcaagttaaagcattgagtgttgctcctacaggatttgttcctcatctccctcatccagctgcattccatcccgctgcattccctccatttataccaccttatcaagctctgggcaacaaaaatgctcctacgcccgcagcattccaagggatggcaatgtggcagtggttgcctccaactgctgtggacacaactcaagatccaaagctttggccaccaaatgcttaattaggtgcagactagctatgctgctattcatccattggcagatcaaaatgtgttcggtcttcctggagagtaaaatagtccgcgatgctgtccattacgtggtaaactgttcttttattggagttctgtttttaactcgtcctattgaggggcgatgcctgtaattaatctggatcgtaaccctcttgcctggtgaatgctccacaaactctcatgtccctcgcatgagtttgttcaagtgtggaagttgtgactgtgctattattttagcattggcttggcagt

SEQ ID NO: 2100 - DNA, 1059 bp, Oryza sativa
  ref <308>: DATABASE ACCESSION NUMBER: AK060025
  ref <309>: DATABASE ENTRY DATE: 2001-12-06
aacagcttgattgaccatggccgccgccgccccctcgcgagtctccgtcagggccgcggcgcccgggcaaacggggggcttcgccaagatccggccgcaggtggtggtggcagcggcggcgaggtcggccggggtgagcggccgcagggcgaggagcgttcgggcgtcgctgttctcgccgaagccggcgacgcccaaggacgcgaggccagccaaggtgcaggagatgttcgtgtacgagatcaacgagcgcgaccgcgagagccccgcctacctccgcctcagcgccaagcagacggagaacgccctcggcgatctcgtccccttcaccaacaagctgtacagcggaagcctggacaagcggctggggatctcggcggggatctgcatcctgatccagcacgtgccggagcgcaacggcgaccgctacgaggccatctacagcttctacttcggcgactacggccacatctccgtgcagggcccgtacctgacctacgaggagtcctacctcgccgttaccggcggctccggcgtcttcgaaggcgcctacggccaggtcaagctcaaccagatcgtcttccccttcaagatcttctacaccttctacctcaagggcatccccgacctgccgcgggagctgctctgcacgcccgtcccgccgtccccgaccgtcgagccaacgccagccgccaaggccaccgagccccacgcctgcctcaacaacttcaccaactagctcaacccgcgctgtacatcacttccaagttccaattgctactgttactactctgccaataattgatggagatgcagatcgagctgcctgattagtttagtgttaattgcggcatgtgcggtgtgtatcgtatcactgataaggaagaggaatcgaggacaagatatttgtttcctccctgcgatgagccgatgaactgatccgaacaagaagaggcttcttggtagtaggtggattggaatatcgaaatgatatgattgtgatccgcaactacaacgaccgccactacggagagctcatgctatttgtttgtttgtttt

SEQ ID NO: 2101 - DNA, 1043 bp, Oryza sativa
  ref <308>: DATABASE ACCESSION NUMBER: AK060026
  ref <309>: DATABASE ENTRY DATE: 2001-12-06
attttgcctccccaaccaagcacaaacacaagcctcgccgtattctctcggagcaaagcgaacgcgaaaccccacccgcggcggcgagaaatccggcgacgatgagccgcggcacgggcgccggctacgaccgccacatcaccatcttctccccggagggccgcctctaccaagtcgagtacgcgttcaaggcggtgaagtcggcgggggtgacgtcgatcggcgtccgcggcaaggactccgtctgcgtcgtcacacagaagaaagtgccggacaagttgctggaccatacgagcgtcacgcacttgttcccgatcaccaagtacatcggtctgctcgccactggcctcacagctgatgcaaggtccttagtctaccaagcaaggaatgaggcagctgaattccgtttcaaatggggctacgagatgcccgtagacgtattagcaaaatggatagcagacaaagcacaagtctacacgcagcatgcctacatgaggccccttggagtagttgctatggtcttgggctatgacgaagagaaaaacgctcaactattcaaatgtgacccggcaggtcacttctttggacataaggcaactagcgccggtcttaaggagcaggaagcaataaattttctggagaagaaaatgaaggatgacccacagttctcctacgaggaaactgtccagattgcaatttctgcattgcaatcagttcttcaggaagatttcaaggccaccgagattgaggtcggtgttgtgaggaaagatgatcgtgttttcagagcactcacgacagaggagatcgatcagcacctaacagccataagtgagcgcgactgagctacaatgaagttggacatgttactgcttcacactgcactctagtctttcagcagtgtcattttatttcatgttcagccaagaaacattcagtgaaccatttcatgtaactccaaaaaacagtcatcagctttacttgttggatcatcctctatcgttgtggttgaatttactacgatttacttgtatgctgcttgcatt

SEQ ID NO: 2102 - DNA, 1259 bp, Oryza sativa
  ref <308>: DATABASE ACCESSION NUMBER: AK104189
  ref <309>: DATABASE ENTRY DATE: 2002-08-28
acacacgctcgattgcatatttgcattagctctagttgtcttgctaccgatcgatcgaattcatcaatggcatccggtggcgaccagacgacgacgaagagcaggatcctggtggtcggcggcacggggtacatcggccggcatgtcgttgccgcgagcgcgcggctgggtcatcccaccaccgccctcgtcagggacctcgccccctccgaccccgccaaggcgcagctgctccacaccttccgcgacgccggcgtcaccctcctccacggcgacctccacgaccacgccagcctgctgcgcgccgtccgcgacgccgacgtcgtcatctccgcggtgcgcgcgacccaggtccccgaccagaccaggctcatcgacgccatcaaggaggccggcggcggccgcgtccggaggttcatcccctccgagttcggcatggacccggggcgcggcgccagcgcggcggtggagccggtcaggtccatgtacggcagcaaggtgggcatccggcgcgccgtggaggcggcgggcatcccgcacacgtacgtggcgtgcaactacttcgccggattcgcgctgccgtcgatcgggcagttcatgccaaaggcggcacccgtggatagcgtggtgatcctcggggaggggcacaccaaggtggtgttcgtggaggagggggacatcggcacgtacacggtgctggcggcggtggatccccgggcggagaacaagacgctgcacatacggccgccggcgaacaccatgtcgcacgacgagctggtgagcatgtgggagaagaagacggggaagaagctggagagagtgtacgtgcccgaggacgccgtgctcaccaaaatcaaagagttagagtacccgaagaacgttttggtgtcgatcgcgcacgcggcctactgtagaggggagatgagctcgccgctggatgatccgcaggacgtggaggccactcagctctacccggaaatccaatatacaaccgttgacgaatatctcaacaccctcctctaattcatttcgtcatgcatcatatcaccctaaatatgcatgcgccaataaaaacaagtcttgattttattttgttcattgctccatcttcagtcagtgtccactggtttgtctgtcatgcatggatcatttttactcttcaattcagttctgcatttcagttgagctgttcagctgagtgccttgatttgtaccacctatctgccttgttacaaatttatgtcaaagtcttcttgctc

SEQ ID NO: 2103 - DNA, 1006 bp, Oryza sativa
  ref <308>: DATABASE ACCESSION NUMBER: AK104190
  ref <309>: DATABASE ENTRY DATE: 2002-08-28
aagcttcttctcttcctctccaaatttccaacctctccatccatccatcccgcatccgattcttccaaccaatctcatcttcttcctcctcctcggcggctcgccgattccccgacggcgatgaagatcacggcgctgctggtgctcaaatcccccggcgacggcgactcgtcgtcgggtggcggtggcggcgagcaggagcaggagcagcaggcggcggtggtggtggcgaacgcgaccgacgtgagccacttcggctacttccagcgcaaccccgcccgcgagttcatcctcttcgtcgcccgcaccgtcgccgcccgcacccccgccggccgccgccagtctgtccagcacgaagagtacaaggtgcattgctacaaccagaatggcctctgcgccatcgccttcaccgacgaccactaccccgtcaggagcgccttctccctcctcaacacggtgctggaagagtaccacaagacttttggggagagatggaggacagcaaaaactgataacacccagccttggcaatacctggatgatgccttgacaaaataccaggatcctgcagaggctgacaagttgctgaaaattcagagggatttggatgaaactaagattattcttcacaagaccatcgatagtgtactttctagaggtgaaagattggatagcctagtggagaagagttcagatctaagtgctgcttcacagatgttctacaagcaggccaagaaaaccaactcttgttgtacaatcctgtaatagaaactctggtatagagttctgcagtagcacactatgttggcattttctttgctgcaagtctgcgattaatgtcatagcatcctggtgtccgaggtgttaaacaaagttagcggttaacatatgccacagggctaccctacgtaattttttgtaagtaacacaagtgtggttgccattgagatgatctgtgcctggtactgtgtcaaagctataattagtgatgaaattgtgtactgtc

SEQ ID NO: 2104 - DNA, 910 bp, Oryza sativa
  ref <308>: DATABASE ACCESSION NUMBER: AK104191
  ref <309>: DATABASE ENTRY DATE: 2002-08-28
ctcgaggtgaaggagcgcactgcgaagcgaacccttctccgccgcctccgctcttcgctgcacggtgctagctcgccgccgtccgtctcgcgcgcctcaagggttatcacaagatgtatacagcaaggaggaagatccagaaggacaagggtctggagccaactgagtttgaggacactgttgctcaggcattttttgaccttgagaatgggaatcaggagctgaagagtgacttgaaggacctttacatcaatggagcagttcagatggatttacctggcaacaggaaggctgttattatttatgttccatacaggctgcggaaggcatataagaagatccatgtgaggcttgttagggaacttgagaagaaattcagtgggaaggatgtggttctggttgcaactagaagaatagtgaggcccccaaagaaaggctcagctgttgttcgccctcgtacccgcacacttactgctgttcatgatggcatcttggaggatgttgtgtatccagcagagattgttgggaagcgtgtcagataccacttggatggtagaaaaatcatgaagatcttcctggacccaaaggagcgcaacaacaccgagtacaagctcgacactttcagctctgtctacaggaggctctgtgggaaggacgtcgtgttcgactaccccatgaccgagactgcgtaaaccatgtcatagttagtcgacggctatctttggccgcaaatgctgctactcttcctaaaatagactataactgtggtttcctatatgcgaaaagttttgacagtcctgtgatctgcatatctgattgctagaactggtttaaattgttcaggtgttttccaactgcagttgtagaacttgttgctttgttcaatggtagtattttcaacgtgcaaaat

SEQ ID NO: 2105 - DNA, 1047 bp, Oryza sativa
  ref <308>: DATABASE ACCESSION NUMBER: AK060027
  ref <309>: DATABASE ENTRY DATE: 2001-12-06
atcccccacaacttccgaatccgatcggcggtcgcggcggcggcggcggcgtcggcgacggcgacggcggggagcttcttcccgatcccctcctgatcgcccgcaggatcgatcgagctctccccccctctcactcacctcggggggcgcggcggtggggggctagggatttgagccggatcgcggcgagcttgaaggggcgcggactgaggcggcgagaggagcgggtttccggttcgggggaaggaggggaggagtagtaggaggaggaggaggagatggtgctggtgctcgcgctcggggatctgcacgtgccgcaccgggcggccgacctgccggccaagttcaagtccatgctcgtcccgggcaagatccagcacatcatctgcacggggaacctctgcatcaaggaagttcatgactacctgaaaagcctttgtcctgatctccatataaccagaggtgaatatgatgaggatgctcgttacccagagactaagacacttactattggtcagttcaagctagggctgtgccatggtcatcaggttgttccatggggcgatttggactccctggcgatgctccaacggcagctggacgtggacatcctcgtcacagggcacacccaccagttcaaggcgtacaagcacgaggggggagtggtcatcaaccccggctccgccacgggcgcctacagcagcatcacctacgacgtgaacccgagcttcgtgctcatggacatcgacggcctccgcgtggtcgtctacgtgtacgagctgatcgacggcgaggtcaaggtcgacaagatcgacttcaagaagacggcgacgatgcacgcctgaccaaaaaacacatcagaaaacccttccccgtcctgcccagccctgcccttgtttttagttaccctttacccttcttgcttgattcagagatcatcccattttctcaagcttccttttcttcctcgctctcgtccttgtgcaaaagcttgagccgtgtattcagattagttaataataaaagatcgtcaagagttgtcatggt

SEQ ID NO: 2106 - DNA, 923 bp, Oryza sativa
  ref <308>: DATABASE ACCESSION NUMBER: AK104192
  ref <309>: DATABASE ENTRY DATE: 2002-08-28
agagtggggagaaagccggcgagggaagccgaagcatcgccgccttccgccagcgccccaccggcggccggcatggacgaggagacgcagaagaaggtggagtccacggttctggagatcctccggggctccgacatggagtccctcacggagttcaaggtccgcaccgccgccgccgaccgcctcggcatcgacctctccatccccgaccgcaagcgcttcgtccgccgcgtcgtcgaggggtacctcgaatccctctcccaggaggatgagcaggagcagcagcaggagcaggccggcggcgccggcgaggaggggaaggacgaacaggccgaggaggaagaggaagaggaggaggaggaggaggaggagcggggaggtggaacgaagagggagtacgatgacgagggagacctcatcctctgccgcctttcggccaggaggagggtgactcttcaggagttcaagggcaagacgcttctgtccatccgagagtactacttcaaggacggcaaggagctgcccgccaaagggataagtttgacagttgagcagtgggaagcatttcgtgattctgtgccagcaatagaggatgccattaaaaagcttggagaatcatcggactgaaagcatgtttcagaagccccttttgcctgtatcaaatcaagaaggcctttgttctggccctttacttagggccagtacaggctgtaagtccgctatggagggtctggaggtactagggttcctataaacttttgtaaaacttatcccttagtcaagctgcatgatgctgtgtagggtagacggttggagacttggagaagtaatttcttcatatgctcgtcttaatattggagttagtgatgtacactgacatgcatctggctactttagaaaaatcagacatgggttccagcaac

SEQ ID NO: 2107 - DNA, 1281 bp, Oryza sativa
  ref <308>: DATABASE ACCESSION NUMBER: AK104193
  ref <309>: DATABASE ENTRY DATE: 2002-08-28
atcacaaccaaaagcgttcatcaagaagtcaagcagagcaaagttcagaagcaagcaagagagaggcagaagcgttgagaaaggccgaggcgagatggtcaaccaagccgcgatgccgctgctgacaccgtacaagcaggctggcggcaagatcgatctctcccaccgggtggtgctctcgccgatgacgcggtgccgatcctacggcaacgtgccgcagccgcacgcggcgctgtactacacgcagcgcgccaccagcggcggcctcctcatcacggaggccaccggcgtctccgacaccgcgcagggctacccggagacacccggcgtctggacgcgggagcacgtcgaggcgtggaagcccatcgtcgacgccgtccaccgcaagggcgccctcttcatctgccagctctggcacgtcgggagagtctccaccaacgactaccagccaaatgggcaggcaccgatctcaagctccgacatacagatcacaccggacggttcagggatcgtgtactccaagcctcgccggctgcgggtcgacgagatccctcagatcgtcgacgacttcaggctcgccgcgcggaacgccatcgaggccgggttcgacggcgtggagatccacggcgccaacggctacctcctcgagcagttcatgaaggacagctccaacgaccgcaccgacgagtacggcggcagcctcgagaaccggtgccgcttcgccgtcgaggtgatcgacgccgtcgtcggcgagatcggcgcccaccgcgtcggcatcaggctgtcgccgttcctggacttcatggactgcgtcgactccgacccggaggctctcggctcgtacatggtggagcagctcaacaagcacgagggtttcctctactgccacatggtggagcctcgcatggccatcgtcgacggccgccggcagattcagcacggcctgctgccattcaggaaagctttcaagggcacgttcatcgccgccggtgggtatgaccgggaggaaggcaacaaggtgatcgaaaatggctacactgatcttgtctcctttggaaggcttttcttggcgaaccctgacttgcctaagaggttcgagcttgatgcgccattgaacaagtatgatcgcaacaccttctacactcaagacccaattgttggatacacggactaccctttcctcgatgaggatcagaacaactcggttgctgatgcttagattttgtgctattttagttgttggttctatatatccacaataataatgtgcacgattcatgt

SEQ ID NO: 2108 - DNA, 1147 bp, Oryza sativa
  ref <308>: DATABASE ACCESSION NUMBER: AK060028
  ref <309>: DATABASE ENTRY DATE: 2001-12-06
catcgtgcaggaggaggtcagcaaggcggtgtccgggaaccccggcatggccgccggcctcgtccgtctccacttccacgactgcttcgtcagggggtgcgacgcgtcggtgctgctggactcgacgcaggggaacagggcggagaaggacgcgcccccgaacacgagcctccgcggcttcgaggtcatcgacagcgccaagtcccgcctcgagacggcctgcttcggcgtcgtctcctgcgccgacgtcctcgccttcgccgcccgggacgccctcgcgctggtgggagggaacgcgtaccaggtgccgggggggaggagagacggcaacgtgtcggtggcgcaggagacgaacgggaacctgccgccgccgtcggcgaacgtggcgcagctgaaccagatgttcggcgccaaggggctcacccaggcggaaatggtggcactgtcgggcgcgcacaccatcggcgtgtcgcactgcagctccttcagcaaccgcctctactcgtcgggccccaacgccgggcaggaccccagcatggaccccagctacgtcgccgcgctgacgacgcagtgcccgcagcagcaggggcagcccgcggcggggatggtgcccatggacgccgtcacgcccaacgcctttgacaccaactactacgccgccattgtcgctaaccggggattgctcagctccgaccaggcgctcctcgccgaccagaccaccgccgcgcaggtcgtcggctacaccaacaacccggactcgttccagaccgacttcgccgccgccatggtcaagatgggctccatcggcgtgctcaccggcaacgccggcaccatcaggacaaactgcagggtggccagctgatcgatcgacctaagcatgatgtatagctcgtggcaggcttgtgtgagttgggattgtgatgagattaaattgaaaattgtacgtacgacgacgtagctagctagatagagtgttgtaaacttatttgtttgatcattcatttggtctctctgtattacgtgctagctagctcaattagcttgctcgtgcgtcccttctcccctcttcccgtagattattttactctgcactctgtacttctctgtgacattatagtgacaatatagttttattgttccatctttt

SEQ ID NO: 2109 - DNA, 1382 bp, Oryza sativa
  ref <308>: DATABASE ACCESSION NUMBER: AK060029
  ref <309>: DATABASE ENTRY DATE: 2001-12-06
aggtgctagctagctgaggcatggagcttgacgaggagtccttcttggatgagctcatgtcgctgcggcgtgatggatcggcgccgtggcaggcgccgccgtacccgggtggcggcggcggcggcggcggtggcggcatgatgatgagtgacctcctcttctacggcggcgacggcggcagcgcggaggcgaggggcgggatggacgcgtcgccgttccaggagctggcgtccatggcggcgccgccgcctcagcatccgcacgaggagttcaacttcgactgcttgagcgaggtctgcaacccgtaccgcagctgcggcgcccagctcgtcccctcggaggcggctagccagacgcagacgcagctcactcctctccgcgacgcaatggtggcggaggaggagacgagcggcgacaaggcgctgctccatggcggcggcggctcgtcgtcgccgacgttcatgtttggaggtggcgccggagagagctcggagatgatggccggcatcagaggcgtcggcggcggcgtccacccgcggagcaagctccacggcacgccgtcgaagaacctcatggccgagaggcggcgtcgcaagcggctcaacgaccggctgtccatgctccggtccatcgtgcccaagattagcaagatggacaggacctcgatccttggtgacaccatcgactacgtgaaggagctgacggagaggatcaaaaccctcgaggaggagatcggcgtcacgccggaggagctcgacctgttgaacacgatgaaggattcctccagcggcaacaacaacgagatgctcgtgaggaattccaccaagttcgatgtcgagaaccggggcagcgggaacacgaggatcgagatatgctgcccggcgaaccccggcgtgctgctgtcgacggtgagcgcgctggaggtgctggggctagagatcgagcagtgcgtcgtgagctgcttcagtgactttggcatgcaggcctcctgcttacaagaggacgggaagaggcaagttgtcagcaccgacgagatcaagcagacattgttcaggagcgcaggctatggcggaaggtgtctgtagctagctagctatacaatccattgaacgctgagcactgtgagcaggtacaggttgcatatatatgatcttcatcatccatgatataggagtaatagctatacatgcatatgcacttcgctccaggaattatagtagatcgagtaccatttatgagttcatattcatcagcagtggtagtacctcgtttctgaacacaccagagagcaaattaaagatttgctcaagtattgtaagctttgcatttgtgaatcggtatgggaaccggccgtgtgatttgtcgaacattggatttgaatt

SEQ ID NO: 2110 - DNA, 1046 bp, Oryza sativa
  ref <308>: DATABASE ACCESSION NUMBER: AK104194
  ref <309>: DATABASE ENTRY DATE: 2002-08-28
actgaaccaagaaggacactaaagcagtagtctagtctcccggccaagcaagaaccaaaaagcaattaagatcgaactcgagcaaacatgtcgtcgactaacaacagttcaggcgagccgccgccggcggtgcgcgtgctgggcggttgggcgagccccttcacgaaccgcgtggtggtggcgctgaagctgaagggcgtggagcacgagatgttgcaggagacggtggggaagaagagcgagctgctgctccggtccaacccggtgcacaagaagttccccgtgctgctccaccacagcaagcccctccccgagtctctcgtcatcgtcgagtacatcgacgaggtctggccggcctccaatggcggcgccccggccattctccctcgcgacccccacggccgcgccgtcgagcggttctgggcacggtacgtcgatgacaagattctaccagggcttcgggttttgagaggatcggtggccggagacaaggaccaaaccgcaggtgaaatgtccacgactctacagcgtctggaggaagcatttgtcaagtgcagccaagggaaggaatacttcggcggcgacagcatcggctacctggatatcgctctgggttcgttcctcggatggatcaaggcggtggagaagatcgccggcgtcgagctcctcaacgaaaccaagcttccgatcctggctgtttgggcggatcgcttctgcgcgcacccagccgtggtggacgtcgtgcctgacgctgataaattggttgagttcaccgttcaatatggttctgtgctgaatactgtgaatgttcttcccaagtgatggatggtatgctgctttgtgcctgacgataaattggtttgagttcaccgtgcaacgtgcttcgtgttgccatttagtatggtcactagtgaaagatgatggtcatttacgttgttttgtttcgtttcttcggaactgtagtttccctttccgtctgagtctgtaattttgcttgtaagacttctctctgagtcttttattactacttctctcagtcttttatt

SEQ ID NO: 2111 - DNA, 973 bp, Oryza sativa
  ref <308>: DATABASE ACCESSION NUMBER: AK060030
  ref <309>: DATABASE ENTRY DATE: 2001-12-06
aacgagaggagaagcgcaaggaggataggcggcggcggcgactgggcgaaagtgatcagagctcgcgaggatgaaggcgacggtgaagggcaggtacgagggcgacaaggccacggccgccgccaccctcgccttcaccccctccgccaccgacctccgcttcaaggcctccgccaccgatgccgccttcgcccgcgggccctccctcgagggcctcatcctcaccctcgagaagcccggctccttcctcctcgacctcaagccccactccaaggatgtgcgcttccaattcatgaactccgcgctgctgctcgaccgccgcgtcagcctcacctacacgcactccaccaccctctccccgggccccgccaagctgcccgcccgcaccgccctcgacggctccctcaccttcgatccggccaacaagctcagcctctcccacacgctcggctcctccggatgccgcgtcaagtactcctacgcgcacggccaagaccgcctcaccaccatcgagccctgcttcgacaccgctaacaacgcctgggacttcgccgtcacccgcaagtttcaaggaggggatgccatcaaggccacctaccaagcctccaccaagctcctcgccctcgactggaccagggactccaagatcggtgcctccttcaaggtcgcagcgtcatttgatctgtctgaccaaagcaaagcgccaaagctaatagcggagagcacgtggaattacgagatctgattgcctcttctaggaggcaggcaactcctgcttaagaagcacccttgtcatactggttgtcttgtacttgggaactattctttctgggtgcaacaatttcaatacctactgccctttgttcatttttggctgccctatgattggagttgtcatggcgatgctacggcattgacaatgaacaccgattatcttttactatattctctaatgcacatgatatgattgaac

SEQ ID NO: 2112 - DNA, 1033 bp, Oryza sativa
  ref <308>: DATABASE ACCESSION NUMBER: AK104195
  ref <309>: DATABASE ENTRY DATE: 2002-08-28
gaaagggtctcctcctcaacatcaacaatggcggtcgcaacctccttcgccacactcgccatcgcgcggccggcggcggagcgggccctcctcgcctccaaaaccccctcgccgctcctctccatccgcaccggcaccggcaccgcacgcctcccctcatcggccgtctttggaggtttcactcctgcgctttccgctgctcacagccgcgcgcgcttcgtctcctccgccaccgctgaccccaaggaagtggacctccagtccaaaatcacaaacaaggtgtactttgacataagcatcggaaaccctgttgggaagaacgttgggagggtcgttattggcctatacggggatgatgttccccagaccgcagagaacttccgtgctctttgcactggagaaaaagggtttggttacaaggggtccagtttccaccgtgtcattaaggacttcatgattcagggaggagactttgacaagggcaacggtactggagggaaaagcatatatggccggaccttcaaagacgagaacttcaaattggttcatactggacctggagtggtcagcatggccaatgctgggccaaacaccaatggcagccagttcttcatctgcactgtcaagacaccttggttggatgggaggcacgtcgtgtttgggcaggttattgaaggcatggacatcgttaagatgatcgaatcgcaggagactgacagaggggaccgcccgaagaagaaggtggtcatcagtgagtgtggggagcttccagtggtctaataggtgccagagggctaatcttcttcccccggagactttgctgtttttggtttcatagtaagctgtgaacttatcgcatgttctccgcgcagtcagagatcatgctgagttgaggccaagatttctaagttgagaagaatcctctattgttcggctggaataaaacgttcttacctgtcgagggtcaggaaataatgttgtggttcatgaaagatcaaatgtctgtcttttcgtgcatacgcagactaaagtt

SEQ ID NO: 2113 - DNA, 1411 bp, Oryza sativa
  ref <308>: DATABASE ACCESSION NUMBER: AK060031
  ref <309>: DATABASE ENTRY DATE: 2001-12-06
gtccgcctccggtctaatccgattcaaacccgccgtttccaagcttgctctcctctcccccccaatccttccctcccgagtggcagggtgctcgacgggatggcgcagaaggaggccaatggcagcagcaacggggagcacaccacccgcccgccgccgacgccctcgccgctccggttctccaagttcttccaggcgaacctgaggatcctcgtcaccggcggagctggcttcatcggctcgcacctcgtcgacaagctcatggagaacgagaagcacgaggtcattgtcgcagacaactttttcactggttcaaaagacaacctgaagaagtggatcggacacccaagatttgagctaatccgtcatgatgtcacccagcccctgcttgtggaggttgaccaaatctatcaccttgcttgccctgcttcaccaatcttctacaagcacaaccctgtcaagaccatcaagacaaacgttatcggaaccctgaacatgcttggacttgccaagagagttggagctaggattttgttgacttcgacctctgaagtttacggtgatccgcttgagcaccctcaaacagaggcctactggggaaatgttaacccaattggagtcaggagttgctatgacgagggtaagcgtgtcgcagaaacactgatgtttgactatcacaggcagcatggcattgagatccgaattgccaggattttcaacacctatggacctaggatgaacattgatgatgggcgtgttgttagtaacttcattgctcaggccgtacgtggcgagcccctgactgttcagaagccaggaacacaaactaggagcttctgctatgttgctgacatggttaatggtcttattaagctgatgaacggggacaacactggaccaattaatttgggaaacccaggtgaattcaccatgctggaacttgctgagaatgtgaaggagttgatcaacccagaggttaccgtcacaatgactgagaacactcctgatgatcctcgtcagaggaagccagacattacaaaggcaaaggaagttttggggtgggagcccaagatcgttctgcgtgatggcttggtgctcatggaagatgatttccgggagcgcctccaagtgcccaagaagaaccaggcctaagctgctgcatcgcatttggcgaaagatgtcactggagcatacttaatagttgggtttcaccattatttgtgtcgcagttcattgtggaatttgggttccaataaattctgatacacctttgttgttcacctgaaatattgtgttactagaatcgtcatacggggctgggctatttgtatcattaccgcttttggagaactctttatacttttgtttgtagcctgtgtactcgcctaaatcaattatagcaatgttgatg

SEQ ID NO: 2114 - DNA, 993 bp, Oryza sativa
  ref <308>: DATABASE ACCESSION NUMBER: AK104196
  ref <309>: DATABASE ENTRY DATE: 2002-08-28
gctagttcccgctgatcgatcttttttcgggagggcgttgcttgctcggatcggcggccatggctgagcccgctggggaggcggccccgcaggcggacggcgtctcggaggaggcggcggcgaggccgagggggtttaggcttcttgggggggacaagtccgtgcaccaggctctcggcggtggtaaagctgctgatgtacttttgtggaaagacaagaagatctctgctgcagtgataggtggcgcaactgtgttgtgggttctctttgaagttgttgattaccatttcctcactctgatatctcatgtcctgatcggtgtactggccatcttgttcttatggtccaaggcaaccatcttcatcaagaagagtccacctaatattccagaagtgaagatatctgaagatcttgctgtgaatgttgcactagcactgcgcactgacatcaaccaagcacttcacttgcttcgggagatttctctagggcatgacctgatgaagtttttaggcgtgatcgttgctctctggattctttctgaaattggaagcctctgtgatttcctgaccctgttttacgttgctgtcttgatgctccatacagtgccgatcttgtatcacaagtatcaggacaaggttgatcattttgctgggaaggcgcatgtggaactcagcaggcagtactctgttctcgacgcaaaggttctcagcaagatacctaggggtccagcaaaagataagaagcagaactagaaatgaaacaccatatcacgctggaacctgacttgggagtgttggcatctcacatcacaacatatgcatgaatcttgagtccttgacttggtttggcccttgttggtgcttggtacatatatgacctgtctgtagatttgtgtgttgggagtgtcttgtgtagtaaactgtcgatatgatgtggttggtgtgcaactctgcaatgttaatatacaagatcttgctgcaagcctgcaaccat

SEQ ID NO: 2115 - DNA, 977 bp, Oryza sativa
  ref <308>: DATABASE ACCESSION NUMBER: AK060032
  ref <309>: DATABASE ENTRY DATE: 2001-12-06
cagagaattggttgggatgctaaaagcggtgagggtcacttggatgcattattgagaggtacacttttaactgctctggcagaacttggccatgaagctacaataaatgaagctgtacgccgatttaacatctttgtggaagatagagaaacaccactactccctccagatgttcgaaaggcggcatatgttgctttgatgcagacagtgaacaaatcaaacagagccggctatgaatcactattgaagatctataaagaaactgatctgagccaggaaaaagtcagaattttaggttctctagcatcttgccctgatcctgatgttgttcgtgatacactggacttcatgctgtcacctgaggtgaggaatcaggactctatatttttgcttagaggagtcggtgcagcgggacatgaggtggcatggacatggttgaaggaaaagtgggactacatttcagacaccttctctggaactcttctcacctatttcgtttccaccaccgtctcaccgctgcgcaccgatgaaatgggcgacgacgcggaggagttcttcaagagcaggacgaaggccaacatcgcgaggacggtgaagcagagcatcgagagagtgaggatcaatgccaaatgggtggagagcaccagggccgaggctaacctgggcaatgtcctcaaggaaatttctcacgaccactgagacgaccgatcttttcctgcgccgttgtcttagcgtgtaagatgcgtactctccagcaacaagttagtaataagaacttggtgggttagacgacctgttgcatgcccctgatacttgcatctatggaccagtttctccaggttatgtcagtttgatagatgcaattgcaatttgcatggagtatttgatagggacatccggacatgaattgcatgcaaatgttgccctggcagttcaacattgccagaatctgggaaattaatgagcatctttcgtac

SEQ ID NO: 2116 - DNA, 1134 bp, Oryza sativa
  ref <308>: DATABASE ACCESSION NUMBER: AK060033
  ref <309>: DATABASE ENTRY DATE: 2001-12-06
aactcgagcaacaaggtcgtagccatgacgaacgggtacctgttccgggagtacatcggcgcgcagttcaccggagtccgcttctccgacgtgcccatcaacccaaacctcagcttcaacttcatcctctccttcgccatcgactacacgagcccggccggcggcgccacgccggcgccgaccaacggcgtgttctcgccgtactgggacacggccaacctgtccccggccgacgtcgccgccgtcaaggcggcgcaccccaacgtcagcgtcatggtcggcctcggcggcgacagcgtgcaggacaccgccaaggtcttcttctccccgacctccgtcgactcgtgggtggccaacgccgtcgcctccgtctccggcatcatcgacgcctacggcctcgacggcgtcgacgtcgactacgagcacttcaacgacgacggcggcgccggcgtcgacacgttcgtggagtgcatcggccgcctcctcaccgagctcaaggcgcggcacccgaacatcaccacctccatcgcgccgttcgaggacgccgtggtgcagcgctactaccagccgctgtggcggcgctacgccggcgtgatcgacctcgtcaacttccagttctacggctacggcgacaacaccgacgtgccgacgtacgtgatgttctacgacgagcaggcggcgaactacccgggcggcaaggtgctcgccagcttcaagaccggcgacgtcgccgggctgctctggccggagcaggggatcgccggagcgaaggagttgcagcggcaggggaagctgccgggattgttcatctggtcggcggacagctcaaaggtcagcagctatggctttgagtacgagatcaaggctcaggagatcatcgccaaccactgatcgctgatcggacggtcgagatatcgctgtggttggatttggtatgaatgaatgactgaataagcggatatatttgcccagtacagttctgggcacgcatggtgttctaatacttattgcgtatatatgcagtgagatggatattatatatatctacagaatataaataagtttcttcaacatatatgctatttctccaatctatgaattagtgacagacatatatctgtttcgagttcactt

SEQ ID NO: 2117 - DNA, 1375 bp, Oryza sativa
  ref <308>: DATABASE ACCESSION NUMBER: AK060034
  ref <309>: DATABASE ENTRY DATE: 2001-12-06
acagggcacgataccgccgtccgttcgcggcgcgacccttcgccgccgcgccgccgcgccggcgctatgcagcgcctccaaaagcagctccttcccgccctgcgcgccgccttccctctccttgcctcccacttcagcagccgccttctctccgcctccaccgccaccttatcccccacccgcttcgtcgacgaggacgccctcgtcgccgcctgcggcctcaccggagccgaagccctcaaggcctcgaagcgtctacagaaggtaccctcaaatctagacgccgccctcaccttcctcgcctttctcgccgacttccgcctctccaaagacgacatcgccgccgcaagctcacggtacccgcggttcctccatctcaaggtggacgaaaccctaacctcccaagtagcccggctccgggatatcggcctatccactcccgagattggccgcctcattaccatcgccccctgcatcctctccaatcctcgcacgatctcccgccttgaattctacctctcctttttgggctcctaccccagggtgcactccgcccttcggaacaattcctcccttctacggcgaaacaacatcgagagtgaggtcaagcccaacattgcattcctggagcagtgcggcctaactacttgtgatattgccaagatcctcatgtctggctctaggatactcattatgcagccagagcatgtcaaggaaattgtggcgtgtgcagacaagttcggtatgccccgtgagtcagctggtttcaggtatgccctgatggctgttaccggcatcagcccagtgagggtcagcgcaaaacttgatttcttgaggatggttattggatgctcagatgcccagctacacattgcggtgtctaggtttccactaatcctgacatactcagaagttaagctgagccgctcactggaattcctgaaagcggaggttgggttggagcctcagtacattgtgctccggccagcattgctcggctatagcattcagaaacggctgatgccgcgttatcatgtcatgaaggttctgaatgaaaagggcctgctgaagaaagacactgatttttactctatggttaaaatagttgaagagagcttttttaagaagttccttctcccataccacaggtctgttccaggacttgaaaaagcttatctggctgcccgtgaagggaaaatgtttcctgaaatctaaaacagagatgctggaggtttattctgcctaggaacttgataatgttctgcattttacatcttgctcagttcttagatgatttctagcgatctgtatttgtgatttcatctgtgctttttgagacaaacatctaattttagtgcactcttgttctcatttt

SEQ ID NO: 2118 - DNA, 1257 bp, Oryza sativa
  ref <308>: DATABASE ACCESSION NUMBER: AK104197
  ref <309>: DATABASE ENTRY DATE: 2002-08-28
atcaaaccacacaccagacaatacttactaccactactactgctgctgctgccagttctagctagcctactgctcttctccgagctgaagatttttcgagctagctaggatggcagccagaatgggcagcaaggtcgctgcaatcctcgcgattctgtccgtgctcgtggtgcatggctcttgcaaggggcatcctgtgaactacaacgtctccgacgcctccgcctacggctccggctggctccctgcccgggcaacctggtatggcgctcccaccggcgccggccctgacgacaacggcggcgcttgcgggttcaagaacgtgaaccagtacccattctcgtccatgacctcctgcggcaacgagcccatcttcaaggacggcaagggctgcggctcatgctaccagatcaggtgcaacaaggacccgtcgtgctcgggcaacatcgagacggtgatcatcaccgacatgaactactaccccgtggccaggtaccacttcgacctgagcggcacggcgttcggcgccatggccaagccggggctcaacgacaagctccgccactcgggcatcatcgacatccagttcaggcgcgtcccctgcaactacccgggcctcaagatcaacttccacgtcgaggagggctccaacccggtgtacttcgccgtgctcgtcgagtacgaggacctcgacggcgacgtcgtgcaggtcgacctcatggagtccaagtcggcgtacggcggcgccaccggcgtctggacgccgatgagggagtcgtggggctccatctggcgcctcgactccaaccaccgcctccaggcgcccttctccctccgcatccgcagcgactccggcaagacgctcgtcgccaacaacgtcatcccggcgaactggtcccccaactccaactaccgctccatcgtccagttcagctagatcaatcatccactgctgatcgaatatggaatcatattggctcgcgatcgatcgatcgatcgattagtttattctctactactgctgctgcaaaatttgcgtgggattgaggtgtttttttttattaggcgaggcctcatgtgctgtctggtctagtgtgtgaagtggtgaagtgatgcatgtgtgggaaaatggaggaggggcacagtaatacagtatgtgcatgtgctctcccgcccactgtcactgtactacccagtgctttgtaaccaaatcttaaggctacagaattataaatacaatgcttaagttaattacct

SEQ ID NO: 2119 - DNA, 926 bp, Oryza sativa
  ref <308>: DATABASE ACCESSION NUMBER: AK104198
  ref <309>: DATABASE ENTRY DATE: 2002-08-28
actcgccaccacctctccagccgaagccgctcaccctcctccgcctccctcctcctctccccgtcgctcgccatggcagccttcgccaccgcgaccccctcgccggcgatctccgtgtccccctggagcatgtcgtcgctccgcgccgcgctcccctcccccacccgcgcctccccggcggggaagctccggtcgtcgttctcgcccgcggcggcggccacggcggcgtcggtcggctgcctcagctccttctccggcctcacccccatttcgcctctcctctccctcggggaagagacttcaagctttgagcatcgattgtttggtattgatgcccgtggaaggatagtggcaatgagacatgggaggcgtgttcctaaacttagcagacctccagatcagcgaaaggcacttctgcgcgggctgaccacgcagctgctcaagtacggaaggataaagactaccaggccaagagcaaaggcaatgaggaagtatgttgagaagatgatcacactggcaaaggatgggtctcttcacaagaggaggcaggctctggcttttatctatgagaagcatatagtccatgcgttgttcgctgaggttgcagacaggtatggggaaagagaggggggctacacaaggatcatcccaacatttccaagacggggagacaatgcacctatggcttacattgagcttgtctaggaggccgttcatttgagcgcgctgcctaggtggaggggtcaagggaatgcctttttgaatatctgtttacatattttcttttgtaacaaaatgtagatcatgtgtgaagttttgaacagtggaatttctatcctgtaactacgaaagcattgtgctacattttggaagtgttcctggcaccataatctggtgcccttgaagttatggattgttttccagtc

SEQ ID NO: 2120 - DNA, 1060 bp, Oryza sativa
  ref <308>: DATABASE ACCESSION NUMBER: AK104199
  ref <309>: DATABASE ENTRY DATE: 2002-08-28
agcaaccgaaatcccctcctgacctccttcctcctctctccccgattccccccacccacccaccaagcgcgtcggaagcgatggcgtcggcggcggagatgcagccgctggccccggcgggctaccgccgggcgccggagatgaaggagaaggtgggcgcctccgcggtggacctggaggccggcaccggggagacgctgtacccggggatctcgcgcggggagagcgccctccggtgggggttcgtccgcaaggtgtacggcatcctcgccgcgcagctgctcctcaccaccgccgtctccgcgctcaccgtcctccaccccaccctcaacgccacgctctcctcctccccgaccctcgccctcgtgctcgccgtcctccccttcgtcctgatggtcccattgtatcattatcagcacaaacacccacacaactttgtttacctgggtctgttcacgttgtgcttgagtttcagtattggtgtggcatgtgctaacactcaagggaaaattgtgcttgaggcattaatattgacctcagctgtggttgcctctttgactgcgtatactttctgggcttcaaagaaggggaaagaatttggttatcttggaccaattctgttttctgctcttgttttacttgttgtgataagctttattcaggtgttcttcccattgggctctggaccagttgcattgtttggtggccttggagctttagttttctcaggtttcatcatctacgacacagagaacttgataaagcgccacacttatgacgactacatttgggcctctgttgagctctaccttgacatcctcaacttgttcctttatatcctgaacatgatcaggagcatgcaaagtgataactagccagtccatcagcaccaaccagacgtattgtcaacttgctcagtgacgtcagtgtgtcctgctctattaagtactattttgaacagcgatctatataaccgtgaaaacctcgtgatgtattttgctgtcgtctgactcaaaggatgagaccgaagtacaatatatgtatagttttggttgtgttg

SEQ ID NO: 2121 - DNA, 934 bp, Oryza sativa
  ref <308>: DATABASE ACCESSION NUMBER: AK060035
  ref <309>: DATABASE ENTRY DATE: 2001-12-06
ccttgttagctactgctgagtgctcggcgatggcgggcgtcgggtcggcggtgcggcggctctacctctccgtttacaactgggccgtcttcttcggatgggcgcaggtgctgtactacgcggtcacgacgctgctggagagcggccatgaggccgtctacgccgccgtcgagcggccgctgcagttcgcgcagaccgccgccttcttggagattcttcatgggcttgtaggtttggtgaggtctccagtctctgcaactcttccacaaattggatcgaggttgtttcttacctggggcatcctgtggagctttccagagacacattcacatatccttgttacttccttggtcataagctggtccatcactgagatcattagatattccttctttggcatgaaggaggcattcggatttgctccttcctggctcttatggctgaggtatagcacctttatggtattgtatcctactggtatcagcagtgaggtcggtttaatctacattgccttgccttacatgaaggcatcagagaaatactgccttaggatgcccaacaaatggaacttctcctttgatttcttctatgcatccatcctttctctcgccatctacgtgcccggatcgcctcacatgttcacctacatgcttgcccaacggaagaaggcattggcaaaggctaaggctgcataatggtgatgctcaagagctttcttgaatttttcatgtgtggcttaaggatctgcctaaatagctcatatttgctactcttttagtacaagtctgtagatgaggaaatgttggaaagaactactatcttaatcccagcatttgttgtaactgtagtaactgcccatcatttgttgtaactgtagtcttctaccaagaattgtatgatattttacctggttaaattattgaatgattgatcc

SEQ ID NO: 2122 - DNA, 1127 bp, Oryza sativa
  ref <308>: DATABASE ACCESSION NUMBER: AK060036
  ref <309>: DATABASE ENTRY DATE: 2001-12-06
atcgcagcggcgatttctcatctgaattgcaggccaattccagttgagtttctccacagaccacagatatggcttccggcaggatagctctgctctgccttcttggcttgctgctggtagcagcctcaccggctgccattgctgccaaagatgacaaaatcttctaccagattactttcatgtggccgggagcgtactgcgcgcagacgaaggccggatgctgcatgccgaagaccgacgtcgccggcttcacggtctacaacgccaccaccaactcttccctgtccagctgcagcaacactccattcgacatgaaccaaattggggatgtcacgaggctgatgcagtactggaacaacatcaggtgccccagcaagagcggccagaagggctggaagaacgcgtgggagacgtccggcgtctgctccgacctcaccgagagcgcctactttgacaccgccctcgccctccgcgacaagatcaaccccctttctcgcctcgtcagcaacggtattaagccggactttgggctgtacagcgtgaagaagatcaaggaggtgatcgaggaggggatcggcgcgccggcgctgatccagtgcagcaagggcccgttcaacaagttccagctataccagatatacgtctgcgtcgcggaggacgccaagacgttcgtggagtgccccagcccgaggaagccgtacacctgcggcgacgacatcctcttccaccctttcaagaagtggatgctcaagaccaactccaccaaatcctacgccgccgccgacgccatcgaccagctgctcgaagcggtcatggaaatctgagctcgatcgatcgatcgatcaagaagacaaattaacccttgttgtgatatgcgatttgtgcgtgtgtgttgtctgtttcgatcgtgatgttttctgcgtgtttatttcgtgatgttctctcatcgcgcccgcgcgcggttgggtacgatccgggacacctacgtagcactgaatccgtctctgtgatgcattcagagaataagtccgaatatgtgcggccttgttaatgttttcatgaataactcgtgtagtgggattactttgtcatcggacatttcatgatttccgatgcacaccttggct

SEQ ID NO: 2123 - DNA, 987 bp, Oryza sativa
  ref <308>: DATABASE ACCESSION NUMBER: AK060037
  ref <309>: DATABASE ENTRY DATE: 2001-12-06
tctactagatcttagtcagcacttctctagagcaagtacatcaagtcagtcagatctcaattgtgttgagtgcccagaatgccatagagatatctgtatcaactgtggagtgccatggcatgtcatgatgggctgtgatgagtaccagagcttgcctgttgatgaaagagatgcaggagacctgtctttgcatcggctagcacaaaacaataggtggaggcgttgtcagagatgccgacgaatgattgaactcacacaaggctgcttccatatgaattgctggtgcgggcacgagttctgctactcctgtggcgccgagtacaccaatggtatacagacatgccaatgtgttttctgggacgaagagagcatcgaggctgcctcggcagcgcattccacccaagcatccgagatatgggcatgggacacgttcgactgcatgccaaccgccatcgaagggtactcggagcaggagagagctcagctggctctcattcagaggttcctctcagggggtttcaacctgggtgagcctccaagccagtcgccgccccgctgcgccgattcatatatcattgacaccatgaaggaccttcaccagctgccatggctcgagcggttcgtttcggtgatcagtgacagctacaatgaagattacatccagtgaaaacaacatagatagcattaagaaaaaaaagaatggcacatactgatgaatttcatttggaataatatgtttccatgcccctcttgaaaatcaatacaggaaaagtgagatggttctataccttcatgagcttttcctcttgtactcccttttttcctggtttggtgcataagcaaaaggagttgccatcactgattttatttattttttgttaattccctaagcgtgtatatgcttgtttttcttgtgagccacacatgcttgggatggtttcagaacttcttgatgttgaattggataagctacatcagcaattgttc

SEQ ID NO: 2124 - DNA, 1095 bp, Oryza sativa
  ref <308>: DATABASE ACCESSION NUMBER: AK104200
  ref <309>: DATABASE ENTRY DATE: 2002-08-28
atccgccgcaattcaaggtcggaatccatggcgtctcacgaccacgaccacgaccaccaccaccaccacagccacgacgacggcgaccaccaccattcccaccaccaggacggcagccatggcggcggcggcggctcgtgggtcggggaggacgggcgcgtgtggcactcgcacgacggcctcgcgccgcactcccacgagcccatctactcccccggcgacttctccaagcgcgcgccgccgctcatctcgcggcgcttcgcggaacgcgccttcaccgtcggcatcggtggccccgtcggcactgggaaaactgccctgatgctagcactttgcaggtccctgcgtgaaaaatatagtctcgcagcggttacaaatgatatattcacaaaagaggatggagaattcttgatcaaacatggagcactgcctgaagagcgcatccgtgcagtcgaaactggaggctgccctcacgctgcaatacgtgaggacatcagcataaatctaggtcctctggaagaactatcaaacttgtgcaaagctgatttactcctctgtgaatctggaggagataacttggctgccaacttcagcagggaactggcagactacataatctacatcatcgatgtttctggtggggacaaaataccaagaaaaggtggccctgggataacccaagcagatcttttgataataaacaagacagaccttgcaccagcagttggagctgacctggctgtaatggaacgagatgcgcttcgcatgcgggaaggagggccttttgtctttgcacaggtgaaacatggagtcggcgtggaggaaattgtgaaccacatcctgcaagcttgggagatcgccaccggcaacaagcgtcgatagcctgcaggattcttgggcacgagatgttgttgcgctcgcgcgtgtaatcatgtactactccagtatttctgctttcctgaataaactgcatcttttggtggctcggtgttgctgaaagatgctagcatacaagcctccgagacttgtctagctgacagtcgagtccataatctagttctgaatgacaaagtgagaggtctaaactatacctcg

SEQ ID NO: 2125 - DNA, 1215 bp, Oryza sativa
  ref <308>: DATABASE ACCESSION NUMBER: AK060038
  ref <309>: DATABASE ENTRY DATE: 2001-12-06
gctctctgtaatatggataccaaattgggagcgcttgctttcatgctcccgcttctactaccccaccagctccagctccgccgcgttcgtcgcgtgcggcgaccgcacgtgcggggagctgccccgaccactgtgcagcaacgtcgccggcggcggcagcggcagcggcaactgctcctaccactacgcctacggcaacgctagggacacgcaccactacacggagggcatcctcatgacggagaccttcaccttcggcgacgacgccgcggcgttcccgggcatcgcgttcgggtgcacgctccgctccgagggcggtttcgggacgggctcgggcctcgtcgggctcggcagagggaagctgtccttggtcacgcagctcaacgtcgaggccttcggctaccgcctctcgtccgacctgtccgcgcccagccccatctcgttcggctccctcgccgacgtgaccggtggcaacggcgacagtttcatgtccactccgctactcacaaacccggtggttcaggaccttccgttctactacgtcggtctgaccggcatctcggtcggcgggaagctcgtgcagataccttcggggaccttctccttcgaccggagcaccggggcgggcggcgtcatcttcgactccggtaccacgcttacgatgctcccggaccccgcgtacacgctggtgagggacgagctgctgtcacagatgggctttcagaagccaccaccggcagcgaacgacgacgacctgatctgtttcaccggggggtcgtcgacgacgacgttcccgtccatggtgctgcacttcgacggcggcgccgacatggacctgtccaccgagaattacttgccgcaaatgcaaggccagaacggggagacagcccggtgctggtccgtggtgaaatcatcgcaagccttgacgatcatcggcaatatcatgcagatggacttccacgtcgtgtttgatctgtccggcaacgcgcggatgctgttccaaccgcccaccgcctgatacgggagattatgaccgttgattttgtgcgccgtatgtagtactagcactctagcagtgtagcacgtacaattgtgccgtagcgaataagttctgcacaaattattttctgccatccgcgcttagttgtaagtacgcgagcttatgtaatagtcttccaagagaaattgaacgggcataatactgcatgtacggtt

SEQ ID NO: 2126 - DNA, 912 bp, Oryza sativa
  ref <308>: DATABASE ACCESSION NUMBER: AK104201
  ref <309>: DATABASE ENTRY DATE: 2002-08-28
caaaggaaaagagagagccctcctctcctctcctaccctcttcttcctcctcctcctcgcctcccaccaaaccctagcacgagcagcccaatccatctccagcctcacgagctccagttcggagcagcctcgcggtgggacgagtcgccagttggggagctcggaggaggtgaggccgtggttgggggttgggaaggggggaaggccaagaaatggcggagaaggaggagggcaaggtggcggcggagggtggggcggaggcggaggccgacgaggaggtggaggtcaagttccgcctcttcgacggctccgacatcgggcccctccgctgcaacgccgtcgccaccaccgtcgccgccctcaaggaccgcgtcgtcgccgactggcccaaagataaaacaattgtcccgaagactgctaatgatgtcaaactgataagtggaggaaaaattctagaaaacgacaagaacattgcgcagtgcagagcaccttttggtgatcttccgagcactgctatcacaatgcacgttgttgtgcagccatcatcagccaaatcaaaacctgacaagaagaccaacaagttgccaaagaccactcgctgctcatgtaccatactatgaaggttcagtgtcaactccatcgacaataatttgtatgtccgtgaaaattatgcagagagacaacgaatggagagaagattgaagaaaatctggtgccagaggagtccgatgtgttgtgagattgtattgtaattgtaagcttagatactacagagagttcgtccctctgcggctagggaaaaatagatgtcgttcggtcggttgcttgtctgttttacccaacaaaatgtttctatatgatgtacaatatacacatacatgctgttctggaggaagaagttggttgtttttc

SEQ ID NO: 2127 - DNA, 1043 bp, Oryza sativa
  ref <308>: DATABASE ACCESSION NUMBER: AK060039
  ref <309>: DATABASE ENTRY DATE: 2001-12-06
atcatcctctaaccccatccagctcgagaagaacaagacgaacacgctctcttccaaagctgaaagcatgggttcgactcgcctcctcgtactgctcgccgccgcttccctcctcctcgccaccgccgtcccggcagccagagcacaggaagaaactgatcacgaggaggagttcacgtacatcagcggggacgagaaggggccggagcactggggcaagctgaagccggagtgggcgcagtgcggcgccggcgagatgcagtcgccgatcgacctctcccacgagcgggtcaagctggtgcgcgacctcggctacctcgacgactcctaccgcgccgccgaggcctccatcgtcaaccgcggccacgacatcatggtcaggttcgacggcgacgccggcagcgtcgtcatcaacggcaccgcctactacctccgccagctccactggcactcccccaccgagcacagcgtcgacggccgcaggtacgacatggagctgcacatggtccacgagagcgccgagaagaaggccgccgtgatcggcctcctctacgaggtcggccgccccgaccgcttcctccaaaagatggagccatatctcaagatgattgcggacaaggggtagggccgccttgcacgcagggggtggtctggacgattgtcaagagggttcgcaccgtgtcgaggtatcagctcgaccttctcagggaagctgtgcatgatgaaatggagaacaacgcgaggccccttcaggcggtgaacaacagagacatctccattttccggccttaccctcataaacgctattaattagcggcggatttgtcgtctgatgtggattggtagcctaaaataaatatacacatgcagataggatcacacgtagggctcattttgccgttcgttcgatccttctatcacccctccttttcttttgagaggactgatctctcacatttcgatatatagctgagatttttgtaattctttccattactgttcctggttgattggattggaataaaacactgttcattaatttc

SEQ ID NO: 2128 - DNA, 1005 bp, Oryza sativa
  ref <308>: DATABASE ACCESSION NUMBER: AK060040
  ref <309>: DATABASE ENTRY DATE: 2001-12-06
aaaaaagagctctagaataaaagagaaggggaaaccccccccccaaatcccacgccgctcggctcaccgagtgctgcatcggatcggatcgggacggcggtggcggacgcgagatgtgggagtcggtggcgctcacgctggccggcgccgccggaaacaacgtcggcaaggtcctccagaagaagggcacccacatcctccctcccctctccttcaagctcaaggtgattagggcgtacgcgttgaacaggctctggatcagcggattcctcatggacatgtgcggcgccgcgctcatgctcaccgcgctctcgcaggcgccggtctccgtcgtgcagccgatcgccggctgtggcctcgccatactctgcgtgttctcccatttctacctcaaggagtccatgaacgggctcgactgggtcgccatcacattggccggtctaggcacgataggagttggtgttggaggcgaggagcagaaagtggacaaaattccactgttcaatataccttggctggtgctctccattgtcatcttgtttgttcttctcaacacttggcttcatatctacaaaaggcaaaggcgtgaacaagagttgactggacctgaagtgatcgaggagatcatatatggattggaatctggcattctgtttgggatttcatcagtgatatctaagacaggattcgtgatgtctgaaatgggttttccaaagattgttgtaccggctgccatttcttgtagtgtgggctgcagtgctgtgggatttgtttatcagactcgaggtctgaagcatggaagggcaattgttgtgtccacttgtacatcagttgcatctattgtgtctggcgttgtagctggtatgattgcgcttgatgaacatcttcccacagctcccacgggccgcttttttctcttacttggatggttcttcattattacaggagtgatacttcttgttagttcaacccggataattgctcggctactccagattctatgat

SEQ ID NO: 2129 - DNA, 1053 bp, Oryza sativa
  ref <308>: DATABASE ACCESSION NUMBER: AK104202
  ref <309>: DATABASE ENTRY DATE: 2002-08-28
atgcgccgcgtccacagctcgatcgctagccctactcgctagctagatcggcggccatggtgaacggctacttgttccgggagtacatcggcgcgcagttcaccggcgtgcgcttctccgacgtgcccgtcaacccgggcctcagcttccacttcatcctcgccttcgccatcgactacttcatggcgacgcagtcctccaagccggcgccagccaacggcgtgttcgccccgtactgggacacggccaacctgtccccggccgccgtcgccgcggccaaggcggcgcaccccaacctcagcgtcatcctcgccctcggcggcgacaccgtccagaacaccggcgtcaacgccacgttcgcgccgacgtcgtccgtcgacgcgtgggtgcgcaacgccgccgactccgtctccggcctcatcgacgcctacggcctcgacggcgtcgacgtcgactacgagcacttcgccgccggcgtggacacgttcgtggagtgcatcggtcgcctcctcaccgagctcaaggcgcggcacccgaacatcgccacctccatcgcgccgttcgagcaccccgtggtgcagcgctactaccagccgctgtggcggcgctacgccggcgtgatcgactacgtcaacttccagttctacggctacggcgccaacaccgacgtggcgacgtacgtgatgttctacgacgagcaggcggcgaactaccccggcagcaagctgctcgccagcttcaagaccgggaacgtcaccgggctgctctcgccggagcaggggatcgccggcgcgaaggagttgcagcggcaggggaagctgccggggttgttcatctggtcagcggatagctccatggtcagcagctacaagtttgagtacgagaccaaggctcaggagatcgtcgccaaccactgatcgtccatcgaacggtcgtgataatacttatgaaataagagcaaataaattgcgaaataatggtcgtattatatatcgagcgtcattatgcacgacttacgtgctaaataagaaatggacttatgtgccgattggt

SEQ ID NO: 2130 - DNA, 985 bp, Oryza sativa
  ref <308>: DATABASE ACCESSION NUMBER: AK060041
  ref <309>: DATABASE ENTRY DATE: 2001-12-06
accttttccatcccttctctccaactacctccttccctcctccatctcgacacctcctcctcgtctccggccgccgcttccccctcgccgccggcgcctcctcgagaccgtcgagatcgagatagagagagagtgatggggtgggcgacgcggttcctggcggcggtctgcttcttcgcggcgggcgtcgtcttcgcccccgacgtcctcctcggcgcccgctccggctccggctccggcggcggcgccgccgcggccgccaaggtggcccacctcctctgcttcgccacctcatggggcgccgccctctgggccaccttcatcggcggcatcatcatgttcaagaatctgccgaggcaccagttcgggaacctgcaggggaagttgttcccggcctacttcatgctcatctccgcctgcgccgccgtctccgtcgccgccttcgcctacctccacccgtggaagacggcgtccaccgtcgagcgctaccagctcggcttcctcctcgccgcccttggcttcgacctctccaacctgctcgtgttcacccccatgaccatcgagatgatgaagaagaggcacaagattgagagggacctgagcattggtgaggaggttgggtggtcgaagaatgttcaggtggcaaaaaaacaaccctacccttgccgcaatcaacaagaagtttgggatgatccacgggctctcgtctttggccaacatcatgtcattcggcagcctagccatgcattcctggtaccttgctagcaagcttgagatgtgaagtgaacaaacacccttgaccaacattcagttgaatcagatctgattgcatcacaatattaatgtggcaaagcctcatttggagagcttgcaaatatatttacgtgtacaatgattcgactcgagattagttgtacttaaaataatgtacagaatccacgcatttctcgccagtttattataagttcatgaaccaaaactattc

SEQ ID NO: 2131 - DNA, 1053 bp, Oryza sativa
  ref <308>: DATABASE ACCESSION NUMBER: AK104203
  ref <309>: DATABASE ENTRY DATE: 2002-08-28
acacacaacctcttcaatactctcactgcaatttctggagctcacactgcatgcgccggccaataatggcgacgacgacggcgaggttgctcctcctgctcacggtggcgggcttctgcctctgccacaccacctgccaggaggcggcgccgccgccgccgccgtactgcggcagcctgaggacggccgttgaggcgcggaacatcatcgggtggaagacggtgccgccgccgtgcgccaagtacgtcgccgactacatcaccggcgagcggtacggccgcgacgccgacgtggtgatcaacgaggccatcgcctacgccgagagcctcaagctctccggcaccggcaaggagatctgggtgttcgacgtcgacgacaccgccctctccaccgtgccctaccaagccaaccatggctacggagttcaaccgttcgacaaccagagcttcctcaagtacgtggtgcagggaagcgcgccagcactgcagagtacactgcggctttaccgacggttactccagcttggtataaagccggtgttcctgacagaccgcaccgaggaccagaggacggtcacaaccaacaaccttattaagcagggctactgcaattgggagaagcttgtgctgcagccggttaggcttcagacctcgacgttggcgttcaagacctgcgaacgacagaagctggtgaatgatggctacatcatcgtcggcaacattggcgaccagtggaacgacatccgccgctcgccggatggttgccgcacctttaagttccccaaccccatgtactatgtcgactagctagctagctatccatggatatataccttgtttgtgtctgtttcatctactcgttttttgtcatgaatttgcatctagtaattaatctttgacgcgtgcatatgtttgatatgtttgttaatttttcgtgagatgaaaattgaatttgtaataacgcttgtttggcagttggccattgattggtcaatgtactgtgttgagcaagcttgttgtatttttacagaattaataatggaactgatgggcc

SEQ ID NO: 2132 - DNA, 960 bp, Oryza sativa
  ref <308>: DATABASE ACCESSION NUMBER: AK104204
  ref <309>: DATABASE ENTRY DATE: 2002-08-28
atctctatcactcgctcttccgaccacgcctcatccgccatggccgcctccttcctccgccctctcctccccccgaaacccttcctctccgccactcctaaaccccacatccccgccgctacccccagtgccatcgtgcgctgcaccgcggcgcccaagccggccaccggctctatcgccaagcccagccaagaagaggccaacaacaaccaggagcaagaacccaacgccgccgccgccgccactccggacgaggccggcgccaacccgcaccgcatccccgacgacgagaccccgccgtctgcgacggcgaccacgtcgttcgccgtggcgcggcgcgtgccgtcggccatctcccccgaccgccggcgccggacggcgctgacgcagggggagccgccgaactacgagatcgggtggaagcgcaccaagaagctgccgctggagaagcccaaggggtgggccatcgcggacttcatggagaagctggaggggctgatggcgcgcgggcggtacgggtccggggagctgctgggcacagtggccggcgtggtgacggagcgcgcgcgggaggaggccgagatcctggtggcggagggcggcgtggaggagcgcgtcgcgacggagctcttccgcgtgctccggctggtggagatggacgtcgcgatggtcaaggccgccgtcaaggaggagaccgtcaaggagcgcgtcgagatggcgcgcgcgcgctgccgccaggccatcctcgtcgcgctctcgctgtgacgacggacgcaccgcgtggtgcccaactgtaattctgattccttcactgatttctcgcatagccactatacacagttgcaactggtcatcaggtttttcgtgtatgtatacctgaattttcagtagcatttgcaatcaaacactgaaaccatgtatacgagaaatggatgggatagccaactacgtgcacttatt

SEQ ID NO: 2133 - DNA, 1021 bp, Oryza sativa
  ref <308>: DATABASE ACCESSION NUMBER: AK060042
  ref <309>: DATABASE ENTRY DATE: 2001-12-06
ttgtctttggattagggacttttttactgatctcctcctcctatgccaaagacctaaactataacacaatcacagcagcttcatatcttggcctagtctaccttggtctaaggttccttagcaagtccatacttaacaggggagagaatgtggactgtgatgatgctgagaggagtggtgaaaggtacctggtgggggaggaggaggccatctggctgctcaggcttgttctgccttacatcaatgaggtgctcctgaatctaaggtccctcttctctggtgagcctgcaacaaccatgaagctggcactcctgctgtttgcaatggcccggtgtggcaactttgtcaccctctggacactggcaaaactggtgttctttggggtcttcatcattccgaaggtgtgctcatcttactccacccagcttgcaagatatgggaggttttggctggagaggttcagggatggatgggagtcctgctcccacaagaaggcggtcgtggcagccgtcttcacccttgtctggaacgtctcatccacggttgctcgtgtctgggctgtgttcatgctggtggtggccatgaagtgctaccagcagcggatgatggagtacggctggagcagcacggtggaggactcacaggaggccaccgccgccgccaccggcgacgatgagtcaccgcaggaagaaactcctgctagatcaagcccggccaaggcgcacgaccacgagccggcacagggatttggggcggcggcgccggcgcggcatcgccggacgccagtctccggcgagtttgcaagggagaggctgagagtgaggggtggcatccagcctaggtgacaggacaaatctgtggatgccgtatgttttttttttctttcattttttttacattgtggtagttttgggttgtgaggacgtaatgtcacgaaatggttcacggaaataatgagtatgatccacacataggagttccatataatagaatggctatagaaattaatatatttctccac

SEQ ID NO: 2134 - DNA, 1103 bp, Oryza sativa
  ref <308>: DATABASE ACCESSION NUMBER: AK060043
  ref <309>: DATABASE ENTRY DATE: 2001-12-06
acgccgcaacacaacgcgctcgcctcgcctcgccccgatcggtggtggtgctcgccgtcgccgggcggcgctagggtggccggagaggctccggagagtaggaggaggaggaggagccggagatgagggggtcgaggaggccggtggccgtggtgctgagctgggtgcggaggcagccgcccaaggtcaaggcgttcctcgccgtggtcgccgggatggccgcgctcgtcttcatccgcttcatcgtccacgaccacgacaacctcttcgtcgccgccgaggccgcccacgcgctcggcctcggagtcctcatctacaagctcaccaaggagaagacctgcgccggactctcactcaagtctcaggatttaacagcactatttctggctgttaggctgtactgcagttttgttatggagtatgacatccataccatacttgatacagctacactagcagctactctctttgtcatctacatgattcggttcaaactgaggtcaacttatatgctggacaaggacaattttgcattgtactacgtggtgttaccttgtgctggcctagctctcctggttcatccttcaacatcgcataacatcatcaacaggatctcctgggctttctgtgtttatttggaagctgtttcagtgctgccacagttgcgtttgatgcaaaacacaaagattgtggaaccatttacagctcattatgtgtttgcattgggtgttgcaaggtttcttagctgcgcacactgggtccttcaggttttggatacccgtggtcgcttgttgactgctctgggctatggtctctggccttcgatggtgcttctctctgaaatcgttcagacgttcatccttgctgatttctgctactactatgtgaagagtgtttttggtgggcaacttgtccttcgacttccgtctggagtggtgtaaaaatgcagcaggatgcaacatgttatgggctttgtgcacgtttagtacatcgtcggataccagagccttgtttgcttgataatttttttcagttacaaattgctcatgtgaaaaatgtacctaccagagaccgtgatgaaatctagagactagtttttaact

SEQ ID NO: 2135 - DNA, 1086 bp, Oryza sativa
  ref <308>: DATABASE ACCESSION NUMBER: AK104205
  ref <309>: DATABASE ENTRY DATE: 2002-08-28
ctctcctcgtcgtccccgatcccctcctcctctcctctcctctccactcctcgagatctcgcaaggtcagggagccagcaaattcacccgcgattccgcgcgccgccgccgtcgccgccgccgacgtcgccgcctgggtgggggaggagatggccggcctcgggaaggccttctacgcggtagggttctggatccgggagaccggccaggccctcgaccgcctcggctgccgcctccaggggaactactacttccacgagcagctctcaaggcatcgcacacttatgaacatctttgacaaaacccctcatgttcacagagatgcatttgttgccccaagtgcatctctcattggtgatattcaagttggacaaggagcttcaatttggtatggatgcgtcttaagaggggatgcaaacaacgttcaaattggatctgggaccaatatacaagacaattctcttgtccatgtggcaaaatctaatcttagtggaaaagtctttccaaccatcattggggataacgtcacagtaggtcatagtgctgtattacaaggatgtactgttgaggacgaagcatttgttggtatgggggcgaccctgttagatggtgttgtcgtggaaaagcatgggatggttgctgctggagcccttgtaagacagaacacaaggatcccctgtggagaggtatggggaggaaaccctgccaaattcctgaggaagctcactgatgacgagattacgtttatcaaagaatcagcttctaactattccactctggcaaaggcccatgctgctgagaatgccaagcctgttgaaaagactgaatttgagaagctgttccgcaagaagtctgctcaccaggatgaggaacacgattcaatgattggtgctactcgggaggttactccggagctgacgccctcgagttctgcccaataaaccttgtttctgtttttgcttctctctggtgcctttgcatcatcttatattggacagtgcaggattgttgaaggtgacactgttccatgagttcggcggtttatgtttactttcctccccaataattttgggtcgagcattgtgc

SEQ ID NO: 2136 - DNA, 910 bp, Oryza sativa
  ref <308>: DATABASE ACCESSION NUMBER: AK060044
  ref <309>: DATABASE ENTRY DATE: 2001-12-06
aattgtgcagcgagacaccgatagctagctaactaatcttccccttcgtctccggcattattccacttggacgaacactagctcaccggccggccatggcgtcttcttccgttctgatcaagctgctcgtcgtcgtcggctgcgccgccgcggcctccgcggcgacgctcaccgtgggtggtagctccgggtggacgcttagccagaactacgatacttgggcaagtggccaaaccttcgcggttggagacaagctcgtgttcagcttcgttggggcgcacacggtgacggaggtgaacaagaacgattacgacaactgcgccgtcgcaagcaactcgatcagctcgaccagcaccagcccagccaccctcgacctcgccgccgccggcatgcactactacatctgcaccatcagcggccactgcgccggcggcatgaagctggccatcaacgtcggcagcggctccggctccggctccggctccgggacgccacccagcaccaccccaggaagcagcggcacgccgccggccaccccttcttccccctccaagccgaccggcggcgcgtccgccggcctgcaggccagcgccgccgtcgccgccgccgccggcgtcctcgtcaagctcgccctcttctgatcgggcccacctgccaggatagaggcagtgcatatgattcttgtttcttgatcatttcgtctgacggccggcatgcatgtgtgtgagagagatgagtggtttgctagctagctagatgatgatggtgatgatgatatggggttgttgttccgttccatcgtgtacttagtactgtaattacgagctgtcatgtgatttgttttctcatctccatggatttgtataattttcctctgaattttatcatctgcatattgatcggacactct

SEQ ID NO: 2137 - DNA, 1031 bp, Oryza sativa
  ref <308>: DATABASE ACCESSION NUMBER: AK104206
  ref <309>: DATABASE ENTRY DATE: 2002-08-28
aaatttggactcttgcgcgcaaagtcctcacagttcaccgattttctcctcctcgcacaccgagacaggtcggagaaagaataggcgaaggaaatttccgtcgtcgtcgtcggagaagatgaggagcggcgaggggagcaccgcggcggcggcggcggcggaggaggagaaggtgaaggtggcggcgccgttcaggctggcggagctggggctccgggtgtgcgcggtgccgctcgccgtggcgtcggtgtgggagatggccaccaacaagcaggtggacgagacctacggggaggtcaggttctccgacctctccggcttcaggtatttggtctggatcaacgccatcacggctgcctactcggtggcctccatcctgctgtcatcctgcaggttcatcactcgctttgattggctcattttcctcctggatcaggcgtcggcgtacctgctgctgacgtcggcgtcggcggcggcggaggtggtgtacctggcgcgggagggcgaccgggaggtgtcgtggggggaggtgtgctcctacttcggccgcttctgcggcgccgccaccgtgtccgtggcgctcaacgccgccgccctcctctgcttcatggcgctctccctcatctccgccttcagggtcttcaccaagttcaacccaccatctcaatccaactccaagcagcagctgtcgcaggagcaaggcaagcctgtagtttcaggctagttagtggctctcccaagtctgaactttcagttagatggtacttttactgtgttcagctgtttacggtgtgttcaggtcttgctttgtgtagatgtcactacactctaatgcgtgttgtctgaaaagaaaaaatggttgtgtagatgtaacctgtataagtgctcaaaataccatgaactagaattactatacatttacaattttatttagatgtactgtatgtatgtatacttgaagctgatcttcagagttcagactcggggtcgatactgaagtgtgaaaaaactgaactactattctctttcag

SEQ ID NO: 2138 - DNA, 1079 bp, Oryza sativa
  ref <308>: DATABASE ACCESSION NUMBER: AK060045
  ref <309>: DATABASE ENTRY DATE: 2001-12-06
ccgatcggacggcgcttatcgagtttgctttgttcacaccgcgcgtgccagcgagagccattctcgccggagcgacctcgccggcgacgccgtcgccgccaccccacctccgtgcggtagggtaggtagtggcggttgccgagatggccgggatggtcgccgccgcggcgccgccggcgtctctttgccgtccgattgctgtcccccgagctcctatgcgccgccgccggctcactccccgcgtgaagacgacgccctcccttcgctgcgaagattccccgaagatcgctctactccaggtacaagccatgcgatcttcagaagagagtagttctgatgaggacgatgagatcctttctgagctcaaagagaagtgggatgctattgagaacaagtcctctgttctcttttacggaggcggagcaatcatcgctgtctggctatcctcgattgttgtcaaagctgtcgattcagttccagtgcttccgaacatactggagctagttgggcttggctactcgggatggtttgtgtaccgctacctgctcttcaaggaaaaccgggaagaactggccaatggctttgatgctctaaagaaaaggatcactggaaatgaggaatagctgtgtatcctgtttctctgcttgaacgttgtcattagagccttttgttttttctcatgtaaatgctggaagcgttattgatgtttatggcctcccacatcttctgtactgtctgcagctcagcggggtttgcagtatcatctgacttctgaacagatctccacatttatggctgcgctaaaatgcttgtgattcttctgatatggaggtcagctggtcctgtttcttggctggcttcctttccccaatgattcagctgtatgttactactgctaagtttaagccagaactgataagtttaagctgtagtacaagcaattatttgaaataaattcagtagtccgagaagatttctgttcttgtgccaacagcatatgtatcctcttgctagttgaccggttaagagagttgattcttctgtgcatgttaattcagggtagttagtctgttgccacc

SEQ ID NO: 2139 - DNA, 1210 bp, Oryza sativa
  ref <308>: DATABASE ACCESSION NUMBER: AK060046
  ref <309>: DATABASE ENTRY DATE: 2001-12-06
taaaaattatagataggttcagtcaagagagtaccttgccctattatttgctcccgtttgtatgggagaacatcttagcttgcgctttaattgttgcagcagagtgaagttataatttcaggcttcgttccaaacagctagcgtgtataccacagcactctatggttggtggcagcaaaagatggaaggaaaaaacgtattagcggatggtgtgatggtgccgtacttgttcatcagagaaaactaacaagtccacggcgaagctggggatttaactggcattcgtagatttcttggatttgggattggtttgcagcctgattcagactatatggacattggagggtgaagcttgttttatgtgcaggggtgcttttggaggcagatacggtcttcatccacccgacggtagatccgagcatgtgcatttgtggcggtgcgaggcagcaggcagcggccagtagcccgagaaccccgacctcgatgccctaatgggcgtcacgccatatgtgacggagatacgcgacgaattgggggtgagccagggagactgcgcgaaccatgatcttgcgagttgcgagcgctgggcctggccaccgttttcaggccgttgggcaagctaggaggcaagaccttggagacgggaagctgatctacttctccagtctccagttatgtcttgcaattcgtaactcccttcttggctgcggcctacagccctacagcgagtgggttcgagcccatcctccattctcaacctggatttgccactcatcaagcctcaaggaaattggtggaggttggccaacgtttaccttctactgcagaagcttggtcatcgactgcgtgccttggtgctgtcttgccatagctgcggctgcttgccttgatctgttcacttcttagtttgctaatttcaaacgcgaaattggttattagtggttccgttctaatagctaaatattagagattgatttcaccgagtctacagcttgccatattcatctattatattattaaaacagctttgaaaggaggcaccacattcgttgtgggggctaaaaatttccagtctatgtaggaatacaataaaaaaaatggctgaaattcggaattagaaataagcaatattgaaagaagagtccatataagaacctaatacgagattaatcaaaattcggaataaaaataaaataaaatccgaaattag

SEQ ID NO: 2140 - DNA, 1086 bp, Oryza sativa
  ref <308>: DATABASE ACCESSION NUMBER: AK060047
  ref <309>: DATABASE ENTRY DATE: 2001-12-06
tcaccatcgtgtcgcaagctgtgactctccccaagagcttttctagctccaacgactctgcggggccgaaatctggaggcctaccgttggctgttactcctttgagccaggcatccccgtcccagccgattccagtagcaaccacaaatgcttcggctatcatgccaagagctgtgcctcaagctcgaaaagcatctctcgcccgattcttggagaagcgaaaggaaagagtgtcaagtgttgcgccatacccatcctcaaagagtccactagagagcagtgacaccattggcagtcccagcacaccgagcaaatcatcgtgcacggacatcaccccttcgaccaacaactgcgaggactcactgtgcttaggtcagccaaggaacatcagcttcagcagccaggagccccccagcacaaagttacagatatgagacctggtgatcattgtataccgaagattcagctcagcgagagtcggctgaccttgatgccagatcggacgccttctttcgcatccgtgttagggtatgatgagacataggaagagatcactagatgctgtttctatcctggctgcaaaatctttctttggctagagctgtttataagtgctgatctagccacagccgccgccacttagtagtacgagagctgtgacattgcaggtaatttcaggctgttcttgattatttttgccctgagccatagcggcattggacttgagaggaaaagaaatgctgctgagttgtataggattacagattcggcgtatgtaattttgctgttttttggttctagccttaaacatacaaagctagcttcagaattcaaacagagtatccctgatgccaatatgccattgccatggccatttttatatgttcggtacatttgttgttgcatactgttttgtgcatacaggcgagaatgcttgtcattgtaatgactagcgagtttttgtagcatgcacatcacgcagctaactaagattattatgcttcccttggagatcgcatgcagtgatatgttacagtgtttacttgattgtagtctctcccaagctagtatactctacgtagtcat

SEQ ID NO: 2141 - DNA, 1044 bp, Oryza sativa
  ref <308>: DATABASE ACCESSION NUMBER: AK060048
  ref <309>: DATABASE ENTRY DATE: 2001-12-06
accctgccatggacgggtagaaaggtacagtggcggcgccgacacgcggtggaggaggaggcggcggcggcggcggcgatggggctgctgtcgaacagggtggagcggtcggagatcaggccgggggatcacatctacacatggagggcggtgtacgcctactcccaccacggcatttatgttggaggaagtaaagtggttcattttactcgaaagaaagaagcagaaggatcagattcatccaattccacctccagcctattattagagccttcatcagagtgcccaacgttcccagattgtgggtttcagctgcctgatagtggtgtcgtcctcacctgcttggattgcttccttcggaatggctctctatactgcttcgagtacggagtgccatcagccgttttccttgcaaagctgcgtgggggaacctgcaccattgcccaatcagatccatcagaagttgtggtacacagagccatgtacttacttcaaaatggctttggaaattatgacatatttgagaacaattgcgaggactttgcactctactgcaaaactgggcttcttcctgttgaggaacctggcattggaacaagtgggcaagcatcttccgccattggagtgccattggcagctcttctgtccactccacttaagctttttgctgctggtccacttggaatggccactgtcacagctgggatgtactgtgctggtagatacatcactgacataggagtaagaaaggatgtggcgaaaattgaagtggagaatttatcatcacaccttggtagacgcctgattgaagatgaaggatcagtgaacgtacggtcagagaaaccgaaaaccttgctgcctatgaagagaaagcgtgagaggtgatggcgactatataccgctcttcgtcgataattggttcagaactgtgcataatttaaactttactcttcgccataataagtttgatatagatatgtacctctgaagcgtgttctgattcagttaagaccacacttcacatgatcaattgagctacattcc

SEQ ID NO: 2142 - DNA, 1173 bp, Oryza sativa
  ref <308>: DATABASE ACCESSION NUMBER: AK060049
  ref <309>: DATABASE ENTRY DATE: 2001-12-06
acggatcattcattcattctctcctcctccgttcctgactccaccactcacattcattcccttctctctcctccctccctcccccgcccctctgctcccctcgccggcgagcccaatggcggcgtccgccctcgactccgcctgggagggcctcaccggcagcttcaccgagttccagctcgccaccgtcgtcaccttcctcctccacgagaccgtcttcttcctctccggcctcccctccctcctcttcgagcgcttcggcctcttcgccaagtacaagatccagaagaagagcaataccccttcttaccagaatagatgtgtgctgcgtctcattctgtaccatgtctgtgtgaacttgcctgtaatggttttatcctaccctgccttcaaattcatgggcctgaggagctctcttcctctgccacactggacggttattgtttctcaagttcttttttactttgtactcgaggattttatattttattggggacatagggcactgcacaccaaatggctatacaagcatgttcacagcgttcaccatgaatatgctacaccctttggcttgacttcagaatatgcccaccctgctgaaattttgttccttgggttcgccacaattgttggtccggccctcactggtccgcacttgttcactctatggctgtggatggtgttgagggtattggagacagttgaagctcacagtggataccatttcccatggagcccatcaaatttcttgccactgtatggaggctccgactttcatgactatcatcaccgtgtgctctacaccaaatcaggaaactacgcctctacttttgtttacatggactggctgtttggcacggacaaggattaccgcaatgccaaggctatcgaggagaaagacgggaagcatttgtaaattgtgggggctactctctttctctttgtccaaatcatcgaaacaagggtttgacatctcgcagtggtgatagcattgtgttcatgggaggaaataggtgtcctagccacaggtatctatctcctgagatgatcctacagtttagattttctttccccaaattcactatactatcatcatgagacctttgtgtttctggaggccaccatgatgtaatttgtcataagcttaatttgatgcgtgctattttgtggttt

SEQ ID NO: 2143 - DNA, 946 bp, Oryza sativa
  ref <308>: DATABASE ACCESSION NUMBER: AK060050
  ref <309>: DATABASE ENTRY DATE: 2001-12-06
ctagcaatcccctccgcctccgtcgtcttcaccttcgccaccgtcaccgccgccgccgccggccggagaggaagccatgagcggcgcgggcggcaccgccgacttcttctaccgcgaggcgcagcgcctcggctacgtcgcccgctccgcgttcaagctgatccagatacagaagcagcacaagctcatcgcccccggcgccgccgtcctcgacctcggctgcgcccccggcgcgtggctccaggtggcgtgccagaacctgggtccgctcgagaagggcggggtgatcgtcggcgtcgatgtcaagaaggtgaaggttccatctgcgcactgtgactcgagggtcaggaccgtttgcgccgatgtgatggctctgatgaagcagcaagctcgggcaatgtcgccacaggaacgaggattctctgtaatattgtcagacatgtgcccagtagtttctggaattacaaccaaagatgcggctatatcttgcgagctgggcatgcgtgctctttcattggcagttggtaagatgaaagcaaaagattcagattgcattgcaattttagagaagtttcagagctccactgagccagatcctgatgaagatggcattctccgtcgtggaggcagccttgtaattaagtttcttgagaatgaggatataccaggttttggcaaattttgcaaagagaagttcaagaaagtgtccttattgagacccaaggcgacaagatctagttcgagggagattttcatggtctgtgaaggtttacggtagaaataatagaatgaagaagcagtgctgacacatttgaatctttgttgaactgatttgattagcaatttttcttgtgcacccctgtcgccacactttcaggccttggtatcaggcaagcagtgtatacttttccggtaatcttttcaagaaaggccatttgctaaatag

SEQ ID NO: 2144 - DNA, 1003 bp, Oryza sativa
  ref <308>: DATABASE ACCESSION NUMBER: AK060051
  ref <309>: DATABASE ENTRY DATE: 2001-12-06
tgcgtatcatcaatgagcctactgctgctgccattgcctatggtcttgacaagaaggcttccagtgttggtgagaagaacgtcctcatcttcgaccttggtggtggtacctttgatgtctctcttctcaccattgaggagggaggtcaaggccacagctggtgacacgcatcttggtggtgaggactttgacaacagaatggtgaagcactttgttcaggagttcaagaggaagagcaagaaggacatcactggcaacccaaggcctgtcgggaggctgaggacagcttgtgagtgggcgaagaggactctctcccctccacttcccagaccacccaccattgagattgactccctgtacgagggcatcgacttctactcgaacatcacctgcgccaggttcgaggagctgaccatggatctcttcaggaagtgcatgaggggataccaagatggacaaagagcagcgtgcacgatgttcatccttgttggtggctccaccaggattcccagagtgcagcagctcctccaggacttcttcaatggcaaggagctctgcaagaacatcaaccctgatgaggccgtcgcctatggcgccgctgtccaggcccccatcttggtctggagacggccagaggagtgatgacctagaaggagcaggccggtcttctccacctactccgacaaccggcctggtgtgttgatccaggtgtacgagggcgatgggagaggaccatgacaccattgagtaagtgaggagatcgagaagatggtccaggacgcggagaagtacaagtcggaggacgatgagctacatcgaagaacatgcacaaacaccatcaaggtccgagcacccacgcggcggccaagaagatgggaggacgcggtgggagattgagccaagatggacgaggacgtgccgttaaattttggctgatcatggtggttaaattttggctacgttgtaatgaaaaatgcattggttgcttcgttaaagtaatagt

SEQ ID NO: 2145 - DNA, 1088 bp, Oryza sativa
  ref <308>: DATABASE ACCESSION NUMBER: AK060052
  ref <309>: DATABASE ENTRY DATE: 2001-12-06
acaagcttattatgcacattcgaattgctagctagctcgtcgaagaaaccaaagtgcgagcgatcggctagctgctgcaagaagccttgaccatggaggccagacaccgtgtgatgtcgctgctgctggtgctggtgatcggctgctgcgcctggggctgccgccctggcgcggcgcaggtgcccgtcccggcgaggacggacgggttcgtgtacggtgggaaggcgccggcgctgggggagacggtggtggtggaggcgtacttcgaccccgtctgcccggacagccgcgacgcgtggccggagctgaagaaggcggtcgagcactacgcctcgcgggtgaccgtcgtcgtgcacctcttcccactaccttatcacagcaatgccttcatttcctgccggtcaattcatgccgtgaacaagataaatccgtcgtttgtgtatcccctgctcgagagattcttcaagtaccaggagggttattacaaccagccaacgtatgggaaaacaagagctacagtggatgcagaggtagctaaaaaccttgttgcccccgtcattggggaagccaatttggcagcatacaaagcaggtttcaatgattcaaaatcagatcaagccacacgaatttctttcaagtatggttgcgcacgaggtgttacgggaacaccgtacttctttgtgaatggcatcccccttattagtgactctggttccccactggaatacaacaagtggaaatcaatccttgatccattggttggcaagatgtagagagtgtttcaactaaagtcctctgcctggtgttaaatacaagactcaagacaaataagcttggcgcaaaaacagtatgatttcgccaagatatagatggaacgatattgatcacaaagatcaagtttagttaggcaaataaaagggcaaccctactctaatgacatatattgtctttaccttgtattatgagacagaaaagaatttctataatacaaaagagatgtagctctcacatacaatggtatcccagtgtgctaccaacaagacttgtatgaaatatagtatgcattttaagatttcggatgttatgcc

SEQ ID NO: 2146 - DNA, 1081 bp, Oryza sativa
  ref <308>: DATABASE ACCESSION NUMBER: AK104207
  ref <309>: DATABASE ENTRY DATE: 2002-08-28
gctcgtctccttccttccgccgccgccgaagcagaagaggaagaagagagaagaaagaagcattggcgatggctgcggcggagggccccgttctcctcttcccctctacctcgtcgacgtccgcccgggtggaggcggtcgtcgtgttcaacatctgcgacagctacgtgcgccgccccgaccaggcggagcgcgtcatcggcaccctcctcggctccgtcctccccgacggcaccgtccatgtccgcaactcctacgtcgtcccccacaacgagtcccccgaccaggttgctctcgacatcgagtaccaccacaacatgtatgcgtcgcaccacaaggtcaaccccaaggaagtcattgttggatggttctcgactggcttcggtgtttctgggggaagtacgcttatccatgatttttactcaagagaagtacagagccccattcatctcactgttgacactgggttcacaaggggcgatgcttcaatcaaagcctatatctcatccaacctgtctcttggagataggcaccttgctgcgcagttccaagagattccccttgatctgaggatgcttgaagcaggaaaagttggatttgacatcctgaaatctacaattgtggagaagctccccaatgatctggaaggaatggaatcctccatggaaaagctgtatgtccttattgacgagatctacaaatatgttgatgatgtcgtggaggggcgtgtagcaccggacaataaaattgggagattcatctctgatgctgttgcttcaatgccaaaattgtcaccagctgcttttgacaagcttttcaatgacaggattcaggataatcttgcactggtgtacctgtcaagcatcacaaggacacagattagcatagccgagaagttgaacaccgccgcccaaatcctgtaatttccatgtagttggagcatctgggagtctgacttaaaatgctgttttgtttgtttttcattcgcacgactgaaaaattgggatatgatggcagagtatgcatttttgtacttgttatctgaggcctaaagaaaagaaaccatcatgtttcagatgat

SEQ ID NO: 2147 - DNA, 935 bp, Oryza sativa
  ref <308>: DATABASE ACCESSION NUMBER: AK060053
  ref <309>: DATABASE ENTRY DATE: 2001-12-06
gttgatcgatcacacacctgcaaaaatccattctcttccggcgagcagccggcaactccggtcgccggcgagatgagcggccgccggccggacgggagctatgggccggagtacggcccccagcctcctgagcatgagtatggcttgtaccatcactggccatccagagggagggcaccttggcctctctaccatggcagggattatccttggagatcactggagcaaagggtgagaagagaaccttttgtgttttcctccagaatccgccatatcaacggtggcggtaacccgaggccgagacaagaggaccccggactcaccgatgccgagttcaagaaggcgatggagcagctcaacaagcaggcatataggtccttagaccctcataagatggttgaatcaaacagaggaggcagaaaccatgcaaagagtgcaagatccaagccagctccaaacaacacggaagaggagaaagcatgtaccatatgtttggagacattcctggctggggagcaggtggtggccacaccctgcaaccacatatttcaccaagagtgtatcaccccctgggtgaaggggcatggcaactgcccggtgtgccggttcgcgctatgcgagaggaacaccgtctccgacaacagccagagtggcgttggagaggttgaggtagatctggacctgctggagatgatgagggccatggaggagatcttcagccgggtcacattctcaaacttcatgccatacaactagatgaatcagcatcaggtcatgaagacatgaactgatgaacaaatggtattccagtcttaatatcatggtgtgctactcacttgcatgatattccactacgaatttcatcaagattttctacctggcaatcttgtcaaactgctttgtgaaaccaggtaatgcattgcaacagtacaaac

SEQ ID NO: 2148 - DNA, 1284 bp, Oryza sativa
  ref <308>: DATABASE ACCESSION NUMBER: AK060054
  ref <309>: DATABASE ENTRY DATE: 2001-12-06
aagcttacagctcacagcaatcagctaagccagtagccaatcctcactcactactcatcttctcttcccatctttgttgcttgcattcagagatcatccaatcggccatggctgatgaaatccagcatctgaccagggccttctcagggctcggtggcctcggcgtggacgagccggcgatggtgtcggcgctggccaagtggcgcaggcagccggagaagctgtccgggttcaggaagagcttcaatggcttcttcaaggatcatggcggcgtcatcgagaagtgcgaggaggagtacatgctccacctcgccgccgagttctcgcggttcaagaacctgatggtgatgtgggcgatgcacccgtgggagcgcgacgcgcggctggcgcaccacgtgctccaccaggcgcacccggcggccatcgtcgtggagatcgcttgcacccggacggcggaggagctcctcggcgctcgcaaggcgtaccaggcgctgttccaccactccctcgaggaggacgtcgcctaccgcgccagggacaagccctactgcggcctgctggtcgggctggtgagcgcgtaccggtacgagggcccgagggtgagcgaggagacggcgcgcgcggaggcgaaggcgctcgtcgccgcggtgaagagcgccggccacgcggcggcgaagctggtggagaacgacgacgtcgtcaggatcctcaccacccggagcaagccgcacctcgtcgagaccttcaagcactacaaggaaatccatggccgccacatcgaagaggatcttgggcacgaggagacactgagggaggcggcgctgtgcctggcgacgccggcgaggtacttcagcgaggtggtggcggcggcggtgagcgacggcgccgaccaccacgcgaaggaggcgctgacgcgggtggcggtgacgcgggcggacgtggacatggacgccatccgcgcggcctaccacgagcagttcggcgggaggctggaggacgccgtcgccgggaaggcgcacggctactacagagacgcgctcctctcgctcgtcgccggcggcaagtgacccggccgatcagccattgctcctccgatctgtcgcctcgccttgtcagtgcgtcgccatcgtgtacgttgttgctgctgctgttgttgttgttgtgtttttgttgcatgcgtggatcgagacttgtaaacttagcatttcgcagcagagctgttggtatggaataaggtcgatttaatttttcttgaaaaaaaaaagaggatcgatttcatttggg

SEQ ID NO: 2149 - DNA, 1050 bp, Oryza sativa
  ref <308>: DATABASE ACCESSION NUMBER: AK104208
  ref <309>: DATABASE ENTRY DATE: 2002-08-28
aaggcgatgttgcaggcacaattttctcaggtgcgccctgtaccgatgacaccttccatggctccacgtcttcccatgtaccctcctatggctcctcttgggcagcaactcttctacggacaagctccacctgctatcatgcccccacagcctggatttggtttccagcaacagcttgttccaggcatgaggcctgggggtgcccatatgccaaattactttgttccagttgtccaacaaggtcaacagggtccacgtccaggtatccggcgttctggtgctggttctgcccagggacagcaatctgctcagccatttcagcaacagatgcttccaagaggacgtgtgtaccgttacccacctgcgcataacatgcctgatgttccaccaatgccgggggttgctggtggtatgattcaatcgtatgatatgggaggcttcccagtacgagatgctggtttgtcacctgctccaattggaacgctgacttctgcccttgcaaatgctaatccagaacagcaaagaacgatacttggtgaaagcctgtatccactggttgagcttctggaacagaaccatgcggccaaggtcaccggaatgcttctggagatggatcagacggaggtcctgcatctgctcgagtctccagaggctctgaagtccaaggttgctgaggcgatggatgtcctccgcaatgtggcccagcagcacaatgcgaacaccccgaccagtcaacttgctgcgctgtcactgggcgacgccattatctcctaatttacagtcgtagctatctttttagcttgcagttgtgtgtgatcttgcatgaggttatcggcaacatggcactttttccctcgtatggtttgacttgagtggttcgagttcccgggttggatgttaggcgttatacttctcggcctggtatccttgccattaaggccaggtacttgtttccaagtttgagtattatccggaccatccgtcacatacctcttatgcttgatcacaatttttgctgttaatgattggtgagagaaatggttggatgtt

SEQ ID NO: 2150 - DNA, 1036 bp, Oryza sativa
  ref <308>: DATABASE ACCESSION NUMBER: AK104209
  ref <309>: DATABASE ENTRY DATE: 2002-08-28
atgcgcgagcgcgacccctccccctcgaaccgccgcgaccttctcgatgcttcccaaatcctcctcctcgtgaactcgtcgccttcgtcttcgtctcgatctccatggcggactcgagcgcggcccgccccaccgtcctcgtcaccggcgccggcggccgcacaggaaacattgtctacaacaagctcaaggaaaggtctgaccagtttgttgtgagaggtttagtgagaacagaggaaagcaaacaaaagattggtggaggcaatgatgtttacattgccgacataagggacagagatcatcttgtgcctgctgttcaaggtgtcgatgcgctcataatcctcacgagtgctgtgccaaagatgaaacctggttttgaccctagcaaaggtgggaggcctgagttttactatgaagatggaatgtatcctgagcaggtggattggattggccaaaagaatcagattgacactgccaaagctgctggagtgaagcatatcgtgcttgtgggatccatgggaggaacaaatcctaaccatccactgaacagcctaggcaatggcaatatactggtttggaagcgcaagtcagaacagtatttggcagacagtggagtcccttatacaataataaggcctggtggtctgcaagacaaagacgggggagtgagggagttgattgttggcaatgacgatgaacttctccagacagacacgaagtcaattccaagagctgatgttgctgaagtttgtgttcaggccctgcagtatgaagagacaaagttcaaggcatttgatttggcttcaaagcctgaaggcacaggcacaccaacaaaagacttcaaatcgttgttctcccaggttacagcccgattttgagccatcttgaggagcaatctcatctcggtttccttgtgtattggatatttggatgtatatcttcgtggttagtgaggtgtgaagttgtagtttgctgtaattcgtcatcgtttcctgaaaactcctattgaaatcagtgaattgttcagacaagacac

SEQ ID NO: 2151 - DNA, 1308 bp, Oryza sativa
  ref <308>: DATABASE ACCESSION NUMBER: AK104210
  ref <309>: DATABASE ENTRY DATE: 2002-08-28
actgcgaactcactgccaatctcttcatccagctcactgcataatcacacactaattaacaagctaattagctgcagtaattagctgcattgaattcatggagaggggtcagaagaagaagctggcgacgttggtcgggtgcaactacgccggcacgcccaacgagctgcagggctgcatcaacgacgtcgccgcgatgcgcgacgccctcgtcgcccgcttcggcttcgcgccggccgacgtcaccgtgctcaccgacgaccgcggctcgccggtgctccccaccggcgccaacatcaagcgcgcgctggccgacatggtcgcccgcgcggcgcccggcgacgttctcttcttccactacagcggccacggcacgctcgtcccgccggtgaaggggcgccgccacggccacggcgagtgcgacgaggccatcgtgccctgcgacttcaacctcatcaccgacgtcgacttccgccggctcgtggaccgcgtgccgcgcggcgcgagcttcaccatggtgtccgactcgtgccacagcggcgggctcatcgacctcgagaaggagcagatcggcccctccgtcctcgccgccggcgccgcaccggccgctgctgctgcttccacgacggccacgcgcgccaccgccgcgcggttcctgccgtacgccgccgttgtcgaacacctctccggcgtctcgggcgtcgacgccgcccaccacgtcgccgaccacctcctcgcgctcttcggcgcggacgccagcgccaagttccaccgcgacgccgaacagccggtgcgcaccgacgacgacggcatcctgctgagcgggtgccagacggacgagacgtcggcggacgtgccgggggacgacgaggtggcggcgggcggcaaggcgtgcggcgcgttcagcaacgcgatacagaccgtgctggcgtcgcacctggcgccggtgagcaaccggcagctggtgagcatggccagggcggtgctgagcgatcaggggttcgagcagcacccgtgcctctactgcagcgacggcaacgccgagacgccattcctgtggcaagaggaggacaagaagaagacggttaccgcggcggcggagcaggccatgacggcgctctgaatgtgttcgacagaggaagattgattggtcaataccgatcattgggaaaaaataagattataattttaatcgtcttattcaatgccacaacaagttaccattgcaaatttgtatgccatcatgctgaaggaacatgtttattgatttttacaatgatgaatatatcatcagttcagtattgttac

SEQ ID NO: 2152 - DNA, 1107 bp, Oryza sativa
  ref <308>: DATABASE ACCESSION NUMBER: AK104211
  ref <309>: DATABASE ENTRY DATE: 2002-08-28
ctttctttcttgcagttgagttggggtgctacgcactagctactcaagtgcatgagctagctcaaacaatcgatcgatggcgatgaaggcggtgatcaagggcggcgatggcggaggcgggtgcatggtggtggtggcgcacgtgctagcggtggcggcgacggcgatggtgttggtgtggtgcgttcacttccgcggcggactcgccctgcgctcccacaacaagcagctcatcttcaacacccacccggtgctcatggtgcttggcctcgtcgtcctcgccgccgaggccatcctctcctaccgctccctctccatcatcgtcagcagcagggacgccagaaagaaggtgcacctggggctgcacgccgtggggctcgccctcggcggcgtcggcatctacgcggtgttcaagtaccacgccgaggccgacatccccaacctctactccctccactcctggatcggcatcgccaccatctccctctacgcgctccactggctcctcgccttcctcaccttcttcttccccggcgcctcccacgacaccaggcgctccgccgtcccgtggcacgcgctcctcggcctcctcgtcttcgcgctcgccgtgggcaacgcccagctcggcttcctcgagaagctcaccttcctgcaggccccgccgctgcgcctgtccaggtacggggcggaggcgctactcgtcaacttcacggcgctggtggtcctcctcctcggcgtcgccgtcgtcctcgccaccgccaacgtcgactccactaaatacaccgccatgtaattccattttattatacatatatttcatcatcttttctttattattactctacatataatcgatcgatctagctacacacccgtagtacgcagtgtcgtaccatatatacatgcatcgcgctgagtgtgtgcgcgcgcgcacgtgtcatgtggctttgtgtaattaattaattattattattcctcaattccatcgtgcatctttaattaccatgcatgtatatatatatctggccgagtgtaaatactatgtatgtatgtatgtatgtatgtatgtatgtatgtatgtatatatgtatggatacacacttacgt

SEQ ID NO: 2153 - DNA, 1049 bp, Oryza sativa
  ref <308>: DATABASE ACCESSION NUMBER: AK060055
  ref <309>: DATABASE ENTRY DATE: 2001-12-06
gaagcaaacaccaacaccaaaaaggggaaagcaagcaaatcgcaagcaatcgcgcggcgtcgccgactcgccggcggcgaatccaccgacgagcaatccagccccccaatcccgccgccgcaccaccgcgcatacgatccgccaggaaggaaggaatggcgtcgtcttcggatccatgggtgagggagtacagcgaggcgtccaggctcgcggatgacgtcacctccatgatcgccgataggggttcgctcccgcagtcggggccggagatcatgcgccacacctcggccattcggaggaagataaccatcctcgggactaggctcgatagcctcgaggccttgctgtccaggattcctcccaagtccatcacggacaaggagttgcataagcgacaagacatgctttcaaatctgaaatctagagcaaagcagatggctacaagtttcaacatgtcaaactttgcaaacagggaggatttgcttggtcagagtaagaaagcagctgatgatatgagtagagtagctggtttggataaccaaggaatcgtttcacttcagaggcaagttatgaaagaacaagatgagggtcttgagaagctggaagagacagtactgagcacaaaacatattgctctagcagtcaatgaagaacttaccctgcatacaagattgattgatgatttggatgattatgttgatgttacaaactcacgtcttcagcgcgtgcaaaagaggcttgctattctgaataagcgcgtcaaaggtggctgctcgtgcatggccctgctgatatctgtcgttgctatagtgtttcttgcggtcattgcttggcttctcatcaagcacctgtaacctgtgtctaactcaaatcagtttgaaatgtgcagtctttcaaagatgtggatgctcccatctcatctctgtttcgtgagagtgtggaaaatggaatataattgcaacaaatcttcgttcagaagatgtgcaaaaagtatgttgcaacgttgcattgacacttgccaacaatttgtatagagcgtattgcctttc

SEQ ID NO: 2154 - DNA, 1005 bp, Oryza sativa
  ref <308>: DATABASE ACCESSION NUMBER: AK104212
  ref <309>: DATABASE ENTRY DATE: 2002-08-28
ctttttgaggaagaaatcatggcgtggcagcaacccatggacggatcccacgcgagcgggagcaaggcggcggcggcggtggcggatggcccgggaacccagaggacgcagtatccttatgtgactggctcatcaattattgcactgaaatacaaggatggtgtcatcatggcatccgacactggagcctcatatggctcaactttgcgatacaagagcgtggagcgcattaaggctgttggtaagcatagccttattggagcaagtggggagttcagtgatttccaggagattttgcgctatttggatgaattaaccctgtccgatcatatgtgggatgatggaaactccttgggtcccaaggaggtccatagctacctgacgagagtgatgtacaacaggcgcaacaagtttgatcccctctggaactcccttgtaattggtggggtgaaaaagggtccaaagggtgaagagaaatatcttggcatggttaacatgattggtacacactttgaggaaaaccacattgccactgggtttgggaaccatatggcaatcccaatacttcgtactgaatggcgcgaggacatgacatttgaggaagctgtcaagcttgttgagaagtgcttgcttgtcctgctgtaccgtgaccgatcatctattaacaagttccagattgccaagatcacaactgagggagcgaccatctacccgccatactcattgaagacttactggggcttcgctgcctttgaaaatccggcccagggtgctgtaggatcatggtagatttatttatgctgcagaggctgaatgtcaggccatgaaccaggatgaagaaacaggctctgttgctgagaggccttgtgaaatgttttatctgaacatcaatgaaactccagatttgctttgtatgacattctgatcgtgcaacttagatttctaccttctgtggccgttaagcctggaactatattatatatgatgaaagtctgttttgtttcg

SEQ ID NO: 2155 - DNA, 864 bp, Oryza sativa
  ref <308>: DATABASE ACCESSION NUMBER: AK060056
  ref <309>: DATABASE ENTRY DATE: 2001-12-06
ttttgaaagaaggcctaaacttgctaaacagagtctttataccagcaattttgatgcgataagatgttgttaggatttagggcaacttattcttagaactttagcaatatttcctaccaaattgatgagcggtgagactaaacaccctttcatggtttctattgttccctcgctgggcttatgtttcttttgttgatttgactaggatttaacagatgatcagctgcttgtaggaattaagcttcgaattgacaagtccattgaaaaaaggaaaattaacacatggtctgagtaggatgttatgattgtttttttttttcctttctgacaggaggaatggatacatcagtcaaggaaggaggagtatgaacaagagagcaaggcatgcagataggaagacatcattcggtgaaccgaccaaactatagcttgctggcggcgttggatcgaccttgcctccagttgtttgccgtcatgccagtcctggaaggccatgccgttgtgccccatgtgcatcgcctccgcacctggctgtccgccgccagtggctgcggcctccttagggatgttgccgtcgggcgcgttgccatgcggcagatgaacgggctgaagcagcaatacgtatgaacataaggtgacactgaacttgcgactattgtgcttgtgggatgttattttgttgttgctgtgcttttggtcgttgtgctgttgctgctgtgcttttggccattgctctgctgctactgctgtgatgctattgcatatgtgctactgttgctctcgctatagcaggaagatgaaatttgagactttggatatgtattgaattggtggatggatgtaatgatattgcattttaagact

SEQ ID NO: 2156 - DNA, 756 bp, Oryza sativa
  ref <308>: DATABASE ACCESSION NUMBER: AK060057
  ref <309>: DATABASE ENTRY DATE: 2001-12-06
atcgcatcagcattcaacgaacacacacacaatcggaatcgattaagagagcaaattgtgtagtagtgttgcatatggagacaccaaagatatcgggagtagcacttgcggcagccattgccgtcgttctggccatggcgaccacgccggcggtggcgcagaactcgccgcaggacttcgtggacctccacaacgcggcgcgacgcgtggagggcgtcggcgaggtggtctgggacgacgccgtggcggcgtacgcggagaactacgcggcggagcgcgccggcgactgcgcgctcatccactccggcagctgggagaaggccggctacggcgagaacctcttcggaggctccggcagcgagtggacggcagcggacgccgtcaacagctgggtgggggagaaggatctgtacgactacgacagcaacagctgcctggggtcgtgggactcgtgcctccactacacgcaggtgatgtggagccgcacgacggcgatcggctgcgcccgcgtggactgcgacaacggcggcgtcttcatcacctgcaactacaaccccgccggcaacttccagggagagcgccccttcgagcgtggcctcactctctctgcttaataagttattaatacagtatttactttaactatgtatggagtatgatataaatgtgcgaaataataattacggggatcttattatatatatatgtacgttgtcgttcgaataaaagaagaaaataaatgagaaaattaattcc

SEQ ID NO: 2157 - DNA, 902 bp, Oryza sativa
  ref <308>: DATABASE ACCESSION NUMBER: AK060058
  ref <309>: DATABASE ENTRY DATE: 2001-12-06
atatccatattttccccttttccatccgcgagcgagggagtgagtgagcaatcgagatcgagatggaggtggcgagaggcggcgggaagctgaacccgtgggcggagcccttcgtgccggcgggctggtcggccacctactggcgctgcggcggcgtcgctgccgtggagccggctgtggccgaggtggaggacttctccccggagtggtggcgcctcgtcggctcctccccggccttccgcgaccgctggctccgggactactccgcgctgggcctcctcgacgacaacgacaacggcgacggctacgacctcgaggggttcctcctccccgacgacctcttctcctccacccctcatctggtgggagaaccggcggatgagaaggagggcaagggtttcggcggcgccggggggaagaaggtgaagggcgggtccgccgaggtggtggcgtggggcatcgacaagtggtggcgcgcgcactcctcgccgccggaggtgcccaggtacgccgacaaggcgcccaggagggtcgccgccgccgccgctagggtcaacccccgccccatccagcagccgcgctgagcgtccgtctccgccgccgcccgcgtaatcatccatccatccacccatcttgacaaacaagcagaaaaaaattagggaaaaaaaggttttgttttgttattttcgatctactcctagcttttttgctaatctcgtcgcgtcgtcatcgtcgtcaagatctgggttttggtcaggatctatggagctgcgagagatctcccctgtgttgtgtacagaatcatgtaaaaaaaatgctgatgtaataaagattgcagcgagagatttcgcagctgctgccttgtaatttccgagatatggatacagttcccctttcgtgtc

SEQ ID NO: 2158 - DNA, 950 bp, Oryza sativa
  ref <308>: DATABASE ACCESSION NUMBER: AK060059
  ref <309>: DATABASE ENTRY DATE: 2001-12-06
actcacacacacacgcaccaagaaagccaagaaccgatcagctttggtgttcgatcgatcaagacgaggcggcggcggggctgatcgagatggcggcgccgccggcgaggtcggtgagcgtggcggacagggcgctgcgaggggtggcggacctgatcaagctgctgccgagcggcacggtgttcctcttccagttcctcagcccgctcgtcaccaacaacggccactgcgccgccgcctacagcagggtcctcagcgccgccctcctcgcgctctgcggcgccttctgcgccttctcctccttcaccgacagctacgtcggctccgacggccgcgtctactacggcgtcgtcaccgccagggggctccgcacgttcgccgccgacccggacgccgccgcgcgggacctgtccgggtacaggctccgcgccggggacttcgtccacgccgcgctctcgctcctcgtcttcgccaccatcgccctcctcgacgccgacaccgtggcgtgcctctacccggcgctcgaggtcagcgagcgcaccatgatggccgtgctcccacccgtcgtcggcggcgtcgccagctacgccttcatggtgttccccaacaaccgccatggcatcggctaccagcccacccgcgccaccgaggacttcgagcacaagcactagatcgtcgtcgacgacgacgactaaattattaattaatttgggtgttttaattaattgatttcgaattcatcaaatcttaatttaaacattttatgtgtgtgcgtgcgtgcgtgcgtgcgtgtgttttgcaatgtcagggtttggtcctttggatttggagactcgagtcaaagtgtgaagtggctctgtgtacatgtgtgttcgattgtttttcatgtaatttgatactaggagctaccgctgaacataataaagtctacaattgtactgttttttttt

SEQ ID NO: 2159 - DNA, 928 bp, Oryza sativa
  ref <308>: DATABASE ACCESSION NUMBER: AK104213
  ref <309>: DATABASE ENTRY DATE: 2002-08-28
acaatcggtcagtcgcacagataacaccgtagtatcagacaagacctcatctcagtatccagccgagaggaaatcaaaggaagagaaggggaaaagcaatggcgggcaaggacgacgacgtgaaggtgctcggcctggtgatgagccccttcgcgatccgcgtatgcatcgcgctcaagttgaagggcgtgagctacgagtacatcgaggaggacctcgccaacaagagcgagctcctcctcagctccaacccggtgcacaagaagatccccgtcctcatccatggcggcaagcccgtctccgagtcgctcgtcatcgtgcagtacgtcgacgaggcctgggcgccctcccccacgtcgccctccatcctccccgccgacccctacgaccgcgccgtcgcccgcttctgggccgcctacgtcgacgacaagatggtccctggtatggttggcgttttgagggcggcgacggaggaggagagggcggcgaaggccgacgagacgctggcggcgatggcgcagctggagaaggcgttcgccgaggtggccgcgaagaacgggaagcccttcttcggcggcgacaccgtcgggtacgtcgacctcgcgctcggttgcaacctgcactttctcgaagcgatccgcaggttgcacggcgtggcgttggtcgacgccggcaagaccccgctcctggcggcgtgggcggagcggttcgtggaggtcgaggcggccaagggggtggtgccggacgcggacgacgccgtggagttcgccaggaaagtccaggctcgtgtagcagctgctgctgcttccaccgctgccaagtgagtggaaaatcgttttcgattggatcattgggtttcttgtaataaagaaaaaatcgtgttattacagtgccattttcaagtcatggttagtttatttgtggggtt

SEQ ID NO: 2160 - DNA, 1504 bp, Oryza sativa
  ref <308>: DATABASE ACCESSION NUMBER: AK060060
  ref <309>: DATABASE ENTRY DATE: 2001-12-06
atatcgaccagtatatatgaaaagtcacggaggaggccagcagccagcagccagcagccagcagaacacccagacggatattaatttagaatgagtattgtggtgagcaagtcagcgccggtggtcgtccggccatcggagccggccacatcgacggccgacaagatccttctgtcaactttggacaagcctgttgccacgataccagtgaccgtgctacttgcgttcgaccaccccatccatgacgccaccgcggagaccatcaagacggctctcgctcaatcactcgtccactactatcctatcgccggccgcatttcctgcgacaatgacgacggcggccatttctacatcgactgcaccggcgaggatctcggggtcacgttcgtggccgcgtccgccaactgcaccatggaggagctcatgtgtctcgtcgacgaccaggctcccgacgacgagacagcggtggtgcagcagctcgccttcaactgcacgcccgacgaccttcatcaccgtctgctgtgggtgcaggtcaccactctcaactgtggaggcttcgtcgtcggggtgacatggagccatggcgtggctgacggtcccggcatagcacagttcatacaagccgtcggcgagctcgcccgtggcctgccatcgccgtccgtcgtcccggtcaggttggacgacaagatcgcaacccaagccgtacctcccttcaccatggccgttcatcgcttcatatccggcctcaagccagtatcaaacctcgacgtacgcaacgtcaccgtctcatctagccttatcaaccacatcatcgtcggagctcgtcgtcgtgccaccgtgttcgaggcggtcgccgccgtgctctggcagtgccgtacacgggtggtgatgacggatcctgaggcccccgccgtgctgctcttcgcggtgaacgcacgcaagtacctcggcgccaaggacggctactacggatgctgcaccgccatgcacatggccgtgtccaagtccggcacggtggccaacggcgacatcatgaagttggtcggcatcatacgccgcgccaaggagcagataccggagcagctgaaggcagacgacggcgagatgatgctacggacgatggtaggggagaagcaggtgaatggatacgagagcctgctctacttgacatcctggcgaaacatcgggttcgaggacgtcgatttcggcagcgggaagacggcgagggtgatgacctacccgccgaggatgctgtccatgatgcccaggattgcgcccatctgcttcatgctcaaggccacagaggaaggggtcagggtcatgtcagactgtgttacggctgaccacgccgatgccttctatcaagaaatagccaagctcaaagccaccacctgattataactatatatgcgagctatctataccttcttcaatatgccaattatgatttatctacaataaaaatttgaatatatataccgtgcaagagcatgcatgaacaagt

SEQ ID NO: 2161 - DNA, 1073 bp, Oryza sativa
  ref <308>: DATABASE ACCESSION NUMBER: AK060061
  ref <309>: DATABASE ENTRY DATE: 2001-12-06
gtcacaccaccacgtccgtttccgtactccactcgtggcaggcaaaccagcagcattcgagctgatggctgctctcgcggtggtgcacggttggctcgctccagcgttgtcccggcgcgcggagacgggcggtggccgcgccgcgcttccgtgtcgtaggccccggctcgtggcagtcgcgtgcgctgcctcgtcggttaatacggccactactacgggcgaatcgccgctgggctccgatggctcggcagccgccgccatgtcgctggagcgcgcgttcgccggaggggacggcggtggcggcggaggcattggccccgcggtcgagtccaccgttgagaagctgatattcgatttccgtttcctggctctcctcgccgtcgccggctccctcctctgcttcctcagtggttgtgtgtacattaaagaagcataccatgtctactggacaagctgtgttagaggtgtccatacagggcagatggtcctcaggctcgtcgaggctatcgatgtgtatcttgctggaacagtcatgctgatttttgggatgggtctgtatgggctgttcatcagcaacgattttcctgatgtacctgcatctgatcgtgctctcaagggatcatccttgtttggcatgtttgctttgaaggagagaccgaggtggatgagaatcagctctctcgatgagctcaaaacgaagctgggccacatcatcgtgatgattctcctggtgaagatgttcgagaggagcaagatggtgcacatcaccacgggaatggacctgctcagctacgcggtctgcatcttcttgtcgtcggcttccctgtacatcctgcacaaccttcatcgcccagaacacgagtagtacatgattgcagcgccggacatgttgccttctactcagtagtattttttatagcacatgccatataggaagaactcattgcctcagtgcttgtattttgtagcactagaactgttgctaggcaagccctgatgctgggcttaaacggattgcaaggacaaatcagtgtaaagaactcctaaacagccttatcttttcgtttatgctt

SEQ ID NO: 2162 - DNA, 1221 bp, Oryza sativa
  ref <308>: DATABASE ACCESSION NUMBER: AK104214
  ref <309>: DATABASE ENTRY DATE: 2002-08-28
atgacaacaattagtgacggtttttcttttgtgacacatatagtgtaggtttacttccagcttcgtcgattaccagacggcaccggcgtcgcgcgagcgagcttgatcttgcgccttgtgcctgctagctgcttcggcggcggcggttatcttcttccgatctgtaacagccccgatcaagaaaggatccaacccacctaggaggactaacctgaacgtgctaatgagttcaaagctagtaacatcacctctgaaatccatggagcagggccatctagagcaacctctgcgcgatccgcaggcgccggcggagcagcatgacatggggttatctcccctgacgctcctcggcttcgccttcctgaccttcaactcgggaatggcagtgtacagatcagatagagacttggcaaccatcttcttcgtggtcttctcctacgttgacctcgtatcgctcttctacttcctccgattatttgagaagacgccgccggagtcgcctcgccgccaccacatcaagacggcggtgtggctcctgacgacgatgctcaccgccgtgttttcatataaagtggcggccatcatgcctttcccggttcaggtgctggtttgggccatggccgcagcaactgtgcttggagggttctacgcattcttcctccactccgatgaaaaaaagcctattgagggataggcaaaatacttgatagggctttctggctgtttggcatttgtcagacgccctgtgtgtggtaacatctcgatcaaattggaggtcgaaattaaatatatccggtgagaagagatcacgagatcgatcgctacctatatatcacagatagaaatcagagtcctatcgatattttcgccgagcatatataagtagtgctgtcgatggcgagcccaattcgtgctttataaaaacagaacaaaaaaaaagaatatgagtttgtgtgcgtatcattttttctgggttaattgtattttgatcaatcagcatgtacctgtaaaatgaggtcgtgtagatcatgtgctaccgtactgtgtcctgtttttagtttttcctttttttcttcttccactgtttacatttctacttgtctgcgtctagtcactgtgtgctgttcacccagcacaaagtgagcaagcatgacactgtacccctcttttttttcattcttgaaccctaataagcaccggacacacatatttgcttgtacc

SEQ ID NO: 2163 - DNA, 989 bp, Oryza sativa
  ref <308>: DATABASE ACCESSION NUMBER: AK060062
  ref <309>: DATABASE ENTRY DATE: 2001-12-06
aattccttcccaccaccggccacctctagcgtatcgcctggtccttccatgccatgcctgctggtcccccaaccccccatctccaagctctttctctccctgctggctccccatcttcacctcgtggcggcatctggtcatgcacctcggccacagcgcagctcgagcagtcgacggggtggagtggcctcggcagcggcacggattggactcggcgacggtggtatacttccggtcagtctctcgtccggatctacttccgacaagcctctcgtccggatctagggccttgcagcggtaatcactggatctggggtctccgcggctggatgccctctcctgcttcgtcgttgcggtggcaatcaccagatctggggcctctgcgcctggattcggttgatgggagttttggagcgaggatggaggtgtgtttgagaataatcacccctcgtctgctgactcgtccccatcgcccgaccggtccacggggttccaggcaacatgcatcgcggcgtctcggcatggagggtgcacagtgttggggttcagctacggcagcttcgtggtgttcgttgcctgctgtggggtgctttgtgttgtggatagtgggcgtggaccagaagctgattatgtgttttcaccgcgcgaaattggatccaagagtggggatggtgatgcagatggcgtggtaccagcatcaagcatgtgtgatggagctgtgcatttatattgtgataggaactcagaaacttcaactaccaagacaggagatcaagatgtctagaatggcattgtgaatttgtgatcctcaatacaattgaagttgttcacggagctgctcttggcacgatggcttctttggtgatggagcagagctcttagaatgtcttttgatcacaccacaagaacgaattttatttgtggtaccagttttgtttgtatatataggaggataggatgtatgcagcgttcttgtggtgttcggatgt

SEQ ID NO: 2164 - DNA, 983 bp, Oryza sativa
  ref <308>: DATABASE ACCESSION NUMBER: AK060063
  ref <309>: DATABASE ENTRY DATE: 2001-12-06
agcagcgagcagcgatcccactcctcctcctcctccccttgttcgtcgtctccgcggaatcgatcgcgccgcgcgcccacgcccttcctccctcccggatccggcgcgtaagagtaattgacctttgaagttctataagatgggtcgtggtgttagcagcgggggtggtcagagttccctgggctacctgtttggtggtggtgaagctccgaagtcagctgagaagcctgctccagttcaaaagcctgccccttcgtcctctgcagagaagctgaaagagatcccagccggtattcaaagtagtaaggcgaacaattacatgagggctgaaggtcaaaactgtggaaatttccttacggaccgtccgtcaaccaaggtgcaggctgctccaggcggtggttcatcacttgactatctcttcagtggcaacaaggatggcaagtgacggtcactctgctgtccggtttaccatgagctctggatgaaaggtttctgctcaacaaaagcatgttttcccatgagtaactaactatccaatgtatctgctcatggtatgtcacagaaactgttgttatgtatgcatgtgtctgtgcttattctgtgttgatgtatgcgtgtgcttatcagcagctacttgtgcaatgaactgatggtatgttcatcctgttgcatgttagttcatggaaccgggtctttatgctaacattaatgtgcttgcttctttaatgtataataactgtgttctagttgtgtcatacccctcggattggacatggttgtggtttgatgctcattgttgaagcaagaaatgtctctgttctgggtggcatatttgtgatatgttttccacatgacccatgttctgtgtgtttgctgctttaatgtgtaataactgtgttctagttgtgtcgtacactcgtacccattagattggacatggttgttgtttgatgctcattgttgaagcaagaaatgtctgtgtt

SEQ ID NO: 2165 - DNA, 1138 bp, Oryza sativa
  ref <308>: DATABASE ACCESSION NUMBER: AK060064
  ref <309>: DATABASE ENTRY DATE: 2001-12-06
cacgcgcagtgtcgacttcctctcggccgcgctagggacccacgccgccgccgccgccacgtccgccttttccccgctccgctgctcgcctccccagcctccgtccgtgctcccctaaaagcaggaggcggccgccgagaaggagaaggcgccgcgaagagtgagagcggggggctagacctagtgcaatcgagccttcatcggcgccaccgcgggccatcgcgtggttagccgccggagtcgggggtgggggggatgccgcgggagccggccgccatgcgcgtctacacggtctgcgacgagtccaagtacctcatcgtgcggaacgtcccgtctctcggctgcggcgatgacctcgccaatctcttcgccacctacggcccagtagacgagtgcacgcccatggatgccgaggactgtgacccctacaccgacgttttcttcatcaagttctcgcaggtcagcaatgccaggtttgcaaagaggaaattggatgagtctgtatttcttggcaaccggctgcaggtgtcatacgcccctcagtttgagagtcttctggacactaaggagaaactggaagtcaggagaaaggaagttcttggccgaatgaaatcatcttctggaagacctgaagggttatctcatcattctccaggtcagggatcatctgctgcaaactcacaccgtcagatgagctctaataaaagggaatacacaaaaacacttcatgcttctcaatttgaagatcctcgtttcactcatgtatcctctaataaggattattttccatctgagtcgatgaatgcaacagtaaacctagtcagggagaagcttgataagatacaatccagcagcgacaattccagtgctatagttgcacccaagaaaccaaggaccgataaccgtagacgaatttgatatcatgggatggagtagaacatgcatttttttttcttcatctactttcttgtagtttgttttataattggcagaaaatagtgtactataatgctaaatgctgtctatattctccctcagttgtaaaagtatccccttttaggttttctgcggaagtaacgttagtatcatgttttgacgtggattaatgtcatgtttgatgagcacatttctcttcgtg

SEQ ID NO: 2166 - DNA, 1129 bp, Oryza sativa; identical to SEQ ID NO: 1707
  ref <308>: DATABASE ACCESSION NUMBER: AK104215
  ref <309>: DATABASE ENTRY DATE: 2002-08-28

SEQ ID NO: 2167 - DNA, 1365 bp, Oryza sativa
  ref <308>: DATABASE ACCESSION NUMBER: AK060065
  ref <309>: DATABASE ENTRY DATE: 2001-12-06
gttccctcgcattttcccttccattttcacactttcacacacccgcgccacacgagggggtacataagaccgagctcgaagtctcaggagagcgtggaagaggaggcagttgctcgtttttgtgtgtgagagaggggagaggccggcggcgatggggaggacgctggacgtgttgctggggcggacgacgaagcagacggcgaggctcaagtcgatgctggggctggcggtgacgcggctcggcgtgctgcgcgggcacaggcaggtgcggtgcgcgcaggcgcgcggcgacgtggagcagctgctccgcctcggccaccccgaccgcgccctgctccgcgccgagcaggtcatccgcgagcagaacacgctcgacgccttcctcatgctcgagtcctactgcaatctcatcaccgagcgcgccgccctcgtggactcgcacagggagtgtcccgaggagctgcgtgaggcggcagcgggtttgatctacgcggcggcgaggtgcggtgacgtgccggagctgcaggaggtgaagcgcctcatggcggccaagttcggcagggagttcgtctcctccgcggccgagctccgcagcggctgcgggatcaatgccaagatcgtgcagaagctgtcgaccaagcagccgagcctggagagcaggcagatggtgctccaggagatcgcggcggagaaagggatcgccggcgtcgtggtgcacgtcgtccacgagccttcttcccacgacgaggactcgggcctcagccacaggaggcggcggtgcgacggcgagaggcggcacagggtccatcaaccccaggtcgacctggaggaggacggctcttcgaggtacaggaacgtggaggccgcggcgcaggccgcgttcgagtcggcggccaccgcagcggccgccgcgaaggccgccatggagctctcgcgaggcgaatccgggggccgcgacgacgacaggagacggccgggaggcgcgcagttcgacagggccgacgaagagacgctcgccggcggcgaggtttcgggtgatggcaagaaatctggcaggatcagacgtgccagcctcggccggaactacagttcagagatcgaggattcagctgaggatgatgaagtggtccgccatgagatcactgcagagagcgaggtgaaaccgcggggtctgaccaggagcgtgccggtatcagtcagaacaaagagggtgagttagctgcaaccagatggcaacaagagtgatgggagatgatttcttgaattcgtgatattagcagctgctattatatttttgcagattcatcgttcgttagatcctaggcctgtaggccattgcatgcatgtaattaaatggagccaaac

SEQ ID NO: 2168 - DNA, 971 bp, Oryza sativa
  ref <308>: DATABASE ACCESSION NUMBER: AK060066
  ref <309>: DATABASE ENTRY DATE: 2001-12-06
caagccaaagcgcacgccaagtcgctaataccaccaccgccgccccgtgacgacctcccctccccgcctccgatctccggccatggccgcgcgccgccccggatcgcccgctcccaggtgggcgccatggcccctcctcgccgccgccgccgtgctcctcctcctctcggccgcgccgcggacggcgcgcgccctccggttcgacctcgagtccggccacaccaagtgcatctccgacgagatcaaggtcaactccatggtcgtcgggaagtaccacgtcgtcggccccgaccccaacttccccgacaaccctctccccgactcccaccgcatctccctcagggtgacgtcaccgtacgggaacagcgtgcactacgcggagaacgtgccgtcggggaacttcgcgttcacggcgacggaggccggcgactacctggcctgcttctgggcgcccgaccacaagccgccggtctccatcgggttcgagttcgactggaggagcggcgtcgcggccaaggactggtccaacgtcgccaagaaggggcaggtcgatgtgatggagatggagttgaagaagctagaagaaaccatcaaatctatccatgaagaaatgttttacctacgtgaaagggaggaggaaatgcagaacctgaacaagcaaacgaactcaagaatggcatggctcgggttcctctcactcggaatctgcctatccgtcgcggggctgcagctgtggcacctgaagaccttttttgagagaaagaagcttctgtagttcttctccaagatcaaaagaatatattgcagcacgaaagcggctaggtgtacttttttttgtgtcaagtttatgttgcttagcgattacttgtaagcaacgatgtgtattatactctataaattatatttaaccgtgcgccctagctttgtccagttgaaagttggaacagttgtaaaatgtcatcaggttgatc

SEQ ID NO: 2169 - DNA, 1139 bp, Oryza sativa
  ref <308>: DATABASE ACCESSION NUMBER: AK060067
  ref <309>: DATABASE ENTRY DATE: 2001-12-06
acaccgaaccatctccgcttccgcggcgcgagccactcgtcgctcgaattgcccccatccacacagcttcccccgcgcacgcgagagggaggagctcgtggcgccggcggccatggccggagcagccgcggcgagctccgccgcctgctcatctccggctccgaacccgacaacgcgatacccggttaggaggcgcgtgccgcggcctccacttgtggcagccagtcgtcactgcaccgcttcaccttttcccactacaatctccatctccagctcgggtctcggccaggctcgtcctcgcgatccgtttctaaaccctcgccttcgatttgcggctgcggcggcggcggcggagggggagatggctgcggaggcgagcgccgcggcggcagagggggcgcaggcgaagcccttctccgtcctcttcgtctgtctcggcaacatctgtcggagccctgcagctgaggctgtgttccggaacctcgtgagcaagcgtgggcttgagtccaagtttctcatagactctgctggtacaattggttaccatgagggtaacaaggcagactcaaggatgagatcagcttcaaagaagaggggaattgaggtgacctccatatccaggcctgtcaaaccctccgacttccgagattttgatcttatccttgcaatggataggcagaattatgaagacctactcagttcatttgagagatggagacacagggaacccctcccagacagtggacccaagaaggttaagttgatgtgttcctattgcaagcgtcatactgagtcagaagtcccagatccgtattatggaggccctcaaggatttgaaaaggtgctggatctgctggaagacgcatgcgagtcattacttgacagcatcgtggcagagaatgcaagcgtttctgcttgatctcaatgaagctatctggaggcaatgtaagcatcattttttctatgtaaccatgatcagaatctatctatgccatttgattgcgattcagataaccagaaacactcacatcagcatgcatgtacccatgttcatacaatgtcaggctggagacatatacttatatctttcatgtacaccatgatttacactgtaataaaatcaccaactcgaattagag

SEQ ID NO: 2170 - DNA, 1126 bp, Oryza sativa
  ref <308>: DATABASE ACCESSION NUMBER: AK060068
  ref <309>: DATABASE ENTRY DATE: 2001-12-06
catactgatgttggcgatattgcccactgccatcaccctgctgcttatgtattttgtcgatgtccaccgttctgatcatcaacggtacaacaagaagttcatggatgctttctccctcattgccattactgttgctggttatctaatgatcatcataatctgtgaccaagtattgaagataataagttcagctgtgcagactgtttgctttgtgatactcctactgttggtcctgtctccagtggctattgctgtgaaggcccagaagacagaatcaatgaagcaagaagaagaaaccagggatcaagctgaaagaatcggactactccaagagcaaattagtacaaatgccagctccagtagcgatgagcgatgtcaagaactgtcgacaggcaaagaaaacatgaatctggtgcaggcaatgtgcaagctgaacttctggctgctgttcctagcaatgtcctgtgggatgggatcagggcttgcaacggtgaacaacatcagccagatcggcggctccctcgggtactcgaccaaggagacgagcacactggtgtcactctggagcatctggaacttctcagggaggtttggtgccggctacatatccgaccacttcctccgttcgcggggagtcggtcgccctttcttcatcggcgtcacgctcctggtcatgagcttgggccacgccatcatcgcctccggcatcctggcgtcgctctacgtcgggtcggtgctcgtcggtctttgctatgggtgtcagtgggcactgatgccgagcatcacgtcggagatattcgggctgaaccatttcggcaccatcttcaacgtggtggcggtggcgagccccgtgggatcttacatcctctcggtgagggtggtgggttacatctacgacatggagtcgccgccgggagctcgtgcctgctccggtaaccattgcttcgttttgtcgttcgtcatcatggcgtgtgtctgcgtggttggctctgctgtcgccttcatgctcttcgtcaggacgaggaggttttataaacgggttgtgtacgccaggttgcaatcttttctatagagagagaaacgaaccgattcttttctagcaaatgcttacctatcttttacaagc

SEQ ID NO: 2171 - DNA, 1012 bp, Oryza sativa
  ref <308>: DATABASE ACCESSION NUMBER: AK060069
  ref <309>: DATABASE ENTRY DATE: 2001-12-06
agaaaagaaaaaaaaagaaaagaaaaagaaaaaccgagtcgtctcgtctccattgcggcggcgcgagctttggactcgtcgtctccgtcccgcgcgcgacgagcgcgaccagcggccgccggcgtctgctgcttgctcgcttgcttgcttccgccccgccggcgccctcgcttcgctgtccgctgtgttcaggattttgggataaggctatttgttatttctcaaaagtgtaaatgggttcagaaggaccttcagttgttactgtacatgtgactggatttaagaagtttcatggggttgctgagaacccaactgagaaaattgtgaccaatcttaaatcattcgtggaaaagaaaggattgccaaaaaaccttgtgcttggaagctgcacagttcttgaaactgcagggcagggggcacttggcacattatataaggttttggaatcttccattgcggaaagggagaatgggtcatcggctcaggggcaagtaatttggatccactttggagtcaatagtggtgcaacaaggtttgctcttgagaatcaagctgttaatgaagccaccttccgttgtccagatgagctagggtggaaacctcagagggctcccattgtgccatctgatggaggaatctcacgcacaagagagactacccttccggtaaatgagttaaccaagtcactccggaagacaggctatgatgtaatgccatcagacgatgctggtcggttcgtatgcaactatgtgtattatcactcttttcggtttgcagagcaacacggcatcaaatctctgtttgtacatgtgcccctgttcttgacgatcgatgaggaggtccagatgcattttgttgcttcccttctcgaagctctatcttgaattaggaagaaaaatacaatttaaggttggaagcggactgaataaaattgtattgtcatcgatgatattggtcttgctccaacgggtgtatttaaggggaaatggctgcttagagtgtgttcttggtg

SEQ ID NO: 2172 - DNA, 1212 bp, Oryza sativa
  ref <308>: DATABASE ACCESSION NUMBER: AK060070
  ref <309>: DATABASE ENTRY DATE: 2001-12-06
agacgccactgcctttccccttccgagcagcagcggccgcttcgcttcgcttcgtttgcttcgttcgccggccgccgccgcccaccacctcgtcgcgcccgccgccgtgtcgccgtactactcggctcgcgtgtcgccggggttcctccgcctccacgacttcccccgatccgtcggcctggccgccaccgcggccccgaggattttttgccaatctatcaactcggctgatgtcttgggtgcttcttcaacgacatctgatgatgcaattccacagccagttgttctgatagatcaagactcagaccgtgatgcaaccatagtgcagctgagttttggagaccgtctgggggcactacttgacacgatgaaggcactcaaggacctgggccttgatgtgacgaaaggaagtgtgtcaactgaatcagctgtcacacaaacaaagttccacatcatgcgatcggggcgcaaagttgaggaccctgacacattggaaaagatacggctaacagttattaacaaccttctgcagtatcatcctgaatcaagtgagaatttagccatgggtgaattttttggaataaaagctcctgagaagaaggttgatgttgatgttgtaacacatgtaattgttgaagatgatggacctaaaagaagcatgctgtacatagagacagctgatcggcctggtctacttctggaaatagtgaagatcatcactgacgtgaacgttgatgtggaatcagctgagatagatactgaaggcttggttgcaaaggacaaattccatgtgagttacagaggtgcaaaattgaacagctcattatctcaggtgctcgtgaattgcttgcgttattatctccggaggcccgagacagatgaagacagctactgattcttatgaaaacccgggctttgagttcctttctgcaagcccattgtgctgatttttcggttgtagtgaacaaaaaacgtggtacatttgtcctcaaaatgcatccgtatattatgctttacgtaggatgcatttaaaatcgggccagatccgggagattcagctcaatatggcccgttatcatcaccattggttcctacagtagtagaggaatcacattgggactgggaggccatcacctgatggatgctgtctgtaatttcctataattcgcttgaacctgtcgaaatcacaaggatatgcatacattacatggc

SEQ ID NO: 2173 - DNA, 1218 bp, Oryza sativa
  ref <308>: DATABASE ACCESSION NUMBER: AK060071
  ref <309>: DATABASE ENTRY DATE: 2001-12-06
ctccctcgtctcgcccgcctccgttccgcctttggtccagatccacgcgtgttgcggacttgcggttgcttttgttcgtcttctcccggagattcggcgtgttcgtgctgcgaaatccgaactacttctgctgctaagatttctgccgcgtgctaatggcggaggaagggtacaaggttgttcttaacgtgtacgacctcagcaacggcctcgcgcggcagctctccacctccttcctcggcaagccaatcgaggccatctggcatacgggcgtggtggtgtacgggaacgagtacttcttcggcggcgggatccagtcgctggcggcggggaggacgccgtacgggcggccggtgcgggtggtggagatgggcgagacgcacatcccgcgggaggtgttcgaggactacctccgcgacatctcgccgcggtacacggcggagacgtaccggctgctcagccacaactgcaacaacttcagcaacgaggtggcgcaattcctcgtcggcgccggcatccccgactacatcctcaacctccccgccgaggtcatgtccagccccatgggccccctcatcatgcccatgattcagaacctcgagtccacgctccggaccaacgccgcgccgcaggccacgcagttcgtcccctcgtccgtgccgccgccgccgccgccgcagaacaagcccggcgagggctcgtcttcctcgaagcaagaagacaaggcggccaaagcgaagcagggctcggcggctgacccgctcggcggcgcgagggggaaggtgcaggaggaggtgatgcgggagttcgcggcgatcatggcgagcgggacgctgcgggcgagcgaggcggcggcgctggcgatgcggcgggtcatggagcggcacggcaacgccaccatgcagcagagctagacgagagagacacacacaccaccatacattcgacgcgatgatgcgtgtcgcaatcgcaattaccgagtttttacggagtagttaacttctttatgaatgagaaggtgatttctgtagcgtattgattgtttgttactgtgtgtgaacctggactgttctgcttaaattcgataatctttctcttgtctactatccgatggatggataacgataacccattctccattattgaatagacaaagcatgtttgtggtgtctggtgatcagactgttaactgtgatactactattgtcgatttcattc

SEQ ID NO: 2174 - DNA, 956 bp, Oryza sativa
  ref <308>: DATABASE ACCESSION NUMBER: AK060072
  ref <309>: DATABASE ENTRY DATE: 2001-12-06
acgccaggcaaacccacacgccgccttcccgccgcctccgctcttcttcccccaaccgcgtcgcaagcccacggcgagcgccgccgccgtcccaccgtcgccgatgacccgcggcgtcgctatggcgcacgcgaggctcctcctggcgcgctactacgcgatggcggcccccagttggcctaccgtatccaagaaccttccgctgctgggccatggacgttctcatcatccgatgtatgcaagtcaagacgagattaaaatgtcaagtagaagatggtgccatggttctcctgacaatcaagagctggcaaagaagatttgtgttccatgcaattctaaggatatacatgccatgccagaagattctgctaagaagatgctagaacaggtgggtggttgggaattagcaaccgaaggtgacattctgaaattgcacagagcatggaaggtgaagaattttgtaaaagggcttgaattccttcagcttgttgctgctgttgctgaggaagaaggccaccaccctgatcttcatcttgtcggttggaacaatgtgaaaattgatgtttggactcactctgtcagaggcttaactgacaatgatttcatccttgctgcgaagatcaataacctcaacttagaaggcctcttaagcaagaaagctacagtccaaaagtagttcgcgcagatgaagcgattgatttctgacgagatttatgtacttgcttcggttagaatgcgtgagttgaggtatctttaacttgataagcttttcttgaatttgtaccgggagtttctctgttctttctaaattttaccaatgctgttggaccgggtctacttctgttacagaatgtcgagaaccaccataatctagatttgatcaaggagaacctgtttctcttacatgtgggccaagagatgtagggtccacgaacattttagagtccaccacacct

SEQ ID NO: 2175 - DNA, 1109 bp, Oryza sativa
  ref <308>: DATABASE ACCESSION NUMBER: AK104216
  ref <309>: DATABASE ENTRY DATE: 2002-08-28
gtgctcagtttcactcttatcagtgaattagatcatatacttgtgtccttgatagctcgttaattagcatggctaggtcactcgctgctgtcctactccttttggtcgccgccgcgggagccagccatgccgcgtcgccggcggagatgtactggaagatcgcgctcccgacctcgccgatgcccggcgccattcgcgacctcatcagcccagcgagctcagtgggctcagcttcgaaggaggacacggtgggcaacgtgttcttcctcgagaaggacctcttcccgggctccaagatgacgctccacttcacccgcgccaccgccggcgccgcgctgctcccccgcggccgcgccgagtccgtcccgttcgcctccgaaaggctcccggagatcctctcccagctctccatcccggccgtctcgccgaccgccgacgccatgtggtccacgctcgccgagtgcgaggccgcgcggctcgccggcgagacgaccaagcacaagcactactgcgccacgtcgctcgagtccatggtcgagttcgtcgcgtccagcctcggcacccgcgacgtccacgccgtgtccacggaggtgatcagcacgttgacgccgacgccgaggcaggcgtacagggtggaggccgtgaggcccgtggcggtgcccggcggcgacatggtggcatgccacgggatgccgtacgcgtacgccgtgttcgggttgcacgggctcaagggcgcaggcggtggccgcgtgccacggggacgtggacgggcacggcgcggtggcggaggcatacaagaggctcggcgtggcgcccgggagcgtggccatctgccacttcctgcctcaggacgacatgatctgggtgcgcaactgaattaatgaagcagctaccttgcgcgccatccatggctaattattttagacatgctccttcctatattttggatctacctgccggctatcatgttatcataaatttacgcgtgtgcgcgcgacgatccgacatgcccacactaacgtgttttactttgttaattaataagtctgcatacccaggtcatcttgtacggtgctactccctctatcccgaaataaaacaacttatag

SEQ ID NO: 2176 - DNA, 909 bp, Oryza sativa
  ref <308>: DATABASE ACCESSION NUMBER: AK060073
  ref <309>: DATABASE ENTRY DATE: 2001-12-06
tgcgcccattccactgtctccaatctcttcccttggagccatcaatccacattactgtcatgttgatgcatctgtcccagccatggaagcaattcagaaggtccctccagatccaagtgccgtagctgtagtcgagactacaccagatggaactcgcaagatattaggagatatctctgcctacaagctgtggaaatgtgactatgttgcggctgcatgggcactgataaacctatcggcggggcagtttgtcattggtgccgacgataacgaatcaacaccgatctcagccatcccagtgcctcccatcagctcatcactagtggaagagatcggacctgggcgctcacccagggcaaagaagttcagcagcaggagcatcgggttcctgaacagccaggcgcaccagatggcgttcggtcgaatgaggagcatgtaccgcgggaggagcgcgccgctgatgtgcaagagcacgagctcactcgcagcggtcatggcgcagatgctgtcccaccgtgccacgcatgtgtgggtgacggacgcggagtcggaggaggatggcgtgctcgtcggcgtcgtggggtacaccgacatcttcaacgcggtcaccaagagcgtttatccggcagcatcttgaatctctggatgcttgatccgtaccgtttgctccgttggtggttccttggttggccctagtgcgtgccgtgaactgtacactgcgcctggttggttcttttttgtctttcgagagttggggagttttttgtccgcatgagactgaaactgaagggtatattgtgaattccttgtggatcggtgctactatggcagactcaggcttgtgctttggtacggtggaatgatagtctactcattcgtatatgtataatgtatcgtttctctgtgctc

SEQ ID NO: 2177 - DNA, 992 bp, Oryza sativa
  ref <308>: DATABASE ACCESSION NUMBER: AK060074
  ref <309>: DATABASE ENTRY DATE: 2001-12-06
attccaaccttccaacccaacaacctcaaccctcctccctcagtatccccccaagaacgcgaggagccgagtccgtactaggcccaggtcatcttttgttgtagaggcgatgcagacggcggcggcggcggcggtggcgtgggcgccgagcccatcgccgtccacctccacctcatcgccgccccccttcaaggtggggatcgcgtcgccgtgtgggacggctgctcacgcctcctccgcgccgaggttggttgctgcggccactcaccgggggcggcggcggcagcagcaagtggttaaggctattgccaacccagacccagcagttgagctgccattgacagctgaaaatgttgagattgtattggatgaagttcgaccataccttatggcagacggaggaaatgttgcattgcatgaaattgatgggaatgtggtgaggttgaagctgcaaggagcatgtggatcatgcccagcttcagtaacaacaatgaagatgggtattgagcgacgcttgatggagaaaattcctgaaattgttgctgtcgagcccattgctgatgaggagactggccttgagttgaaccaggagaatattgaaaaggtactcgatgagattaggccatacctttctggcacaggaggtggtgagcttgaattcgttgcgatcgaggaacctatcgtcaaggttaggcttacgggcccagctgctggtgtgatgacagttcgcgttgccctaactcagaagctcagagaaaagatacctaaaatcgcagctgtccagctattgtcgtaagcctgaaaacatttagaaaacaacccctgcaatgtaaatgtgccgctacaataatcgccaggaaagattgtaatgggcttaaagctttgtaacctgttactctattctacttgaactacgaatagtgatcatcaatatgaaatgttgtaagggtgttcctactggatttatttacaaaaggttttgggcttctatg

SEQ ID NO: 2178 - DNA, 1186 bp, Oryza sativa
  ref <308>: DATABASE ACCESSION NUMBER: AK060075
  ref <309>: DATABASE ENTRY DATE: 2001-12-06
ctgctgctactgcttcaccgagccgcaccccgccggcggcgtcgcggccgccgtcaggctgcgactgctgccgcctgcccgcgccgcgaatacctcctcagagccggcggcgcggctgagggcggttctcgagcaggtggacgaggagctgcggaaggggaacgacgaggccgcgctgtccctcgtgcgcggctcgcagggggcggatggcgggctccggttctttggcgcggcgaggcaggtacctcaaagactttatacattggatgagctgaagttaaatgggatcgatacttctgctttcctatctcctgttgatctgactttgggatcaattgagagaaatctccaaattgctgcagttctaggagggctctctgtatcagctgcattcgagctttctaaactccaagttctgtttctgtttttgggtctactatctctgtggtcggtggatttgctttctaggtatatttcggtggtggagtgagaaacttgattcttgatacaattggtcacaatcttagccagaagtatcgtaatagagttattcagcacgaagctggccacttcttgatagcgtatttgcttggggtccttcccaaaggatacactatcacaagtttagatacattcataaaaaagggctcactgaatgtgcaagctgggacagcttttgttgactttgagttccttcaagaggtcaattcaggcaaactatctgccacgatgttgaacaagttctcatgcattgccttggctggagtagcaacagagtatcttttgtatggatatgctgaaggaggactagctgacattgggcaactagatggattgctcaaaggtctaggtttcacccagaagaaagctgattcacaggtgagatgggctgtgctgaatactgtacctgcactgcgtcgccataaaaaggccagatcacagctcgcggaggcaatgtcctctgggaagtcagttggatcttgcatcggggtcatagaagagaatataaactctgaggatatttagttagtgactataaagatgatggaaaatatagatcacatatgtacaaactttcacaatggactgtaccttttaacttgggctttgtatttagtctgttagcaggaaatacatgtcaaaatcatggtttttattcagtttcatatattaaacgtttaagtct

SEQ ID NO: 2179 - DNA, 966 bp, Oryza sativa
  ref <308>: DATABASE ACCESSION NUMBER: AK060076
  ref <309>: DATABASE ENTRY DATE: 2001-12-06
acacacatcaccagccacaagctactccaagcttagcttctccaagctccaagaagcttagcttagcttagcaacaatttctctgtcatttctatatatatatatcgatcgatcatggtgagctcactgaggctagccgagatctccaggaagtggagcgggtcagggtcgagcaaggtgacgtcgccgacggcggcggcggcggcgtgcccgcgggggcacttcgcggcgtacacccgggacggcagccggttcttcgtccccatcgcctgcctcgccagcgacaccttccgggagctcctcagcacggcggaggaggagttcggctcccccggcggccgccccatcgtgctcccttgctccgccgaccgcctccaccagatcctcgccgccttccgctccgcctccggcaagaacaagtgctcgccgccgtccggctccggcggccgcgccggcggcaggaccaagatttggtagtacacatatatatagctctgaaagtctgaactctctctctctctctctctctctctgatgatggattgatgatccttttggagatggaggagaatgaagctgatcattgatgatctaattaatctaggtatttgtgttcggattggtgatccatgcatgacttgattcttgggagaattggtgatgtttgatttgttgctattgatcgatgttcattaatttttttgtatgccctcctggtgagtttaacgcgtgcctgtatgtgcacgttacatgcgtaatgttgcatgttttcaggagggcatgtactggctgccatgatgtaacatatcttcttaattagctttatatccggctttgaattttctagatgtgagtacgtactttgtaatatcatcagtgtgtaattatgtttgcaatgtatgatctctgtaatatgtgtggcacatttccttcttttgtgtttataagatgagacagtgcaaatgg

SEQ ID NO: 2180 - DNA, 981 bp, Oryza sativa
  ref <308>: DATABASE ACCESSION NUMBER: AK060077
  ref <309>: DATABASE ENTRY DATE: 2001-12-06
aacacatcaagtagtgacactcactcacacgatagcaagaagctagcttggttgctcacattgagctcaacaatggaggccaagggagtggtggtgatcacccttgtggtcacacttgcggcggttgcgagggcggcccgcccagaagaaaccaggccgggcttggcccgccgcgggtcagcatcctcaccgacgactcacctgcacttctacttccacgacaaggtgagcaagccatcaccgacggcagtgcgggtggtggacccggtggacccgtcatcgcggtccttctttgggatgatcaacgtcatggacgatccgctgacggaggggcccgagcccgagtccaagcccatgggccgggcccaggggctgtacatgggctcagaccaggccaagctgggcttcctccaggcaatgaacctggtgttcaccgacggcacctacaacggcagcgtggtcaccgtgctcggccgcaactgccccttcgacgacgtccgggagatgccggtgatcggcggcaccggcgccttccgcttcgcccgcggctacgcccaggccaggacgcacaccctggacctcaagaccggcgacgccattgtcgagtacaacgtctacgtcatgcactgatcacaacaagatggagatgatgcttcacacaaagcgtttgcatttctctgaatttttcacaagagtgtttttgccttctcctctgaaaataatggcccttgttgaaagtgattcactcaagaacacaggggagtttagttgctgcagtgttgatcttgatacaaaaaaaatggagttctagaatctctataaaaggtggttcttcttggtttagtctttcagtaataactttcttggttgcagtaacacactataccgaagaacacagacaacttttagttgcaggcttaacaaacttctgtcatataatcctgatttcttaaaccagtgggagctttgtttgtgatgcat

SEQ ID NO: 2181 - DNA, 937 bp, Oryza sativa
  ref <308>: DATABASE ACCESSION NUMBER: AK060078
  ref <309>: DATABASE ENTRY DATE: 2001-12-06
aatgcaaggacgacgcccaccgcgccaccagatcggcaagcgtgacggctcatcgtcatcttccctccattaaatcggcagatcgactcggtctaggttgaagactcgggagtctagctagctgctgtcgagagtgatggcgtcgtctgttcccgaggatggtgctagcgctgctgctgcggccgctactgctgaccctgctgctgctgcggctgaggctcccgggcgacgcatcgtggtggccgtggacgagagcgaggagagcacgcacgcgctcacctggtgcctcgccaacgtcgtctcctcctccggcggcgacacgctcgtgctgctccacgcccgccgcccccgccccgtctacgccgccatggacagctcagggtacatgatgacctcggacgtgatggcgagcatggacaagtacgccgccgccgtctccgccgcggcggtgggcaaggccaagcacatctgcgccgctttccctcacgtgacggtggagacgatggtggagagcggggacccgcgcgacgtcatctgcgacgccaccgagaagatggccgccgatctgctggtcatgggcacccatggatacggcctcatccagagggcgttcctgggaagcgtgagcaatcactgtgcgcagaactgcaaatgcccagtgctgattgtcaagaggccaaaataatagttgctaagtaatatacttagtactggtaataaagctcaactaatgcagagcttgctagtttgatgtttgtaaatattggcatgtcatgcttggtttgttgatcgagaacaaaagctatatgttgtttggtggcatggcagcgttcgatgttcagcgaccgatgcggatctgcggatctgttggcaccttgtaatggttgaaatttgcaggctatttgactttttctatgcatctgagtaattttaattc

SEQ ID NO: 2182 - DNA, 1097 bp, Oryza sativa
  ref <308>: DATABASE ACCESSION NUMBER: AK060079
  ref <309>: DATABASE ENTRY DATE: 2001-12-06
caattacatccattccacttatcgcctattgtgtgcttcctgctatctgtctcctcaccaacaaatttatcattcctgagattagcaattatgctgggatgttctttattctgcttttcgcctccattttcgcaactggtattctggagctccgatggagtggtgttggtatcgaggactggtggagaaatgaacagttctgggtcattggtggcacatctgcccatctcttcgctgtgttccagggtcttctgaaagtgttagcaggaattgataccaacttcactgttacctcaaaggcgtccgatgaggatggtgactttgctgagctatacgtgttcaagtggaccagtctcctcattcccccgaccaccgtgcttgtcatcaacctggtgggcatggtggcgggtatatcatatgccattaacagcggttaccaatcatggggtcctctctttggaaagctcttcttctccatctgggtgatcctccatctctaccccttcctcaagggtctcatgggcaggcagaaccgcactccgaccatcgtcatcgtctggtcgatcctcctcgcgtcgatcttctcccttctgtgggtcaagatcgatcctttcatttcgcctactcagaaagccgtcgccttggggcaatgcggtgtgaactgctgatcggcaccgttacgaagatgaacttcaatcaatcaaggtctacccccccttgtgtaaatacctgaggggggctagaatgggatcttctttttgtgtagatgaagaccttttttatctaagttatgccactgtttattagctacttcagtgctggcgctagctgctgatacgatggaactgtgaagccttattttgcctgcgaagaagccagcccagcagcgtaaattgtgaatttttttcttcttttgtgacacccgttattttagtcatttgtttgaggggtcgttgttacacatactatgggatgttatttatacggatatattccaattacattcttttgcggtgaacattttaattatattcgtagcatataatgtaaggcaactcagtatttcggctgttcacttgacaagttgcaacacatat

SEQ ID NO: 2183 - DNA, 1020 bp, Oryza sativa
  ref <308>: DATABASE ACCESSION NUMBER: AK104217
  ref <309>: DATABASE ENTRY DATE: 2002-08-28
attcacattcacattcccaaacggccacctcactctccctctctctatctctctcttcacatttccattccaactcaatttcctcctctcttctcctctcctcttctcacacgaagccaagaaagccaagaaatccatccatccatagcaagggagctagctcgccggcggcgatgggcaaggactgcggcaaccacggcgacgacgacatccggcaggcgtgccggcggctgctgacgatcctcttcggcctcgccctgatcgtggccatcatcgcgctcatcgtctacctcgtgctccgccccacccaccctcgcttcttcctccaggacgccacgctccgccagctcgacctctccaattcctccacctccggcgtcctctccaccgccctccaggtcaccgtcgcctcccgcaaccccaatgaccgcgtcggcgtctactacgaccgcctcgacgtctacgcctcctacaagtaccagcagatcacgctcgccgcctcgctcccgccggtgtaccagggccacggcgacgtcgacgtctggtcgccggtgctctccggcccggacgtccccttcgcgccctacctcggcgacgccctcgccaaggacgtcgcggcggagtacctcatcctccaggtcaagatcgacggccgcgtccggtggaaggtcggcagctggatctccggccactaccacctcttcgtcacctgcccggccttcttcatcgcctccggcggcaacggctaccccggcgccaatggcctcaagttccagaccgccacctactgccgcgtcgaggtctagctgtctcgtcttctccggctccggcgacggcgaggtgtgcataaatgtcggtaattactgtagcgttgaggtggggggtatagaggtaaatttagcgtgggttaatcaaagtatattttgtgtttaagcgttgttaagctttcagttccacgtttaattgttaataaaaggatattataactatggttaaaaaaaaaggaactcttctttttgg

SEQ ID NO: 2184 - DNA, 1260 bp, Oryza sativa
  ref <308>: DATABASE ACCESSION NUMBER: AK060080
  ref <309>: DATABASE ENTRY DATE: 2001-12-06
aacccaccccaccaccgacactctctcttctccgctcctcctccgccgatcacgcgctccgcatccgcatcgccggcgacgatgaggacgtcgcgtgcggcggcggcggcggcatctctgccgctgctgctgctggtggcgctactcgtggcggcggaggggaggaggcacaaggacggcagcggcgacgaggaggcgaaggcgtgcgacaaggggtgggagtgcagcgggagccggttctgctgcaacgacaccatcaccgactacttcaaggcgtaccagttcgaggagctcttcgcccaccgcaacgaccgctcgctcgcccacgccgccgggttctgggactaccacgccttcatcaccgccgccgcgctcttcgagccccgcgggttcggcaccacgggagggaaggaggttgggatgaaggaggtcgccgccttcctcggccacgtcggcgccaagacctcctgtggatatagtgtcgcaactggtggtccattggcttgggggctttgctacaaccatgaattgagcccaagccaaagctattgtgacaacagcaacgaattgtatccttgtgttgaaggagtcgagtattatggtcgaggcgctcttcctgtttactggaactacaactatggtattatcggtcagggtatcaaacaggatctgttgaaccacccagagttattggaacagaatgcgaccctagcatttgaagcagcaatctggaggtggatgactccaatgaagaggaagcaaccatcagcccatgatgtattcgttggcaactggaaaccaaccaagaatgacactttgtccaagaggtatcctggctttggtgctacaatgaacatcctgtatggcgatctcatctgtggtcaaggctccatcgataagatgaacgtcattgtatcccactaccaacattatctcgacctgatgggtgttggtagtgacaaagctggagataacttggattgtgctgaccaggtggcgttcaatccatcctcaaagaatttggactcctaagcaatctgtgttatatagacggataattccctgtaaatttgaggcacagacagctagcttcccaaacaaagaaaagcgtatacatggtacttttaatagctcccaagtaccacctgtgtttgtttgcgaaatttgtagcctatttatgtaagtgtccactatgttctctcatttatatgtgacaatacatattacacactgaagcagataattcacattcaaacatgc

SEQ ID NO: 2185 - DNA, 930 bp, Oryza sativa
  ref <308>: DATABASE ACCESSION NUMBER: AK060081
  ref <309>: DATABASE ENTRY DATE: 2001-12-06
atgacaacaattagtgacggtttttcttttgtgacacatatagtgtaggtttacttccagcttcgtcgattaccagacggcaccggcgtcgcgcgagcgagcttgatcttgcgccttgtgcctgctagctgcttcggcggcggcggttatcttcttccgatctgtaacagccccgatcaagaaaggatccaacccacctaggaggactaacctgaacgtgctaatgagttcaaagctagtaacatcacctctgaaatccatggagcagggccatctagagcaacctctgcgcgatccgcaggcgccggcggagcagcatgacatggggttatctcccctgacgctcctcggcttcgccttcctgaccttcaactcgggaatggcagtgtacagatcagatagagacttggcaaccatcttcttcgtggtcttctcctacgttgacctcgtatcgctcttctacttcctccgattatttgagaagacgccgccggagtcgcctcgccgccaccacatcaagacggcggtgtggctcctgacgacgatgctcaccgccgtgttttcatataaagtggcggccatcatgcctttcccggttcaggtgctggtttgggccatggccgcagcaactgtgcttggagggttctacgcattcttcctccactccgatgaaaaaaagcctattgagggataggcaaaatacttgatagggctttctggctgtttggcatttgtcagacgccctgtgtgtggtaacatctcgatcaaattggaggtcgaaattaaatatatccggtgagaagagatcacgagatcgatcgctacctatatatcacagatagaaatcagagtcctatcgatattttcgccgagcatatataagtagtgctgtcgatggcgagcccaattcgtgctttataaaaacagaac

SEQ ID NO: 2186 - DNA, 1075 bp, Oryza sativa
  ref <308>: DATABASE ACCESSION NUMBER: AK104218
  ref <309>: DATABASE ENTRY DATE: 2002-08-28
aatgctagcgttgctgttcacgtcgttgcctagccacaaggagaaggaagaaggaaaagaaggcagaaggcagcagcaggagcagcaggagaaggagaaggcgagaagaaacaatggattgctgcgtgtgcagtcccatggcgtccatgtacaggcttccaaggaacgccatctgcgctgcgtgctatgaaggtgccaaggccatcatcgccttcttcaacgacgacgacgacgagcacgccgatgctgatcaaggctcggtgaagcccagcagattgacaaagctcaatagcacaatcaagggattgagagatgcgtgggaggaggtgaagcagatgcgatgcagagaggaggagaccaagcagagggcatcgtttctccaggaaggcttcgcggcggcgtggaaggacggcatccacaccgacatcgccatcaggcctggaactgggcctccaatccaagcccacaaggccatccttgcgaccaggtcggaggtgttccggcacatcctcgccggcgacgacgactgcaaggcccccgccggcgactctctgtcgctaccggagctgacccacgacgagctctcccacctcctcgccttcctctacacgggctccctggcgacgtgcgcggaggagcggcacctgcacgcgctgctggtcgccggcgacaagtacgacgtgccgttcctccggcgagcttgcgaggcgcggctggcggcgggggtggaggcgggcaacgtgctgcggacgctggaggtggcggagctgagctcgagcgcggcgctgaaggagcgcgccatggggacggtggtggagcacgcggaggaggtggtgttctcgccggagtacgaggagttcgccgtcaggaacgccgccctctgcgtccagatcacccgcacacttctcgccaataaaagcttacccgccaagacgccttaatattctttttttttccttcgttgatttagaatttagttagacgacgtgcgatgtatacgtgtaaatgatagtacatgcatctctggaagattaatgtgatcaatatatgcaatttatattagtttctttgcacg

SEQ ID NO: 2187 - DNA, 1405 bp, Oryza sativa
  ref <308>: DATABASE ACCESSION NUMBER: AK104219
  ref <309>: DATABASE ENTRY DATE: 2002-08-28
agccatttcactagacagcttagctagcaggtagctgagagagttccttcgatctcgatctctgcacggcgacgataagataagcaatggcagtctcgtcgccggcgccgtcgtctctgcatgtgccgatggccgctgcggcactattagggatgctgatgatgatgtcgtcggcgccggagatgaaggtggaggcggccggcgggttgtccgtcgggttctacgccgaatcgtgccccaaggcggaggcgatcgtccgggacacggtgaccaaggcgttcgagaaggcgcccggcacgccggccgacctcatccgcctcttcttccacgactgcttcgtccgcggatgtgacgcatcggtgttgctggagtcgacaccagggaacaaggcggagagggacaacaaggcgaacaaccctagcttggatgggtttgacgtcgtcgatgatgccaaggacctcctcgagaaggagtgtccacacaccgtctcttgcgccgacatcctctctctcgtggctcgtgatagcgcctaccttgctggtgggctcgacttcgagatcccaacaggtcgtcgtgatggcttcgtctctaaggaggatgaggtcctctccaacgtccctcacccggagttcggtgccaaagacctcctcaaaaacttcaccgctaaaggttttacggcggaggagatggtgacgctgtcgggggcgcactctatcggcacgtctcactgctcatcgttcacaaaccggctgtacaagtactacggcacgtacggcacggacccgtcgatgccggcggcgtacgcggcggacatgaagagcaagtgcccgccggagacggcggcgcagcaggacgcgacgatggtgcagctcgacgacgtgacgccgttcaagatggacaaccagtactacaggaacgtgctcgccgggaacgtcacgttcgcctccgacgtggccctcctcgacacgccggagacggcggcgctcgtcaggctctacgccgccggcgaccccgcagcctggctcgcccgcttcgccgccgcgctggtcaaggtcagcaagctcgacgtgctcaccggcggcgagggggagatcaggctcaactgctccaggatcaactaattaactcaaattaaattcgcgtgaagtttgtgattctcatatatacaaacactactgccctgttgccatgcatgcatgaggctcatttgatttatttttccttatatgtttgtgcatgattcaatgtactactactactacaacaacttttgtttatttttattttcagtttcattttttaccttttgatgctgagtgtgccaattgggcaaaaataaattgtgcttctgaccatatatatgggtgaatttattcaaggagtaaaatgtgtgctattcatgttt

SEQ ID NO: 2188 - DNA, 1248 bp, Oryza sativa
  ref <308>: DATABASE ACCESSION NUMBER: AK060082
  ref <309>: DATABASE ENTRY DATE: 2001-12-06
accgacgcatcagctaccttctacgcattaacgcaaacatctgcacgacacgacacaagcaatggcgccggcggcggagccgtacgtggtggaggactgccgcggcgcggtgcagctgatgagcgacggcacggtgcggcgcagcgccgagccggcgttccacgtcgacctgcccgacgacgccgacgccgccgtcgagtggaaggacgtgacgtacgacgccgaacacgacctgaacgcgcggctgtaccggccgcgccacctcggtgccgccaacgacgcgcgcgtccccgtcgtcgcctacttccacggcggcggcttctgcatcggctccggccggtggcccaacttccacgcctggtgcctccgcctcgccgcggagctccccgccgtcgtgctgtcgttcgactaccgcctcgccccggagcaccgcctccccgccgcgcaggaggacggcgccacggccatggcgtgggtgcgcgacagcgccgcgcgcgacccgtggctcgccgacgccgccgacttctcccgggtgttcgtcgccggcgactcggcgggcgggaacatcacccaccacatggcggtgcggttcgggaaggccgggctcggcccgcaggtccggctgcgcgggcacgttctcctcatgccggccatggcgggggagacgcggacgcgcgccgagctggagtgccgccccggcgcgttcctcaccgccgagatgagcgacaggtacgcgcgcctcatcctgccgggcggcgcgacgagggactacccggtgctgaaccccgccgggccggaggcgccggggctggaggcggtggcgatggcgccgtcgctcgtcgtggcggcggagcacgacatcctcagggaccggaacgagcactacgcgcggcggatgagggaggagtgggggaaggaggtggcgttcgtcgagttcgccggcgagcagcacggcttcttcgaggtggatccgtggtcggagcgcgccgacgagctcgtccgcctcatccgcagcttcgtcgtcgagcacatggactcggagtagcaaagcactagctagctacatgatcaaagattagtcaattattaaaagtgatttagactttttctacataattgatgagttgagagcgatttgtatttgttaggtgtgttttgatcttatcttagttattattgatatgtttcttggtaatttgagaatgaatcaataatggaatgccacatggatggcaatgcttcttgatc

SEQ ID NO: 2189 - DNA, 993 bp, Oryza sativa
  ref <308>: DATABASE ACCESSION NUMBER: AK104220
  ref <309>: DATABASE ENTRY DATE: 2002-08-28
ccgcctcatttgctccagttcccggagggccgcaaccaccgctagccactcacccggcacggcatggctgcgtcgctccggtcgccgccccccttccccgccgcggcgttccgccgccgccgcgccgtcgtgcgcgcctcttcctcctcgtcgtcctcctcctcggccgtgtcgtccgcacccaaggcgcgcttcgtcgcccgccgctccgagtccaccttcgtccagcagctcgcccgcccgctcgcggagtacatgagcttgccggcgagtcagtactcggtgctcgacgcggagcgcatcgagcgcgtcgacgagtccaccttccgctgctacgtctaccgcttccgcttcttcgcgctcgaggtctgccccgtgctacttgttcgcgtcgacgaggagcccaacggctgctgtattagcctcctctcctgcaagctcgagggatcaccgcttgtggaggctcaaaatgacaagttttcagcttccatggtgaataaggtgttctgcaacagtagtatgagtgattcaacatctcaacagcttacatcggatactacaatcgaggttacaattgatataccatttccatttcgagcattacctgttgaagccattgaatcaagtggcaagcaagttcttgagcaactactccgagtcatgcttccacgatttttgaagcagcttgttaaagactaccaagcatgggcttcgggtgattcttcaaggaaaccacttggcactggtgaaatatgaagcttcgcagtgtctccattaggcattatagtcttttcttgttgcattagttattgcttgatggggtatagaaaagctgtttatacgtcgttttgctcacaaaatccatttgcttctttgtggtctttgcctgaagatgttctgtagtgtgtatggatttgtgccatgcgaccagtcacatacatttgtaggttgttcattcacaatgtgttgttgtaagattaacaatatccgacc

SEQ ID NO: 2190 - DNA, 1069 bp, Oryza sativa
  ref <308>: DATABASE ACCESSION NUMBER: AK104221
  ref <309>: DATABASE ENTRY DATE: 2002-08-28
aaccaacaagcaagaagaaatttctctccttgtagaaacaagcctagagagtactatggagcagaggaaatttttgttgtgcctaattcttggcttacttgcgacttcaggacctgccaagaccgtcaatgctgactcgccctttgatttttattatctcatcctcatgtggcctggagcatactgcactgacagcgagtatggttgttgcgtgcccaagtatggttacccgtcagaagatttcttcgtcaagagcttcatgacctttgactcgtcagagaacacagctgttgtcaggtgcaactccgacaatcctttcgacattaacaagctagactcaatcgagaacaacctgaaccactactggagcaacatcaagtgtcctcgcaccgacggcgtgaactcatggaagagcgagtggaacagctatggcgtctgctccggcctcaaggagttggactacttcaaggccggtctccagctcagaaagaacgcagatgttctctctgctctcgctgaacaaggcatcaagccggactaccaactgtacaacacggcgttcatcaagtgggcagtgaaccagaagctgggtgtgacaccaggagtgcagtgcagggacgggccatttgggaagaagcagttgtacgagatctacctctgcgtcgacaaggacgccaagagcttcatcgactgccctgtcctgcccaacctcagctgccctgccgaggtgctcttccatccgttccacacctggatgctcaacaccacatcggctgccaacatcgtgatgcccactgaaactgtgctggcctaattaagagcctttaatttgctagctaagctgccatgatctacttgatcaacctgtcctaagagcatgtagcatatgcttagcttgttgctttgggtgaataatcgcgcaacttttatacattgttgtgccctctgaataatatgtgcagtactatatatgaagtattgtaccgcatatgttatgtattacatgtgcaggtcttgtgcacacctgtgaggtgaatggatatattatgaatatataacgtgttgtatt

SEQ ID NO: 2191 - DNA, 1069 bp, Oryza sativa
  ref <308>: DATABASE ACCESSION NUMBER: AK104222
  ref <309>: DATABASE ENTRY DATE: 2002-08-28
aactcgagcaacaaggtcgtagccatgacgaacgggtacctgttccgggagtacatcggcgcgcagttcaccggagtccgcttctccgacgtgcccatcaacccaaacctcagcttcaacttcatcctctccttcgccatcgactacacgagcccggccggcggcgccacgccggcgccgaccaacggcgtgttctcgccgtactgggacacggccaacctgtccccggccgacgtcgccgccgtcaaggcggcgcaccccaacgtcagcgtcatggtcggcctcggcggcgacagcgtgcaggacaccgccaaggtcttcttctccccgacctccgtcgactcgtgggtggccaacgccgtcgcctccgtctccggcatcatcgacgcctacggcctcgacggcgtcgacgtcgactacgagcacttcaacgacgacggcggcgccggcgtcgacacgttcgtggagtgcatcggccgcctcctcaccgagctcaaggcgcggcacccgaacatcaccacctccatcgcgccgttcgaggacgccgtggtgcagcgctactaccagccgctgtggcggcgctacgccggcgtgatcgacctcgtcaacttccagttctacggctacggcgacaacaccgacgtgccgacgtacgtgatgttctacgacgagcaggcggcgaactacccgggcggcaaggtgctcgccagcttcaagaccggcgacgtcgccgggctgctctggccggagcaggggatcgccggagcgaaggagttgcagcggcaggggaagctgccgggattgttcatctggtcggcggacagctcaaaggtcagcagctatggctttgagtacgagatcaaggctcaggagatcatcgccaaccactgatcgctgatcggacggtcgagatatcgctgtggttggatttggtatgaatgaatgactgaataagcggatatatttgcccagtacagttctgggcacgcatggtgttctaatacttattgcgtatatatgcagtgagatggatattatatatatctacagaatataaataagtttcttc

SEQ ID NO: 2192 - DNA, 1114 bp, Oryza sativa
  ref <308>: DATABASE ACCESSION NUMBER: AK104223
  ref <309>: DATABASE ENTRY DATE: 2002-08-28
ccctcaccaacaacagtaacccaaccagagagcttgcggaagcgggggtttggtgcgggcgcgcgcgtgtgaggggggagagaaggccaggaggaggcgacgccgtcgcccgagggaggcaaaaatccgatcctcctcctgccctgctcgctcgctcgctcgcctgcgctgcgcgcacttggccccgtcccgtccgttcccgctcgccaggcatagaaagatggtgctctgggtcttcggctatggctccctgatctggaaccccggattcgacttcgatgagaagatcctgggcttcgtcagggctacaaacgcaccttcaatcttgcttgcattgaccatcggggcacgccggagcatcctgcgaggacctgcacacttgagtccgacgaggaagccatatgctgggggattgcatactgtgtcaaaggggggcttaaaaaggagcaagaagcaatgaagtacttggaaagaagagagtgtgagtatgaccagaagatctctgtggatttctacaaggaaggagattctttgaagccagctgtgacaggtgtactagtctttgtatccactcctgatccagtaggcaacaaatactatcttgggcctgctcctttggaggacatggcaaggcaaattgctacagccaatggccccaatgggaataacagggattacctgttctcaatggagaaggcattgtccaacatatgccatgaagatgattcaatcatcgagctagctaacgaggtcaggaaggtgttgagccggccgaaggagaagatcactggctccgatagcccacaaaaatctcacgctctcgtacacctgtctgcgcttcctgagggcactgttgtggactcaagatagcaagctcggcggtggaagagatgagatctcctctgacctactcactcttgacgctggattgaacgagtttaacagtctgcttcgagctccctggcacactggggaaccagaatgtgctgattttctttcgcaaccgctgcggcaatgctgtaactttcattttgctaatactagagccgagactggtgtgctgctgtttcctttgacacactaaataataaagggattccatgagcttttcact

SEQ ID NO: 2193 - DNA, 995 bp, Oryza sativa
  ref <308>: DATABASE ACCESSION NUMBER: AK104224
  ref <309>: DATABASE ENTRY DATE: 2002-08-28
agtgttagtcttagcgaatccagcagcagaagcagcagcagcagctcagccgccgccgatggcgtccacgatcatggccccaacctcccgcgtcctcgccgccaagacccccttcctcggccatccccgcccctccaatgcccccgtccgcgacatcgccgccgccgccaccggccgcatcaccatgagcaaggagctgtggtacgggccggatagggtgaagtacctggggccattctcggcgcagacgccgtcgtacctgaggggcgagttcccgggcgactacgggtgggacacggcggggctctccgcggacccggaggcgttcgcgaggaacagggcgctggaggtgatccacggccggtgggcgatgctcggcgcgctgggctgcatcacgccggaggtgctcgagaagtgggtgcgcgtcgacttcaaggagcccgtgtggttcaaggccggcgcccagatcttctccgacggcggcctcgactacctcggcaaccccaacctggtgcacgcccagagcatcctcgccgtgctgggattccaggtcgtcctcatgggcctcgtcgagggctaccgcatcaacggcctccccggcgtcggcgacggcaacgacctctaccccggcggccagtacttcgacccgctcggcctcgccgacgaccccgtcaccttcgccgagctcaaggtcaaggagatcaagaatggccgcctcgccatgttctccatgttcggcttcttcgtccaggccatcgtcaccggcaagggccccttggagaacctgctcgaccacctcgccgaccccgtcgccaacaacgcctgggtctacgccaccaagttcacgccgggctcgtgaatggcccagccgccattgtagactactctctctctccatcgctcgatgtaccaatgcttgcacagattgtacgatgctgtgatgaatctgatatgatccatccagaattcagaaactgaaaaaagttggggtttgc

SEQ ID NO: 2194 - DNA, 1149 bp, Oryza sativa
  ref <308>: DATABASE ACCESSION NUMBER: AK060083
  ref <309>: DATABASE ENTRY DATE: 2001-12-06
atcgatcgatgcagagcagcagcaggcaatggcatcagcaatggcgtcgtcccagtcccatctggatctggtacagctgctaatcgttgtggtgatgactatgacgatgctggtgggtggcggcgaggcgctgagcctggactactacgccaagagctgccccaaggcggaggcggcggtggcggcggcggtgaagcaggccatggccaaagaccgcacggtgccggccggcctgctccgcctgcatttccacgactgcttcgtcagggggtgcgacggttccgtgcttttggactcgtcggggaacatgtcggcggagaaggacggcccacccaacgcgtcgctgcacgccttctacgtcatcgacaacgccaaggccgccgtcgaagccctctgccccggcgtcgtctcctgcgctgacatcctcgcgctggccgccagggacgcagtcgccatgtccggtggtccttcttggcaagtgccggtgggtcgtcgtgacgggcgcgtgtcgctggcgagcgagacgacgacggcgctaccggggccgacggcgagcttcgaccagctgaagcaggcgttccacgggcgcgggatgtcgaccaaggacctggtggtgctgtcggggggtcacacgcttggcttcgcacactgctcctccttccagaaccgcatccagccgcagggcgtcgaccccgcgcttcacccctccttcgccgccaccctccgccgctcctgcccacccaacaacaccgccaggtctgccggctcctccctcgaccccacctcctccgccttcgacaacttctactatcggatgctgctctccggccgtggccttctctcctccgacgaggcgctgctcacccaccccaagacgcgcgcccaggtcacgctctacgccgcgtcgcagcccgccttcttccgtgacttcgtcgactccatgctacggatgagctccctcaacaacgtcgccggcgaggtccgagccaactgcaggcgcgtcaactagctagctatttccactagcatcatatcgatcacactatcttatcttatccaccacaccatccctgcactgcatgtatggcctcaactcaactcaacttatgtacaacaacaatataacgtcgaatggctatagcatctttt

SEQ ID NO: 2195 - DNA, 1006 bp, Oryza sativa
  ref <308>: DATABASE ACCESSION NUMBER: AK060084
  ref <309>: DATABASE ENTRY DATE: 2001-12-06
aaattctctccctctcctcccctcccacctctcctctctcggcgcgggttccggccagagctgccgccggagggcggtggcggcggcagcggcggctactgacggtggcagaggcggctcaaggcggtggctgcgcggagggtggagccagcggcggcttccctccctcctcccagatccggtgtaggcggaggtggatggtggaggcggcgcgtgccgtgtagggtggacgcggcggcggctccgccgggaggggggagggcggtggcggtggcggccctcccctctggatctggcgaggcggctacgccctcggctgtatccgccgccgccgctgtcggatctggcgaccggagaagacggcgcggcggaggaagatgaccgcgataggcgctggcgacggagcggcggaggccgacaggtgcggcaccatcttcgccttcatcgcctgccgcccttgcacgggacgtcacgtgtgcgtcggcgtcggtgcgcccctcccccttctccttctcctcgcggatccagtgttctctgtcctcgggaacggcctggcgggagcgggagcgccggcagcgcgcggatctggccgcctccgccctcgggagcggcggcggcgggcttaggcgggcgggagcgagcggccacggctgcggcagctacgacaacgacgacggcgacggtggctgcgacgacggcaatgatgctgacggcagctgcgacgaaaatgacgattgtctcctccaaccccggcaccgggccagccgtcggcgacgatttcacctgtctcgaccattccgccgcccccaaaagtatcctcccccacttgcgagaggacgagggactggctcagcatcgagccctccacgagtgtgcagcgcatcagatttaggctgccttctttcaaaggagattggggagattgtcactcgttttccgcacgcacgcttcccaaactattaaacggtgtattttttgtaaaaaatttctatatgaaagttgcttt

SEQ ID NO: 2196 - DNA, 1037 bp, Oryza sativa
  ref <308>: DATABASE ACCESSION NUMBER: AK060085
  ref <309>: DATABASE ENTRY DATE: 2001-12-06
atctcgattcttatcccttccgtcctccttcctcctcccccctccccggttcgacgcgcacatcgaaccccgacgaccaccaccgcccggccgccgccgccgccgacgcggtcgtcctctccggctaggatctggtgcatctaactattcaagaaatagaaaagcatgagctacttcacttgcaagccgaacagtgggcttattgtggataggcccgtcgctggtcttgggaggacaggcagattactatctcatcctcaatattccctaacgacacattctgttcgatttcccaagcttcaaaagcaggtgtacccgcgacttgttcttgttgctgctagccagaaaaagcttcctcctctatgtgcctcgagtggaaaggtgaacccagaggcagaaaatgatccctttatggaatctttgaagaaggccatggatgatgccaaaaagccacggcctattcaagacttgctgaaagaacagatagctaagctgagagaacaaggatctggtggaggtggaggaaaccgaaatcgtcgtggaggcagtggtgattctggtggcccagaagatgaatcattcaaggaatcattggatgaactagtccaagttatcttagcaaccgttgcattcattcttgtgtacatccatataatcagaggtgaggagctgtatcgcctcgccagggactacaccagatatcttgttactggcaagcgtactgcgcggttgaaacgtgccatgcaaaaatggcgcaatttctcagagagctttatgcaaagtgaaggctcacaagaagaccagtatgaaagagcagccacctccaaaccaacttggtggcaacagcctcaaaagtttgttcatcttatggaggaactctgccgaggaaattggcgcccgcatgcgcaggagtcttagttcaggtgctcccttgttcctttttggccttctgaagcacatggatgtggcgatgagcagtactgttttcatggctggtgcaatgacctggaatctggatagcgttccttgcccggggc

SEQ ID NO: 2197 - DNA, 1006 bp, Oryza sativa
  ref <308>: DATABASE ACCESSION NUMBER: AK060086
  ref <309>: DATABASE ENTRY DATE: 2001-12-06
acttaccaatttgccactcgactcacacttgccaagaccccctctcaagactagccatgcttcgcagccgtctcctcgtcgcgtccttggtcgcactcgtgcctgtggctgtgtctggcgccaacccagtgatgcgcttcaccttcgaccccgactactcgggtgtctccggcaatatcgagttcagctattacggagatgaccgtggtggcgccgcggtctcggccaacctggggttcaagcgtttcgacatgaaggcgctcaaggccctggatggcaactgtacggctgacaagatcaccgactttacgtggcatatccacacgatgtggaagccaccacaggacagcacgagttcatctatgagctttgccaagtgcggtaaggccttcacgggaaaccactatgatccgtacaagatctgcggtcccgcctccgagtacgtggatacgcccgcgtgcgcacccaaggtcaaggactacaagtgcacgcctgacgaatacaagaagaacttcgccgcgtgcgagtccggtgatctctcgggcaagattggcaactttcagcccgacgccgaggcgctagttaacattcacacgagcgatccccgctttccattttcgtctgaggcgaccaaggagtggagcattgtgatccatgctgtgtgcggcaaggcgtctccacgcgtggcgtgcgcggtcggccacattttggattccaagtcgacctccctgaagaaggccaagaagcacggcaagaatgaagctgactttacggtcggcaacaaggtgcacgtgcgcgtgcacgagaactaggaccttcgatgccaagccgctacagtgcacagcttttcatccctcgtttcccagctctgctatgcaagtggtagccattgaaaggatgctctttgcataaaaaaacaaccatctttgtatgctttaacatcgccggcgatgatggatacataacataagccagtacttggtctcacttccaccgagctgcacat

SEQ ID NO: 2198 - DNA, 922 bp, Oryza sativa
  ref <308>: DATABASE ACCESSION NUMBER: AK104225
  ref <309>: DATABASE ENTRY DATE: 2002-08-28
gatgccaccgaagcggaagagggctgcagccatggagacggcgggaggggacgccgcgccgccgccgcagcagcagcgtcggaacaaatcctcggcggccaacaaggggaagaagggcggcgcttccggcggcggaggcggcgggaggtggccaccggtcaagccgaagaaggatctccaggtcaatcgcctcaagggcacccacctcctcaccgtgccaaacttcttcacttccgctgaggcgaaggcctttgtcgacattgctgagaatattggcttcacgcaccagggcagcctcggacccctgaagggtgaagcttatagagataatgaccggatatctgtgacagatcctttgcttgctcagaccatttgggaatctgggataaacaaaatatttgaggacatcagcatctctggcaaagtagcaaccagcttgaatccaaatatcaggttctacaggtacactgaaggtcagcgattcggtaggcatattgatgagagtgtcgaccttggagatggttcaagaacattgtatactttgctaatatacctctctggcaaaggaagtgcaaaggaatcatcagggcaagctcttgttggaggggagactgttttttatgatcatcgtggaggagttgtcgctgaggttgctccagtgcaaggactggctctactccatcttcatggtgccaaatgcatgctgcatgaagcacgggttgtgaaaaagaatatcaagtatgtgcttcgttctgatgttgtatttgcttagctggagaattctccatgcttgtgttgaagtactatagacctgagcatgctatagacgaacggctaacttttccattttacaaacctttgtactaaagcatgtaactgatccaacatgaacttggaaggtgatgacatcaaatttgtgttt

SEQ ID NO: 2199 - DNA, 1130 bp, Oryza sativa
  ref <308>: DATABASE ACCESSION NUMBER: AK060087
  ref <309>: DATABASE ENTRY DATE: 2001-12-06
caaagaacttagagaacgtgccaaggaaattcctgatgattattttgtttgtttggttggagacatgattacggaggaagctcttcctacgtaccagactatgcttaacactctcgatggtgtccgagatgaaacaggtgcaagccccactgcctgggctgtttggacaagggcatggactgctgaggagaacaggcatggtgacctcctgaacaaatatctctacctcactggtagggtggacatgagacaaattgagaagacaattcagtatcttattggctctggaatggaccctaggacagagaacaatccttatcttggattcatctacacctccttccaagagcgtgcgaccttcatctcacatgggaacactgctcgccatgccaaagactttggcgacctaaaacttgcacagatctgtggcatcatcgcctcagatgagaagcgtcatgagactgcatacaccaagattgttgagaagctgtttgagattgaccctgatggcactgtgcttgcttttgctgacatgatgaagaagaagatctcgatgcctgcccacctgatgttcgatggggaggatgataagctctttgagcacttctccatggttgcacagaggcttggtgtttacaccgccaaggactacgccgacatccttgagttcctcgttagcaggtggaagatatctgacctgactggcctatctagcgagggaaacaaggcgcaagactacctttgcacccttgctgctaggatcagaaggctggatgagagggcacaatcgagagccaagaaagctggtacattgcctttcagctgggtatatggtagggaagttcaactctgagcatcagacgccattgcgacttcttcgagctccagtgttactactgtccgtgcttgtcgagacacattttgagaacaataccaggtgtgtcttgctacatagttcttcaggttgaccaaatgaactgagggcatatgttcgtggtatctttgcttagagtgatagagagatttgcgtctgtgttttagctctttttttcttttctgccttttcatgtacaacttctggccgtgtggattggacatgtactgaacgtgagtctgtcgttggccgtgtc

SEQ ID NO: 2200 - DNA, 1036 bp, Oryza sativa
  ref <308>: DATABASE ACCESSION NUMBER: AK060088
  ref <309>: DATABASE ENTRY DATE: 2001-12-06
ctcttccgctcgctcgacggctcgagcttaaaaccctagagccgctcctcctcctcctcctcgcctaccccgaaacccaaatcccccccaaggcggacgcgcccgcaaagggtcgagcgcgctcatggctcgcgtgtacgtggggaacctggatccgcgcgtgacggcgcgggagatcgaggacgagttccgcgtgtttggggttctgaggagtgtatgggttgctagaaaaccaccaggttttgcctttattgactttgatgaccgcagggatgcagaagatgcaattcgtgatttagatggcaagaatggatggagggttgagctgtcaaccaaagctggtagtggtcgtggccgagatcgttccggtggttctgacatgaagtgctatgaatgtggcgaacctggtcattttgcacgtgaatgccgcttacggattggttctggaggccttggcagtggaagacgccgcagccgcagccgtagccggagtccaaggtaccgcggtcgtagtcgcagccgcagcccaagataccggaggagcccaagctatggtagaagcccacgggatcgttctccaaagaggcgcagctacagcaggtcgccaccaccagctcgtgcacgaagctacagccgatcacctccacctcctcgtgagcgaagctacagcagatcaccagcacagccagccaaccgcgaggagtccccctacgcaaataacgcgtaacccgcctagttccaatttgctggaaatgttaggggggctcggtgtgtttttgtaagcgcttgtgttatggagtcttgaaaagctatagggattgagtatgttcttcggaagcatttgtgtacccttcgggaaaaaccccgccgctgctgatacaattgttgaagcaggagcctagcgttttggtcgactgtatgactttgagaccccatgtagtccgtaagactaagttttgtaccattagatttttcacattgctggaatatttgtgctaaatactagtattattaattaatgtcttttgtaggtgct

SEQ ID NO: 2201 - DNA, 924 bp, Oryza sativa
  ref <308>: DATABASE ACCESSION NUMBER: AK104226
  ref <309>: DATABASE ENTRY DATE: 2002-08-28
atcgtcatcacgaaacaaattaaccatagcagcagcatatcctctcccatgcttccatggattccttctagcttcgccttagcttctcctcctctacagtctacacgcgcgcatgcatagcatctatagagagagaacaaattaattattaggatttagtcgcaatggcattagccatggcgcccaggctagtccaccacccttgctgcatgatgctctccaagaacccaagaacgccgccgccaccgccggcgatgcaccaccaccatgcccacaagccgctcatcaccgcgctcaccagcacgtcgtcgttcttgctccgctccgtcgacgtctccaaggacgacaagccgctggagacggcgactacgacaaccccgcctactccggcaccggcggcggcggctccggagaccgaacaagcggaggcggtggcgtcgccggagttggagttggagctggaggaggggccgaaggtggacccgcggcggctggaggagaagttcgcggtgctgaacacgggggtgtacgagtgccggtcgtgcgggtaccggtacgaccaggccgccggtgacccgtcgtacccggtgccgccggggctgccgttcgagcagctccccgacgactggcggtgcccgacgtgcggcgcggcgcagtccttcttcgagagcaagagcgtcgagatcgccgggttcgcgcagaaccagcagttcggcctcggcggcaactccctcaccggcgaccagaaagcgctgctcatctacggcagcctcctcgtcggcttcctcttcttcctctccggctacttcctccaatgaaccagtcaccccctcttcctaattctctacctctacctctacctctactgtgcctgtttctactaattaagtatatatcagtacgttttatttttattggctaatt

SEQ ID NO: 2202 - DNA, 1044 bp, Oryza sativa
  ref <308>: DATABASE ACCESSION NUMBER: AK060089
  ref <309>: DATABASE ENTRY DATE: 2001-12-06
gcattgagaggacctttccctagtacgagaggaccgggaaggacgcacctctggtgtaccagttatcgtgcctacggtaaacgctgggtagccaagtgcggagaggataactgctgaaagcatataagtagtaagcccaccccaagatgagtgctctctccccctttcccaaccggaaaaacgagaaaacagagagagctcatttgccgaaggccgaagcaaaccaagccaagaaatggcgcgctaccaccccacctccatccacgacgacatcgaggccggcttctccggccactccgcctcccccgtgaagcccgcggcgtcgcctcggcggcccggcggccgcctcttctgcgacccgtgcgacgacgccgacgacctcctcggccaccaccactacctcgacatctgcttccgctgccggagacccctcggaggaaacagagacatcttcatgtacagaggtgacatgcccttctgcagcgaggagtgcaggcaggagcagatcgagatcgacgaggcgagagagcagagatcgaagcagacggggagggcagagcaggagaggcagaggcagcagaaggcgagccacccgaggatcccggtctgggcatggtaaacaattttggtcacggaacagtagatcttagagaaactcaagaaccgaaaaaacgaggaggagatcgagagacagcttgtccatgaccgtgtgtgcggatggagaaagatccagtcgagcgcacgcggatcaaacagttccacgggaacgaaagccaagcccggggaagcagaagcaaaccggctgcgtctttcttttcgcgatgaaattgttcggttccttcctcctgatctccgcaacaaggagatgaggagtcaatttggtgtgtgaattttactttcttggcacggttgcaaattcgcaaaaaaatatggtgcgtgcgtgcagccggtgcagcgttttgtgtcattgtgtgtgtgcttgtaatgcaacctgttgatatggaaaaagtgagtggcgtaaaaagctctctccgatttctcatt

SEQ ID NO: 2203 - DNA, 1241 bp, Oryza sativa
  ref <308>: DATABASE ACCESSION NUMBER: AK060090
  ref <309>: DATABASE ENTRY DATE: 2001-12-06
tcctcctcctcctcctcgtcctcgtcgccggcgaggcatcacaaggcgcggcgcagcaggaggaagctcgccgtcgacgaggactgggaggccgccttccgcgagttcctctcccgcgaccacgacgacgacgacgacgaccacgacggtcagcatgtcgttgttgcgccgttgatccgtggtagtgacaagtgcgtccacggccacgaggtggtggcgtcgacggtcggcggtggcgcaagcggcggacgacgacgagccgacgacgacgacggcgagcggcggcggcggcggcggagggagaagcggagctacccgtaccgcggcatccggcagcggccgtgggggaggtgggcgtcggagatccgcgaccccgtcaagggcatccgcgtctggctcggcaccttcgacaccgccgagggcgccgcgcgcgcctacgacgacgaggttcgccgcatctacggcggcaacgccaagaccaacttccccccatcgccgcccacgccgccgccgccggagaagccagcggcggagaggagcccctcgacgacgccgacgacgaccacggaggactccggcgactcgcgcatactcatcgagtgctgctccgacgacctgatggacagcctcctcgccgccttcgacatgaccaccggcgacatgcgcttctggagctaacgaacaacagagcagattcaggacaacataaacggcacgtctttgcaaccttgacatgcgactcgcctaataatcttgtcaaacaagggccgccagcttaattagctttttccaaaggtggggaacaattttgggggatgcaattaggacgcacagagatgaccccaacttgtcaatgggaattgaactctgatgacctttgtaatgataatcaaggcaccacattgtggggttaagcaaagttttggcaaattagctttgccttgcaggaataaatcagcatttctttttttttcctttcactggaccccaataaggtaatttgcatacatatgtcccatggatcgaacaatatgaaaagtaattgtatagtgttggttgcagaggttatcaacacttattcgggttaccgcgactctcgattagtcaatcaccctctatatatgctattgttgtcgtgatgttgtcatggttatgtacgctgtggttccctagcttgggttgtagagttcgacaccaagtttactaccatataccataaatacaattccaaatccaactat

SEQ ID NO: 2204 - DNA, 1088 bp, Oryza sativa; identical to SEQ ID NO: 2145
  ref <308>: DATABASE ACCESSION NUMBER: AK104227
  ref <309>: DATABASE ENTRY DATE: 2002-08-28

SEQ ID NO: 2205 - DNA, 1142 bp, Oryza sativa
  ref <308>: DATABASE ACCESSION NUMBER: AK104228
  ref <309>: DATABASE ENTRY DATE: 2002-08-28
gctgctgccgcgcgcctccgctccattcctgattcctcctcccaactcttgcttccgttttccgtgcccctcctgccgacaaacccacacctgaatagctcatcctcacctgatcagctgaacctgtttgagagaaagaagttagttggccatctcgccctcgctagaaaaaggaaaaaaaagaaggaaaggagaaggaggagagagcttgctttgctgctgggttgttgctaatggtgttctactacaaggcgaggccggacgccggcgactacaccatctacatgggcgccgacaagaacgagaacgaggagctcatcaagtacggcctccccgaggacgtctggttccacgtggacaaggtatcctcggcgcacgtctatttgaggctcaagaaaggcgagtcgatagatagcatctgcgacggtctgctggaggactgtgcacagcttgtaaaggctcattccattcaaggaaacaagatgaacaatgttgaggtggtctacacgccctggtccaatctcaagaagtccccatccatggatgtcggtcaagttggcttccataataccaggatggttcgcgtggtgatcgtcgagaagcgcgtcaatgagatcatcaacaggttgaacaagaccagggtagagcgccggcctgatctgaaagccgagaaggacgcgtcgaacgcggcggagaaggcggagaggaagatgcagctgaaggagaagaggcggcgggaggagatggagaggctggagaaggagaggcgggcggagatacggagctacaagggcctcatggtcgccgagaagatgacctccaaccgccagatcgcctccgccggcaactccatgcaggagatggaggacgacttcgtctgatccatccatccatccgtccgaagccagcaaccgctcccgggcatgcgtgcgtgcgtgcgtgcgtgcgtaacgtacgtgtgcggccacgtgtttctctgtacatcatccatccatataagcgtgcgtgatcgtctcaccggtcagtctccctggaacggtttctgcagttctgctatagtagtggtagtagcacatctctgtacatacacatggtccctagcaatgggcacagatgagaaagaaggcaacgcgattttcggt

SEQ ID NO: 2206 - DNA, 1054 bp, Oryza sativa
  ref <308>: DATABASE ACCESSION NUMBER: AK060091
  ref <309>: DATABASE ENTRY DATE: 2001-12-06
attttgctttgctttctttgctttcctctcctctctcgccgcccacctcgccgtcgccgccgccgcgagggccaacgccggcgaagtccgcgagccgaagcatcacacagctgcgccagcgatgtcggtggagacggagcggagctccacggagtcgtccgccgcgtcggggctcgacttcgaggacaccgccctcaccctccgcctcccgggctccctcgccgccgccgccgcacctgaccccgaccgcaagcgctcctccccctcctcctccgacgccgccgacgccgcagacaactcctcccccctcgccgccgccgccgatgctccccctgctcccaaggcgagggtggtggggtggccgccggtgaggtcgttcaggaagaacgcgctggcggccaagttcgtgaaggtggccgtggacggcgcgccgtacctgcgcaaggtggacctcgaggcctactccggctacgaccagctcctccgcgcgctccaggacaagttcttctcccacttcaccatccggaagttcgccgacgacgagaggaagctggtggacgcggtgaacgggacggagtacgtgccgacgtacgaggacaaggacggcgactggatgctcgtcggcgacgtcccctggaagatgtttgtggaaacttgccagcgccttcgtctcatgaaaagctcagaggctgtcaacttagcaccaagagccgctcaatgaggcattcccggtgcccatgaccgtgtggttggattgaaagaaagtggaagctttgccccgccgatgttcgcccacgtgtgatatgaacatgtacagttgtctcctactacttttggttccttgatgatgctgagttgagaaaaaggttgtagtttcgttactcgtctgtagtctctccatatatagataatgaagcactgaagcttgaaatatacacctacagtttgtctctttatgaataagaccatatacgcaaaaaaaccgatgttctttgctgcggctcgcgtgtcgtcaggctatatgcagttttttgtcgcaccataggcgatggac

SEQ ID NO: 2207 - DNA, 1247 bp, Oryza sativa
  ref <308>: DATABASE ACCESSION NUMBER: AK104229
  ref <309>: DATABASE ENTRY DATE: 2002-08-28
aaaatcacatccaatccagagaaaaattctccgatcgccgccgccgctggttcgattcgccgaggccgagccgagagagagagatcgagagggatggagtgcttggccgagatgccgcgcgcgccgctggccgaccgccgcccgcggaagaggcagcggctggggtgggacgtcggccccgagatccaccaggttcagatagggttatgtgggcaagaagttgcaaatgtcatcagtgctgtgacgctgggtctctcgtcccaggaaatccctcgttttgcttcccctcctctgagagaagatgacaaggatggacactttgtctttgctgttggagacaacctcacaccacgatacaggattaatgcaaaaatgggtgaaggtacctttggtcaggtattggaatgttgggatagggaaaggaaagaaatggtggccattaagatcatcagaggcattaagaagtacagggatgctgcaatgatagaaattggcatgctcgagcagcttggtaaatatgaaaaaagtagatccaggtttcatcccgttctccaaaggaaggttcctatttcaagcagctgcccaagtccagtgctattaaggtgattgattttggcagcacaacatatgaccagcaggatcagacctatgtggtgtctactaggcattatcgagctccagaagttatcttgggacttggatggagttacccctgtgatatatggagtgttggttgtatactggttgagctatgcacgggagaagcattgtttcagacccatgaaaacttggagcatcttgctatgatggagagggtatttggtcctttgccatgtcacatgctcaaaagggcagaccggcattccgagaaatatgtcagaaaaggccgtttaaactggcctgaaggttgtgcgtcacgggatagcatgaaagctgttatgaagctgccacgtcttcagaatctggtgatgcaaaatgtagatcattctgggggcgagttcattgaccttttgcaaggtctgttaaggtatgatccagctagccgcctaacagcacaagaggcgcttaggcatccattcttgagggagcagtccgagcgaagaagatgacgaaaatcgtatgtcgattttcatctgacacctctaacttgtattgtctgagctcgaaaagtctattcacaaatcgtgaagtttgtatttctgtttgtaacctcagcaagcatttgtatatagaagacctgtatttac

SEQ ID NO: 2208 - DNA, 1113 bp, Oryza sativa
  ref <308>: DATABASE ACCESSION NUMBER: AK060092
  ref <309>: DATABASE ENTRY DATE: 2001-12-06
tcacgtcttcaccttcctctgctcccggagagcctctccctctcctctcctctcgcctcggcctcctctctctctctctctctctctctctctctctctctctctctctctctcatcaccgcctccccacgccaacccgcgcgacgcacgcggcataccaagaaaccgcgcggcgcgcgcttcccgggggggcgcctgccttcgatggaggtcgcggccgcggaggacgcgctggaggagagcggcgtggcggtgtacctccccaggcttctcgccggcgtcatctccggcgctctcaccggcctcttcgctctcgctggggccttgaccggagcggtgaccggcgcgctggccggaagggcttcagacagcggcgtgctccggggagctggattgggggcgttcgccggagctgtgctctccattgaggtcctcgaggcttctcgtgcttattggtgctcggaccggctgggctctcatggcacatcctccatggcagatttcatagagcagctcctccaagcgcggtttgtgcaagagcaaattgtaccttcaggatatgcaacgcatcgttggcaggtcagcatttcagattttggtcatgatgatctgtatgatatttttggagattgttcatccaaagggctttcacgggagtcactgaataaattaccacactatgtggtcactgaccaaacacggaactcgtttggtgaagacctctcttgcactatctgcctgcaggatattgtaaccggtgaaacggcgaggagattgccgaattgctcccacactttccaccagccttgcgtggacaaatggctcgttggccatgggtcttgccctgtatgtaggcaatgtgtgtaacaacagaaggtaaaaaaaaccctgcattctgcaggctctccatcttattagaagagactagttgtgcaaatgtttgctcttgatagcacccaccacagagttaattatacacagtagctttgtaatttactgtactactagataggcgtatcttttaccagcgtaaacagaggctgtaaatcagaggatttgacactgtttcttacgctgagtttcaatgtaaaatggaataaaggtttctctgtc

SEQ ID NO: 2209 - DNA, 1025 bp, Oryza sativa
  ref <308>: DATABASE ACCESSION NUMBER: AK104230
  ref <309>: DATABASE ENTRY DATE: 2002-08-28
gtgccccctcctcgtctttcgtctcttctctccttccttcctccccttctcttcctctcctcccaccgagtcgccgccctctcgctttcaacccccacacggaagcaagaattgttcatcaaaacccgatctttggcgtggccccgtggatttcttgcgatctgtttggtgctatggatttctgatccggggtttcttggatcttggggagtaggaggtggggggcggcgatctggccgggagatggccggcgggaaggagccgatcgaggtcaagttccggctttttgatggtacggacatcggcccgagcaagtacgacccctccaccaccgtctccgcgctcaaggagttcatcctcgctcggtggccgcaagataaggaaataactccaaaaactgtcaatgacctgaagctcattaatgccggacggatattggagaataaccggacacttgctgagtcccgtgttccagtaggagaggttccaggaggtgtaattacaatgcatgtggtagtacgccctccacaacccgacaaaaacagtgagaagcagcttgcgaattcccccaagcagaacagatgtgggtgtaccatactgtgatacgccgcctgcctgatgatgatgtacaatgtctcgctctaggattttgtatctgctttcctgtgttcgcagctcttgtgaattcattttgacatccaattttagagccattcaaatcctagaaatatacatactttaacacccgtcaaatatgcttgggagctggaactgaaggtttctggaggatgcgtcatggtgatcttaatgttgtaacgagtgtgcagaagacagggattggatgctttctgttgtataaattgtaatgtgaaaacgaaaaaaattctctcctttttcttttttctcttgccacattgacattttatcgattctttttagcactggtgtttgtcatgtaaaaccagaatattgtactcatatatgtaagctgaaaaaaggggtgttttattctgttacgtggacgg

SEQ ID NO: 2210 - DNA, 1059 bp, Oryza sativa
  ref <308>: DATABASE ACCESSION NUMBER: AK104231
  ref <309>: DATABASE ENTRY DATE: 2002-08-28
aattgcagctaaaccagaggagagagagagaggaggtgggaactgggaagaaaaaaatggcggctttgctccgccacgccgcggcggcggcggcggccgtggtcctcctcatcgcggcggccgcctccaccgacggcgccaccagcttctacgcctcggacccaaacctcggatccgcccgcgtcgtcttccagacaactcatggtgacattgagtttggcttctttcctcatgttgctcctaagacagttgaacacatttacaaacttgtgaggcttgggtgctacaacacaaatcactttttccgggttgacaagggttttgttgcacaagttgcttctgttgtgggtggtagaactgcccccatgaatgatgagcagcaagaggaagcagagaaatcggttgttggtgaatttagtactgtcaagcatgtcagggggattctgtccatgggaaggcactctgatccaaacagtggtggttcttccttttccatccttcttggagatgcaccacaccttgatggacagtatgctgtatttggaaggctcacaaaaggtgatgatacattaagaaaacttgagcaacttccaactcgtagagaaggcatatttgtaatgcctattgagcgtatcagcattctgtcaacatactattatgatgttgatttagagagctgtgaagcagaaaagtccattcttaggaggagactttctgaatcagcatcagaagttgagagatggagaagaaagtgctttgcatgatgctggagttatgttagcagaacaggttcaagcttctccctgacttgattgctgaggcctgaatattgaaagcatggcgagggaacccctggaatggaatttgtatgttgtgtgcatttatcctagcaaaatgctgtaacagttcaatagaagtgtggataattctctcttctttttttctgttaatctttccagcacacttggatctgtacacaactacacatcatactgaatttgtcattgcttttacaaaaaatacattgtactagtatcttattttacgaaaatattgtat

SEQ ID NO: 2211 - DNA, 1241 bp, Oryza sativa
  ref <308>: DATABASE ACCESSION NUMBER: AK060093
  ref <309>: DATABASE ENTRY DATE: 2001-12-06
gatccaaacccccctaatccatccatcgaatctcgttgctcgccggtcgccgccccgtctcctcgcttgccggttacaaggacgacctcgtcggggcggcggaaccctccagcctccgggctcgccgccgccgccaagctcgcatcccgcgccggccgccgagctcgccgcccaaccccaaccccaaatcaatcagatcaattcaactatccaagcctaagttgttggatctagaatccatggcgatcgtttacgcggtggtggcgcgtggcaccgtggttctcgccgagttctctgccgtctccgggaacgccggcgccgtcgcccgccgcatcctcgagaagcttccgcccgacgccgagtcgcgcctctgcttcgcgcaggaccgctacatcttccacgtcctccgctcccctccccccgccgccgccgatggcctcaccttcctctgcatggccaacgacaccttcggaagacgaattccctttctttacctcgaggacatccaaatgaggttcatcaagaactatggcagaatcgcccataatgcgctcgcctatgccatgaacgatgagttctctagggtcctccatcagcaaatggagtacttctccagcaaccccagcgccgacacactcaaccgtctccgtggggaagtcagtgagatacatactgtcatggttgacaacattgagaagattctcgacagaggtgagcgcatctcgctactcgtcgacaagacctccaccatgcaagacagtgctttccacttccgcaagcaatccaggaggctcaggagagctctttggatgaaaaatgccaagcttcttgctgtgttgacagctgtcatagtacttctactttacttgatcatcgctgctttctgtggaggcctttctcttccatcgtgtagatcatgatccgctctacagatttacctcaattaaagcatcacaccatgtaacaacaatgcaagcctatcaatgccatgtgtcgtatctgttcagcacccaaagttacaagtgatgttttgagaaaatgatttggtgctgagttttcgttatcgggagggttgtgctccttcaagttaatatggaacggtttgtacaaaatgggatctatatgtacagtagtatgtcgtttgttgtttgtgttggctaagacttttctgtaccgttgtgcttgcacatgaattggatgttttgcctgatgatatgagtgctgtggtatgccctttcctt

SEQ ID NO: 2212 - DNA, 1182 bp, Oryza sativa
  ref <308>: DATABASE ACCESSION NUMBER: AK104232
  ref <309>: DATABASE ENTRY DATE: 2002-08-28
gtgctcagtttcactcttatcagtgaattagatcatatacttgtgtccttgacagctcgttaattagcatggctaggtctctcgctgctctccttctccttctggtcgcagccgcgggagccagccatgccgcgtcgccggcggagatgtactggaagatcgcgctcccgacctcgccgatgcccggcgccattcgcgacctcatcagcccggcgagctcagcggcctcagcttcgaaggataaggaggatacggtgggctccgtgttcttcctcgagaaggacctcttcccgggctccaagatgacgctccacttcacccgcgccaccgccggcgccgcgctgctccctcgcggccgcgccgactccgtcccgttcgcctccgaaaagctcccggagatcctctcccagctctccatccccgccggctcgccgaccgccgacgccatgcggtccacgctcgccgtgtgcgaggccgcgcggatcgccagcgagacggcgcccaagcacaagcactactgcgccacgtcgctcgagtccatggtcgagctcgtcgcctccagcctcggcacccgcgacgtccacgccgtgtccacggaggtggtcaacagggccgggccgacgccgaggcaggcgtacagggtggaggccgtgaggcccgtgccggtgcccgggggcgacatggtggcatgccacaggatgccctacgcgtacgccgtgttcggggtgcacgggatcaagggcgcggcgtacacggtgacgctggccggcgccgacgggaccatggcggaggcggtggcggcgtgccacggggacgtggacgggcacggcgtggcggtggcggaggcgtacaagaggctcggcgtggcgcccgggaaggtggcagtctgccacttcctgcctcaggacgacatgctctgggtgcgcaactgaatgaagcagctacctgcgcgccatccatggctaattaagctccttcctatattttcgatctacctgccggctggctatcatgttatcatcgcgtgtgtgtgcgcgccgatccgacatgcccacactacacgtcgacactacacgtgttttattttgttaattaataagtctggacaaccaggtcatcttgtacggcacttctcccctctgtcccgaaataaaccaacttataaagattgaagtttgtcgc

SEQ ID NO: 2213 - DNA, 1047 bp, Oryza sativa
  ref <308>: DATABASE ACCESSION NUMBER: AK060094
  ref <309>: DATABASE ENTRY DATE: 2001-12-06
gatgagctgggcggcggcggcggtggacatgtcgccggtgcggttcgacgccgcctacatgccgctcttcggaggggacaacctcgttccctcgcctcacgcccgcaccgtcctcctcaaactcgaccgcttcaccggttctggattcgtgtccaagtcggcgtaccaccatggattcttcagtgcttccatcaagcttcccggggcagcacgacgagctggacttcgagctgttgggcaaccggcgaggccacgcatggcacgtccagaccaacatgtacggcaacggcagcaccgggcgcggccgcgaggagcgctacctcctccccttcgaccccaccgccgccccgcactcgtacgccatcgcctggacccccgccgccgtcatcttctacatcgacgccatccccatccgcgagctcgttcgctgctcctccggcgactaccccgccaagcccatgtccgtctacgccaccatctgggacggcttcgcctgggccaccgacggcggcaggcacaaggtcgactacgcctacgcgcccttcaccgccgtcttctccgacctcgtcgtcaccggtggtactgacgacgaccactgcgccgccatgggcctgatgacgtcggaggtggccgtgatgacgccggcgaagcgcggctccatgcggcggttccggtcgcggcacctgacgtacagcgcgtgctacgacacggtgcgctacaacggcaccggcgtcgtcttcccggagtgcgacgagtcggagcaagacaacttccacgcatggggcgagtccaagcgtgtcatcaacagcagatccagttccagcgccacatacgccactggttcaggcgtgcgcatcgactaatttatttactagtactgtgtaatctcaatcatgcattattccaccagttgatcctgcttctagatgatcgatgatgagtttgtacgtacgtgcacactgacacattttccagttcatatatatactcgtatttccttcggtcgttcgattcgattcgattcaattatttggtgattttgctatc

SEQ ID NO: 2214 - DNA, 1005 bp, Oryza sativa
  ref <308>: DATABASE ACCESSION NUMBER: AK060095
  ref <309>: DATABASE ENTRY DATE: 2001-12-06
gagatccaaagccgaacgccactagctagctgagagagaagcgccggccggcgagggggctagtgcgcgggaatggcggcgggcggaggcggcggctacagggcggaggacgactacgactacctgttcaagacggtgctcatcggcgactccggcgtgggcaagtccaacctgctgtcgcgtttcaccaagaacgagttctgcctcgagtccaagtccaccatcggggtcgagttcgccacccgcagcatccaggtcgacggcaaggtcgtcaaggcccagatttgggacaccgccggccaggagagataccgtgctattacaagtgcctattacagaggagcagtaggtgcactgcttgtctatgatgtcactcggcgtgctactttcgataatgtggcacgctggctaaaagagctgagagaccacactgaccctagtattgttgtcatgctagtaggcaacaaatccgatctccgccatctggtggctgtttcaactgaagatggaaaggaatatgctgaggctgagtcattgtacttcatggagacatctgcattagacgccacaaatgtagagaatgcttttgcagaagttttgactcagatataccaaactgtcagcaagaagacggttgaggcatcagatgatggatcaaatgctccaatcaaaggagagaagattaatgtgaaagatgacgtgtctgcgctgaagagaattggctgttgctcaaattagagtagagatgcatttcttgttgattttttccactaggtgtacggctgtatgttgcttctattgaaagaggtccattaattttcattttgttgtggtgatattgagagttagattgttccaactttcagttataccatttcttgaaagtcttaactcaagacagctcctttcgtcagattggttactgtattcgacataattctgcaaaacatttgtttacagtgggaacctggcaatatttcggggcattctgacagccttctgaac

SEQ ID NO: 2215 - DNA, 1128 bp, Oryza sativa
  ref <308>: DATABASE ACCESSION NUMBER: AK104233
  ref <309>: DATABASE ENTRY DATE: 2002-08-28
gtgctcagtttcactcttatcagtgaattagatcatatacttgtgtccttgacagctcgttaattagcatggctaggtctctcgctgctctccttctccttctggtcgcagccgcgggagccagccatgccgcgtcgccggcggagatgtactggaagatcgcgctcccgacctcgccgatgcccggcgccattcgcgacctcatcagcccggcgagctcagcggcctcagcttcgaaggataaggaggatacggtgggctccgtgttcttcctcgagaaggacctcttcccgggctccaagatgacgctccacttcacccgcgccaccgccggcgccgcgctgctccctcgcggccgcgccgactccgtcccgttcgcctccgaaaagctcccggagatcctctcccagctctccatccccgccggctcgccgaccgccgacgccatgcggtccacgctcgccgtgtgcgaggccgcgcggatcgccagcgagacggcgcccaagcacaagcactactgcgccacgtcgctcgagtccatggtcgagctcgtcgcctccagcctcggcacccgcgacgtccacgccgtgtccacggaggtggtcaacagggccgggccgacgccgaggcaggcgtacagggtggaggccgtgaggcccgtgccggtgcccgggggcgacatggtggcatgccacaggatgccctacgcgtacgccgtgttcggggtgcacgggatcaagggcgcggcgtacacggtgacgctggccggcgccgacgggaccatggcggaggcggtggcggcgtgccacggggacgtggacgggcacggcgtggcggtggcggaggcgtacaagaggctcggcgtggcgcccgggaaggtggcagtctgccacttcctgcctcaggacgacatgctctgggtgcgcaactgaatgaagcagctacctgcgcgccatccatggctaattaagctccttcctatattttcgatctacctgccggctggctatcatgttatcatcgcgtgtgtgtgcgcgccgatccgacatgcccacactacacgtcgacactacacgtgttttattttgttaattaataagtctggacaaccaggtcatcttgtacggc

SEQ ID NO: 2216 - DNA, 1182 bp, Oryza sativa; identical to SEQ ID NO: 2212
  ref <308>: DATABASE ACCESSION NUMBER: AK104234
  ref <309>: DATABASE ENTRY DATE: 2002-08-28

SEQ ID NO: 2217 - DNA, 972 bp, Oryza sativa
  ref <308>: DATABASE ACCESSION NUMBER: AK104235
  ref <309>: DATABASE ENTRY DATE: 2002-08-28
aaaatccatctctacacatcagcaatatttagctacacagagctagctaggattagctcagcaatggcaggtgctcctcgaggactagttctcctcggcgtttgtgccgtcttgatggcggtcgccgtcggcggtgaggcggcgtcggttgtcgtcggcacggccaagtgcgccgactgcacccggaagaacatgaaagctgaggatgctttcaagaacctccaagtggcgatcaagtgcaagaacaccaacggtgagtacgagagcaaggctgccggaaagctcgatggcaccggcgctttcagcgtccccctcgacgccgatcttgacagctccgactgcatcgctcagctccacagcgccaacaacgagccatgccctggtcaggagccatccaagatcgtgccaatgtcggagggcacctttgtcgccattgccggcaagacacactacccatcagcgttgtgcgcgtcagcgaccatctgcggtcccatcaagaagaagatcatagaccacttccacaagaagccggtgccacccaagccggagccgaagccggagccacccaagccgaagcctgagccggaacaccccttcctcgaccatatccacaagaaggagaagcacttcttcgaccacttccacaagaagccagtgccacctaagccagagccgaagccagagcccaagccagagcccaagccgcagcctgcgccggagtaccacaacccgagccctccggcaaagaactgatgaatatgatccgcactggacgtttgatcatgccgtcctgccccctgtcagattgtctgcataataacagtttgagatcgaagtcatgcattagctttcatcgacaggagttttaatttgtacttgtatctatttcttctctatcaaatgcagttatatatggtaagataatttatttatatttaatcagtactgttgtggcggactattcactgtatc

SEQ ID NO: 2218 - DNA, 1293 bp, Oryza sativa
  ref <308>: DATABASE ACCESSION NUMBER: AK060096
  ref <309>: DATABASE ENTRY DATE: 2001-12-06
aaaaccaacacccccactcatctcacttcactctctttctcttctcttcacttcaccaccgccacctctctcatcggatccctgcagaggaggagagggcagtggcggcgaaaggcgacatgggctcgctgtcctctctcgccgccgcggcggtgtttctctccctcctcgccgtcggccactgcgccgccgccgacttcaacgccaccgacgccgacgccgacttcgccggcaacggcgtggacttcaactccagcgacgccgccgtctactggggcccctggaccaaggccagggccacctggtacggccagcccaacggcgccggccccgacgacaacggcggcgcgtgcgggttcaagcacaccaaccagtacccgttcatgtcgatgacctcctgcggcaaccagccattgttcaaggacggcaagggatgcggctcttgctacaagatcagatgcaccaaggaccagtcgtgctccggcaggtcggagacggtgatcatcaccgacatgaactactacccggtggctccgttccacttcgacctcagcggcacggcgttcggcaggctcgccaagcctggcctcaacgacaagctgcgccactccggcatcatcgacatcgagttcaccagggtgccatgcgagttcccggggctcaagatcgggttccacgtggaggagtactcgaaccctgtgtacttcgcggtgctggtggagtacgaggacggcgacggcgacgtggtgcagatggacctgatggagtcgaagacggcgcacgggccgccgacggggaggtggacgccgatgagggagtcgtggggctccatctggaggctggacaccaaccacaggctccaggcccccttctccatccgcatccgcaacgagtccggcaagacgctcgtcgccaacaacgtcatcccggccaactggaggcccaacacattctaccgctccttcgtccagtacagctgaaccgccgctcgccggcggcgaccctcggcgccggcatcgccgccgctgctgctgctagtaatactactactgctatgatgtaattgtgttaccggttgggttctttgagtttgttggggttggggattgtgtggtcggtctgtgttgcgatttgcagaaaccgggcgagcgaaagaagaaaaaaaaagctgtgtgggaaatggaggaggtaggcgtacaaggttacgctctcccgcccactctcgcttttataatttatcattttcaaatggtgatgatatgatgattaatcaaaaggattatattgctactt

SEQ ID NO: 2219 - DNA, 963 bp, Oryza sativa
  ref <308>: DATABASE ACCESSION NUMBER: AK104236
  ref <309>: DATABASE ENTRY DATE: 2002-08-28
atccatctctacacatcagcaatatttagctacacagagctatctaggattagctgatcagcaatggcaggtgctcctcgaggactagttctcctcggcgtttgtgccgtcttgatggcggtcgccgtcggcggagaggcggcgtcggtggtcgtcggcacggccaagtgcgccgactgcacccggaagaacatgaaagctgaggatgctttcaagaacctccaggtggcgattaagtgcaagaacggcaacggcgagtacgagagcaaggccactggaaagctcgacggcaccggtgccttcagcgtcccccttgacgccgacctccacagctccgactgcatcgctcagctccacagcgccaccaacgagccatgccccggccaggagccatccaagatcgtgccaatgtcggagggcacctttgctgccgtcgccggcaagacccactaccgatcggcgttgtgcgcgtccgtgaccatctgcggcccaatcaagaagaagatcatagaccacttccacaagaagccggtgccacccaagccggagccaaagccggagccacccaagcccaagcctgagccggagcacccattcctcgaccacatccacaagaaggagaagcacttcttcgaccacttccacaagaagcccgtgccacccaagcctgagcctaagcccgagcccaagccgcagcctgcgccagagtaccacaaccctagccctccggcgaattaagcaatggaagtttgcatgcatgcatggttcgtttggttagtacgtttggtgttgttgcatatgatttcctgtcatgtcagtttgtctgcagaataatggttttctttgatgcattagcttttactcacaagtttaatttgtgtgtgtgtgtctatttgtttggtatcagcaagtaattaatataatcagggatgtgcataatatatgtgcaacttgtttgatctc

SEQ ID NO: 2220 - DNA, 1139 bp, Oryza sativa
  ref <308>: DATABASE ACCESSION NUMBER: AK060097
  ref <309>: DATABASE ENTRY DATE: 2001-12-06
atgccggtaacgactcccaccaccgcatcctccccgcttttcccactcccaaccacgaccgcggccggccggcgaatcgcctcgattccggcgtgcgaattcctccacctcgccgccgccgctgctcgcgaccgatcttcaccttccgcttccccccccctgcagccgattggactcgatcctatcctatcctatcctatccccgaacgggcgatctggtaggcgagagagaccagccatgtcgggggtgttcggcaaggtgttcgggaagtccaaggcgcagagccaggccaccgcgctggcctccatcgacaagctcagcgagactcttgaaatgctggaaaagaaagaaaatttgctagtgaagaaagcgaatcttgaggttgagaaggccaagaccttcactaaagcgaagaataaaagagctgcaatacaatgcttaaagaggaagagattatatgagcaacagattgagcagcttggtaatttccaattaaggatacatgatcagatgataatgctggaaggtgcaaaggctacaacagagactgttgatgcattgagaactggagcatcggcgatgaaagcaatgcacaaagcgacaaatattgacgacgttgacaagacaatggatgaaattaatgacaatatggagaatatgaggcagatccaggatctactatctgctcctattggagctgcagctgattttgatgaagatgagctggaagctgaattagcagatctggagggggaggaattggaggcagagcttctagcacctacaacgactgcccctactgctccagtgcgtgtacagcaaccaactcggccttctgcccagagcagcaaaactgaagatgacgagttggcagctttgcaggcagagatggctatgtaattagttttgcaggctttgatagggtcatgccaaaagatcagatacttcaaatactcctatattggactctggtgtactcatgaagatcttcctaggaagatgtcagagacacagaagcaagctgcatgccagcctaacccgttatgtatggtatcatgtcatgttactgccttgtaaatcaaacagagctatttgagcacattatgagctaataaaatgtactacccgtgatggcgtc

SEQ ID NO: 2221 - DNA, 1024 bp, Oryza sativa
  ref <308>: DATABASE ACCESSION NUMBER: AK060098
  ref <309>: DATABASE ENTRY DATE: 2001-12-06
aagaagcgaacaaaaaaagcaaggcactgcatttccctgccactgctgagcagtgagcacaaatcacagacacaaatggaagcagcagtggctactccttccttgctcttctctagcccaacacccaggaggccttcctcctgcttgtcactgccgcctccttgcagcagcagctacgcctccaatggggcgaagctgcagcagccgcggctgcagttcgtcagtcagctaaccagcagaaacagcaacgggagtggcagaagaagcatttccattttgtcgctgaggtgctcttccagtggcactgacagcgcgtcttcttccgccacttcagaaagatgggttcttgagcctgcaggagacggcgattggcgtcatatcgggtaccgcgtcgcacgacccggcggcttccagatagcatccgaggcggcggtgacggtgggtcgtgttcctgaacaggctgacatcgtcctgtctgtcgcaacagtttctgggacgcacgcacggctggagaagaaagaggggagcctgttggtaacagacctggagagcacgaatggcacctacatcaacgagaggcgcctcagcccgggtttccccactcccatcgaccccggtagcctcctcatttttggcgacatccacctggccatgttccgtgtttccaagatggtcgtggatgtgcccagtgacgccagtggagctgagcaggaagcagctgagacggctcaagtatcagctgcagcccaacagaccaattaattagcgacctccatgtgctgcttgatgcatcaagacagctcaagaagaactagcttatcagtgctcccaaaggccgacatgaagtgcatatgttacgatcgacagtctcccttgcaaataagcgcatacatatgttgtgtgataggaatgtcacagagcaacaactctggatattaattaatagagggagcgcacataatggtagccccgtgatcaacttaaaatgcatttatcaagtaccaaagatgccaatattacaagt

SEQ ID NO: 2222 - DNA, 957 bp, Oryza sativa
  ref <308>: DATABASE ACCESSION NUMBER: AK060099
  ref <309>: DATABASE ENTRY DATE: 2001-12-06
aacgcaacccaaagattcccagtatcccaccaccgcattgtgcatttgtgaattgtgagtgtcgaatccaagagttggagttcgtgttcgatggggtcgcaggcgatagaggcgcacagggagggggcggaggtgtaccacggggcggcgctgtgcgcggagaaggcggtggagctcctcgcggagatccacatgccgctgggcctgctgccgctggcggagatggaggaggtcggctacaaccgcgccacggggttcgtgtggctgcgccagaagaaggccatcacccacaccttcaagcagatcagcaggcaggtctcgttcgccgccgaggtcaccgccttcgtcgaggaccgccggatgaagcgcgtcaccggggccaagaccaaggagctcctcatctgggtctccctctccgacatgttcatcgacaaggacgacccctccaagatcaccttcaagacccccaccggcctcgggaggacctaccccgtcgacgccttcgccaaggaggacgatggcaagggcaaggtccccgccgccgcagcagcggccaacggcaaggagaccgccgtcaacggcaaggccaagtgagggtgacgcgggtttcttgcggggtttaaggttaactaccctcttaattgatatacttagtcttctaaataaaatcacggctgctgtattactactactactctgctccggtttttcaccgagagcgttatactcgtgtgtcacctatcctatttttttgtctgttttatcaagcggggattaatcttgtgaaccttacagtagcatcacgagaagtagatgactacctgaacgatgttcatgattttagacttgaaaatcttctcttggccgtaattataattcctactccatctacagttgtattcgcagacaagagtagctgtcgtatttaaacatgttgctggtgagaaatttatggct

SEQ ID NO: 2223 - DNA, 1173 bp, Oryza sativa
  ref <308>: DATABASE ACCESSION NUMBER: AK104237
  ref <309>: DATABASE ENTRY DATE: 2002-08-28
atcgcagtggcgatttctcatctgaattgcaggccaattccagttgagtttctccacagaccacagatatggcttccggcaggatagctctgctctgccttcttggcttgctgctggtagcagcctcaccggctgccattgctgccaaagatgacaaaatcttctaccagattactttcatgtggccgggagcgtactgcgcgcagacgaaggccggatgctgcatgccgaagaccgacgtcgcgccggcgtccgacttctacgtcgccggcttcacggtctacaacgccaccaccaactcttccctgtccagctgcagcaacactccattcgacatgaaccaaattggggatgtcacgaggctgatgcagtactggaacaacatcaggtgccccagcaagagcggccagaagggctggaagaacgcgtgggagacgtccggcgtctgctccgacctcaccgagagcgcctactttgacaccgccctcgccctccgcgacaagatcaaccccctttctcgcctcgtcagcaacggtattaagccggactttgggctgtacagcgtgaagaagatcaaggaggtgatcgaggaggggatcggcgcgccggcgctgatccagtgcagcaagggcccgttcaacaagttccagctataccagatatacgtctgcgtcgcggaggacgccaagacgttcgtggagtgccccagcccgaggaagccgtacacctgcggcgacgacatcctcttccaccctttcaagaagtggatgctcaagaccaactccaccaaatcctacgccgccgccgacgccatcgaccagctgctcgaagcggtcatggaaatctgagctcgatcgatcgatcgatcaagaagacaaattaacccttgttgtgatatgcgatttgtgcgtgtgtgttgtctgtttcgatcgtgatgttttctgcgtgtttatttcgtgatgttctctcatcgcgcccgcgcgcggttgggtacgatccgggacacctacgtagcactgaatccgtctctgtgatgcattcagagaataagtccgaatatgtgcggccttgttaatgttttcatgaataactcgtgtagtgggattactttgtcatcggacatttcatgatttccgatgcacaccttggctatgttcttccccccattttcct

SEQ ID NO: 2224 - DNA, 1041 bp, Oryza sativa
  ref <308>: DATABASE ACCESSION NUMBER: AK060100
  ref <309>: DATABASE ENTRY DATE: 2001-12-06
ctttcctcctcccccacccaaagctcgagctcccgctagggtttcgccgccgccatgccgcagggagatcacatagagcttcaccagaagcgccatggccggcgcctggactacgaggagcgcaagcgcaagcgggcggcgcgcgaggtgcacaagcgatccagggatgcccggcagttgcttggtgctaagggtaagaggttcgccaagaagcggtatgccgagaaggcacagatgaagaagaccctgaaaatgcacgacgagtcaacttctcggcagaaggttgatgatgttcaagagggtgctcttcctccatatctgctggaccgtgatcagacacaacgtgccaaggttctcagcaacacaattaagcaaaagaggatggaaaaggctggcaaatgggaggttcctttgccaaaggtcagacctgtggctgaagaagaaatgttcaaagttttacgaactggcaagagaaaaaccaaacagtggaagagaatggtcactaaggccacctttgttggacctgggtttacaaggaaaccaccaaagtatgaacggtttattaggccaactggccttcgtttcacaaaggcccatgttactcaccctgagctgaaatgtactttcaaccttgacataatttctgtgaagaaaaacccaaatggtcaaatgtactctactcttggtgttttgacaaggggaactatcattgaggtgaacgttagtgaacttggtctggtaacccctgctggaaaagttgtttggggtaaatatgcacaagttacaaacaacccagagaatgatggctgtatcaatgctgtcttactcgtgtaaggacgcaatgctatacacttcattcttctcgttgcgactctcaccccagatgtacccgttcagtgggtctttttgaccgatcattcagagtagcgtgttttaaactgtgggcacaaggctcatctgttatatgcctttaacatatctggaatacattttacattgtatgtcgtggtgcagaaaagatctttactagttacattttac

SEQ ID NO: 2225 - DNA, 1260 bp, Oryza sativa
  ref <308>: DATABASE ACCESSION NUMBER: AK104238
  ref <309>: DATABASE ENTRY DATE: 2002-08-28
acacacgctcgattgcatatttgcattagctctagttgtcttgctaccgatcgatcgaattcatcaatggcatccggtggcgaccagacgacgacgaagagcaggatcctggtggtcggcggcacggggtacatcggccggcatgtcgttgccgcgagcgcgcggctgggtcatcccaccaccgccctcgtcagggacctcgccccctccgaccccgccaaggcgcagctgctccacaccttccgcgacgccggcgtcaccctcctccacggcgacctccacgaccacgccagcctgctgcgcgccgtccgcgacgccgacgtcgtcatctccgcggtgcgcgcgacccaggtccccgaccagaccaggctcatcgacgccatcaaggaggccggcggcggccgcgtccggaggttcatcccctccgagttcggcatggacccggggcgcggcgccagcgcggcggtggagccggtcaggtccatgtacggcagcaaggtgggcatccggcgcgccgtggaggcggcgggcatcccgcacacgtacgtggcgtgcaactacttcgccggattcgcgctgccgtcgatcgggcagttcatgccaaaggcggcacccgtggatagcgtggtgatcctcggggaggggcacaccaaggtggtgttcgtggaggagggggacatcggcacgtacacggtgctggcggcggtggatccccgggcggagaacaagacgctgcacatacggccgccggcgaacaccatgtcgcacgacgagctggtgagcatgtgggagaagaagacggggaagaagctggagagagtgtacgtgcccgaggacgccgtgctcaccaaaatcaaagagttagagtacccgaagaacgttttggtgtcgatcgcgcacgcggcctactgtagaggggagatgagctcgccgctggatgatccgcaggacgtggaggccactcagctctacccggaaatccaatatacaaccgttgacgaatatctcaacaccctcctctaattcatttcgtcatgcatcatatcaccctaaatatgcatgcgccaataaaaacaagtcttgattttattttgttcattgctccatcttcagtcagtgtccactggtttgtctgtcatgcatggatcatttttactcttcaattcagttctgcatttcagttgagctgttcagctgagtgccttgatttgtaccacctatctgccttgttacaaatttatgtcaaagtcttcttgctct

SEQ ID NO: 2226 - DNA, 1102 bp, Oryza sativa
  ref <308>: DATABASE ACCESSION NUMBER: AK060101
  ref <309>: DATABASE ENTRY DATE: 2001-12-06
cttataattggtaacctcggggactcgcgggccatcttaggcacaagagataaagataatcagcttatggctgtccaattgacagttgatctcaaacctaacattccaagtgaagcacagcgaatcaggcaacgcaggggcaggatatttgcacttcctgaggagccagaggttgctcgtgtttggcttccgaagtacaactcccctggactggccatggctagggcatttggagacttctgtctcaaggattatggtctaatctctatgcctgaagtctcgtaccaccgtatcacagaaaaggatgagtttgttgtattggctactgatggggtttgggatgtgctgtcaaacactgaagttgttagtattgtcaacagagctacttctcgggcctctgcagcacgattgctagtcgaatcagctcaccgtgcctggcgtgcacgtttccccacttctaaaattgatgattgtgctgtggtctgcctattcctggatacagacgaattaagtgaaacatccagttctatggcccgcgatatgacaaatgctgtagaagttagcagtgggcagcactccaatactatccaattgagcactggagtatcttcagatgttgttactgcagttctaacagatggtgatgatctgtctgctgttgatgcagttgcaaagctggttactctcacggatttgccgaacaatgcttcaggcgcaacgcaaagcatcaccaccaagtgagccttgtttgttccccggggattgagcatttgtgggacgatcctgcacagttgtgatgatgcgggtcgcgcattcagaattctcttgccgagactgatgcctgtttttgtaagagcacatcggaagttgcagcttgctatttttctccatgcaagtgtggataggatctgcagttttttcgccttttgtaaagtaccaaagtcagtttagcgtcatttgttgtatttcttttgctataattttgttctcgctatcgttggtaaatcatagtaaatcccctataggcagaagaagccttttgagttttcaccattttattctgtaatattcattcgatttctacctcgcctgggggactccc

SEQ ID NO: 2227 - DNA, 957 bp, Oryza sativa
  ref <308>: DATABASE ACCESSION NUMBER: AK060102
  ref <309>: DATABASE ENTRY DATE: 2001-12-06
gtttgctgcggtgttcaacctagaggattacaaagttgctcgtgagagatgttacaagcaaattgctgcggctgttgctaaataccgagatattaagaagaacattaatgaaggcctcaatttttatgtgacattacaggaagcaattggcaaaataaagcagcagtgcagtgacttcataatgacccgaaacattcaatgccgtgaaatgatcgaagatgtgcagaagaagctagcaggtttcagcttctcatcttcttccagccaagcaagcatgcagaggaatacttctgtgccaccagatcagaacagtccatcaccaccaccaccgtcgtcgcatgctccccatgctcagggcccatatggtgttccacccggaggcgattcaagacccgggtactctcagcccgagcaaagacctgcttactcacagccatacccgccctatggcgcgccaccgcaacagcctccatatggtgcgccgtcgcaacagccaccttatggcgcgccccaccctggtcactaccaacagccaccacaccagcaacctcccaaccatgactatggccaacaagcatatcctggaggatggcgcgggcagtactacaatccacatcagccacagccgcagccacagccgccatatcctcagccaccgtacaatgcccagggttcttaccctcctcaccagagcagctactacaggcctcaatgagagatggttttgggatgtggcagaacatgtttgtgtgcctctttttatttttcttcagactgcgcatatgtgaattacgttttatggtgtactgcttacaaagtgaggtggtgtaatatcgattggtgtcaggttggttagacaatagcctgtatcatttggtccgtattaataatgttgaatatgatatatacaggccacgcgcctgcaatccccattaatatgtgccattgttgagcagt

SEQ ID NO: 2228 - DNA, 1003 bp, Oryza sativa
  ref <308>: DATABASE ACCESSION NUMBER: AK060103
  ref <309>: DATABASE ENTRY DATE: 2001-12-06
atcaaactcatcaagtcaacaacaactttttgcaaccctagctagcttgcatacttagttagctatactatactactcttcttcttcttcttctcttcttcttcattggatcaagcaaggagagagtaattaattaagtaggcaatcatgtgtgagggcgagaagaagaaggactcgtcaagcggcgcgctctactgtgtcaacctcgccctccgcatcgtcgtcctcgggctcgccgtcgccgcggcggcgctcatggcgacggcgagccagtgcaccatcttcctctactacggcggccctctccacaccatcacctacaaggactttggccccttcgtgtatttggtggtggcgagctcgatcggggcgttcatggaggcgatcgccatcttcctgaccatctgcaagaagaaggacggcacgccggcgaaggtgctcctgccgctgctggacgccgccgtgccggtgctgctctactcggcgacggccgccgcgttcgccgccggcgacatgtcgtactgcgccgtggggaagcgcgtcggcgtctgcaccaccgccgccgccggcaacttctgcaaccaggtgcacattgccatgtacgtctccctcgccgccggcgtcgccctgctcatcgccgagatcgtcaagcactggccggactccgggaagaagaaggaaggcggcggcggcggatgcgggtcggactccgactccgacaagtcaaccccttgccaccatggctgccatagcaagcattagtcgagctctctagctagggtacatttaattctataatcgagaaatttatacgagatttttagataaattaatcgtcgcttgattaattttccatatattctcaaacaaaagaaaaccaaaaaaaaaaaaacaagccatgcatgcatgcatttctcatgagaggccagtaatataatcaagtggcctagctatatttgtatcatggaaaacttgttgtaattaattaatgtttgtgtgtgtc

SEQ ID NO: 2229 - DNA, 1182 bp, Oryza sativa; identical to SEQ ID NO: 2212
  ref <308>: DATABASE ACCESSION NUMBER: AK104239
  ref <309>: DATABASE ENTRY DATE: 2002-08-28

SEQ ID NO: 2230 - DNA, 1026 bp, Oryza sativa
  ref <308>: DATABASE ACCESSION NUMBER: AK104240
  ref <309>: DATABASE ENTRY DATE: 2002-08-28
aagctaagctaaaccttatcatcgtcaggtcaggcacttcaccaaccctctgcctcccttccgccgccctccgccgccgcatgcaagccatcctcgccgctgccatggccgcccagaccctcttgttctccgccatcgcccctcccgcctcccttttccagtccccttcctctgcccgccctttccactcgctccgcctcgccgccggccccgcgggcgccgccgctgccagggcgctcgtcgtcgccgacgccaccaagaaggccgtcgccgtgctcaagggcacctcccaggttgagggagtcgtcaccctcacccaggatgaccaaggtcctacaacagtgaatgtccgtgtgacgggacttactcctggacttcacggcttccacctccacgagtttggcgatactacgaatgggtgcatatcaacaggaccacattttaacccaaacaatttgacgcacggtgcaccagaagatgaagtccgtcatgcgggtgacctgggaaacattgttgccaatgctgaaggtgtagctgaggcaaccattgttgataagcagattcctctgagtggcccaaattctgttgttgggagagcattcgttgttcatgagcttgaagatgatttggggaagggtggccatgagcttagtctcagtactggaaatgctggtgggcgacttgcatgcggtgttgttgggctgaccccgttgtaggtcgctgcaagttgcagctgaagtgtcagtatcgcatccatgtcaccctttttgtcatcttcgagcctgaggcagtcgttcttgtatcacatggatttcgcaacatggatgcttaatagtatctgttgatcgttcgtctcacagtaataaaatttagttgagcaaataagtgtcgtcacatcccctgttctccaccctgtcaaactataaattgtgaaacatgagctgttctgggtatacaacgcataaaaaaaaccatgtgttatacataacagccttgttgctggctgtactttcgtgcttctgatct

SEQ ID NO: 2231 - DNA, 1034 bp, Oryza sativa
  ref <308>: DATABASE ACCESSION NUMBER: AK060104
  ref <309>: DATABASE ENTRY DATE: 2001-12-06
cgacgagcatgttctgctcggtgctgttcctttccccagcgatgttctacggctgaaggagcttggagtttgcggtgttgtgacactgaatgaatcctacgagaggctggttcccaggtgcctgtatgaggctcatggaattgaaaacctggtgttaccaactagagattatctttatgcaccatcatttgagaacctttgccgggctgctgacttcatccacagaaatgctttgtgtgggaagttgacatatgttcactgcaaagctggacgtggacggagcacaacagttgttctttgctacttggtgcaatacaaacaaatgactccggctgaagcttatgaacatgttcgcttgcgcaggccaagggtgctattagcttctgcacagcggcaggctgttgagcaattctaccagcttagggtgaagaaatctgggaaatccatttgcctggacagcccaataatgaaaccaccgctgttccttgccactcgcaacctcattgcatttgacgagaagacattcgtcatggtttccaaatcggacctcgaagggtatgatgcggataccttggccgttaacgtgggcagtggcttgtgggagataagcctagtataccgcgtgcagtttgcgagccaggcggcctttgcagggttctcatacctgtgggtacgatgccgtgccccccgtaagaacaaggaggcactccctgtccctgagagtaacaatagcgtggggagcgagagctgctcccttgaggcagagcaactcgccaaacctcacccatgtttgcttcaaggtgtcatggttaatccatgatcgttcgacttgcattcgccgcgacctttcttttaactttttgtctggcatgtcatccgtatatattaaagccaagaacatgcaaatgcaatgtgaagtccttaactccagtctcctcagcaagcaaagagtgcagttgcttgggtatgtacatatctgtaataagttgacttctacatgtacagaggtaaatgacaaggtatctcaaatcgct

SEQ ID NO: 2232 - DNA, 1118 bp, Oryza sativa
  ref <308>: DATABASE ACCESSION NUMBER: AK060105
  ref <309>: DATABASE ENTRY DATE: 2001-12-06
aaaaaaaactcagacatggcggccaccgtgtcgctctctctcgtcgtctccgcctccggcttcccctatccattcccctcgccgctctccaaaaccctagctaaccccccccgtcaaggcgccgccgcgcccactgtccggggagggcgacgaggaggagggggacatcgccatggtcgccgcccagagcttcgtctccacgcaggactccgcctccgacaccgtggtcgactactccgtcaacgaggacgaattccacaagattcgcctactgcactgcgacttttttatccgcaaggtgcctgaccccgacgacgacgtcttcgacttccgggagatgtatgtcacgccgcctgacactgacatctactccatcccaagggttcttgctccgatgccgcaaaagtatgtgaggtgcatgaagaaaaattttggtcgttaccacgttagtgagccgcctgttgagcatttgcgtgatcccctatacaagacagaaagggagatcatgaaggttttcttaacaaaacattacaggaataggcggtgtaacgacccagattttttccttgattttgaagagatatatgttattgactcgaaagcaaggtcaatcacgagagcaaaagttgtggttagtgtccctgaaggaaagaagagggacaggagaaatgacttgctactcatacgagatggaggggaatcattcagaataattgacaagaccaaaagggatgatgcgaccactgtgatccaaagagaggagtgggcaaagtcgaggcaagatgtggagaagcactttaggaagctccgcgactttgactactcgaattggttctgaagaaatagtagctggagtcattcagcagagaaattattttgctaattttgcagctgcttatattagaggaagcgaccatggaccatggtgctcaagggagaatcgccatcttcgagtaggctaattatgtgtactttaggtttttgtagcaggtagaaggcatgccacgtagcgagcctatctgtacaaaactgaaaggtttgatgcttgtgaatgcactaccttgatgggtagcgaacgaatatgtggtccttggattcagaatgcacgtgttttttat

SEQ ID NO: 2233 - DNA, 1112 bp, Oryza sativa
  ref <308>: DATABASE ACCESSION NUMBER: AK104241
  ref <309>: DATABASE ENTRY DATE: 2002-08-28
ctctcaccaacaacagtaacccaaccagagagcttgcggaagcgggggtttggtgcgggcgcgcgcgtgtgaggggggagagaaggccaggaggaggcgacgccgtcgcccgagggaggcaaaaatccgatcctcctcctgccctgctcgctcgctcgctcgcctgcgctgcgcgcacttggccccgtcccgtccgttcccgctcgccaggcatagaaagatggtgctctgggtcttcggctatggctccctgatctggaaccccggattcgacttcgatgagaagatcctgggcttcgtcaagggctacaaacgcaccttcaatcttgcttgcattgaccatcggggcacgccggagcatcctgcgaggacctgcacacttgagtccgacgaggaagccatatgctgggggattgcatactgtgtcaaaggggggcttaaaaaggagcaagaagcaatgaagtacttggaaagaagagagtgtgagtatgaccagaagatctctgtggatttctacaaggaaggagattctttgaagccagctgtgacaggtgtactagtctttgtatccactcctgatccagtaggcaacaaatactatcttgggcctgctcctttggaggacatggcaaggcaaattgctacagccaatggccccaatgggaataacagggattacctgttctcaatggagaaggcattgtccaacatatgccatgaagatgattcaatcatcgagctagctaacgaggtcaggaaggtgttgagccggccgaaggagaagatcactggctccgatagcccacaaaaatctcacgctctcgtacacctgtctgcgcttcctgagggcactgttgtggactcaagatagcaagctcggcggtggaagagatgagatctcctctgacctactcactcttgacgctggattgaacgagtttaacagtctgcttcgagctccctggcacactggggaaccagaatgtgctgattttctttcgcaaccgctgcggcaatgctgtaactttcattttgctaatactagagccgagactggtgtgctgctgtttcctttgacacactaaataataaagggattccatgagcttttc

SEQ ID NO: 2234 - DNA, 941 bp, Oryza sativa
  ref <308>: DATABASE ACCESSION NUMBER: AK060106
  ref <309>: DATABASE ENTRY DATE: 2001-12-06
ctagccgtcactccccgcattccctctcccctctcgtctcaccctctcctccctctccctctcccgccgccgccgccgagcgccacatccgtctccccctcacgctgccgcctccacctccgccgccgtcgtgtcgccgtctccgcctaccctcctcctcgtcgtctcaccctctcgcgccgccgccgcctccacctccgccgccgtcgtgttgctgtctcctcgcccctccgtgtccgcctcttcctcgcgccgtcgcccgagcgcaaccgtctccgcctccgccactgccgtcgctgtcgccgagtgctgccacttccgccttcgcctcgctccgcccctacctagcaccgcgccgcagctgccgccgttgccgagcaccgccggagcgccgtcctccatttctgtcgctatcgccgagcgccaccgatgcatccttcgccgccatggctgacgactgctgcgccaagttctcctcgagcagctcgccgcagttgtcgatgaggaagtggcgtcgaatccggcaacatctgacctgctgctgcgcctgcgccactgtcaacaatcgatttcacctgccatgaaaaaacaaaagaaaggtcagttattccggttccctgccttattcgagaggaaaaggaagtattggtgtaggcgtttagctacaaatatggtcatgcagcggcgagagcagagctgaggcatcaggcgtggtgcgcgtcgcttgatggtgcttgccggcactgtcagcaaacctggcaagaggaccactcgatgatcttgtgaacatttacagacggcttttgcatcattaagggaacttgttgcatcatggatgactaggatatcagaagagtgcaagttgtggacttcttctgctctatccaaacaaggaagacttcagatatcctaatatgcatattaatggaatttttagaaat

SEQ ID NO: 2235 - DNA, 1283 bp, Oryza sativa
  ref <308>: DATABASE ACCESSION NUMBER: AK060107
  ref <309>: DATABASE ENTRY DATE: 2001-12-06
attatctacttcctctacctcccctaatccactccactccaccgcagcttctcccgcggcgaggcggctcatcccatctccacagccgcagttgttgcagcaaggaggcatggcggtggggggtgaagaagagaagcccttcaacttcctccagattctgtgtgagggcgtcatagctggtggcaccgcgggtgtggtggtggaaacagctctgtacccgattgatacgataaaaaccaggcttcaggctgctcggggaggaagtcaaattcaatggaaaggattgtattctggattagctggaaatattgctggtgttctcccggcttctgctgtatttgtgggaatatacgaaccgacaaaaagaaaactactggagacttttcctgaaaatttgagtgctgttgcccattttactgccggggctattggaggaattgcggcttctctcattcgcgtccccacagaggttgtcaaacaaagaatgcaaacaggtcaattcaggtctgcacctgatgctgttcgtctcattgttggtaaagaaggattcagaggtctttacgctggatatggatcatttttacttcgagatctgccttttgatgccattcaattctgtatatatgagcaacttcgaattggttacaaagttgtggccaagagggagctgaatgatccagagaatgcacttattggtgcttttgctggtgccattactggggctataacaacaccactcgatgtgatgaagacgcggttgatggttcagggatcagcgaaccagtactccggaattgtaagctgcgcccagacaatcctgagggaggaaggacctggggcattcttgaaggggatcgagccgcgggtgctgtggattggcatcggcgggtccatcttcttcggcgtgctggagaagaccaagtcgatgctcgccgagaggaggagccgcgagccaccagccgggaaggatgagtgacagattttaccctcggccatggatggatgcttcaagttttgtgtttgttttgatcgatttcacatgagaagtagtgcatctctcgaggaggaagacaatgccactttgcgtcccaatgattaaattcccattcgtttaatgaattaatattatgttcaagttttttttaaaatctgattatactacattatagcttctctctctccctgcagtttacccatgctgtatgacttgtagatgtaacagtcggtcgttgccgatcaaattgtacctttgtcaatccagatagtattgcagcagtatttac

SEQ ID NO: 2236 - DNA, 1022 bp, Oryza sativa
  ref <308>: DATABASE ACCESSION NUMBER: AK104242
  ref <309>: DATABASE ENTRY DATE: 2002-08-28
aatcaaccatcacctctttcacaccatatcctataatggcgaactcaccgacgccgacaatgctggcgttcctggctcttgggctagcgctcctcctctccgccaccggccaggcgagcgcgcagaactgcggctgccagtcgaacatgtgctgcagcaaatgggggtactgcggcacgggcaaggactactgcggagatgggtgccgctctggcccgtgctacggcggcggcggcggtggaggaggaggaggcggaggtggtggaggcggaggcggaggcagcggcgtgtctgtagagagcgtggtcaccgaggcgttcttcaatgggatcaagaaccaggccccgaacggttgcgccggcaagaacttttacacacgacagtcgtttcttaacgctgcccactcctactcgggcttcgccagggaccgcaccaacgatgactccaagcgtgagatcgctgccttctttgcccacgtcactcatgagaccggacatatgtgctacatcaacgagataaacggggcgagcatggactactgcgacaagaacaacaagcagtggccgtgccagccggggaagaagtactacgggcgcgggccgctgcagatctcgtggaactacaactacgggcctgcggggcagaacatcgggttcgacgggctgagggacccggacagggtggcgcaggacccgacgatctccttcaagacggcgctctggttctggatgaacaacgtgcaccaggtgatgttgcaggggttcggcgccaccatccgggccatcaacggtgcgctcgagtgcaacggcaagaaccccggcgccgtcaacgcaagggtaaactactacaaagactactgccgccaattcggcgttgacccgggtggcaacctttactgttgagttacatgcacacatgctgcgcggctcatcgatcaggactgaataataaacaaagtaataacgaataaaacgtttggtgtgtacgtacattgcatgcacgtacggtacatgttgcaagtg

SEQ ID NO: 2237 - DNA, 1196 bp, Oryza sativa
  ref <308>: DATABASE ACCESSION NUMBER: AK060108
  ref <309>: DATABASE ENTRY DATE: 2001-12-06
atcaccggcgacgaggagacactcactgatataatcaagctagctagcttaatcacctagctatccgtcagtttagctagatatggctgcagttaactgcaaggtggtggtcgccgtgattgtggtggcgatggtggttgcggcgccgggggcgtcggcggcgataacgtgcgggcaggtgggatcggcgatcgcgccgtgcatctcgtacgtgacggggaggagcggcctcacgcagggatgctgcaacggagtgaaggggctgaacaacgccgcccgcaccaccgccgaccgccaggcggcctgccgctgcctcaagagcctcgccggcagcatcaagtcgctcaacctcggcaccgtcgccggcgtccccggcaagtgcggcgtcaacgtcggcttccccatcagcctctccaccgactgcaacaaccagccatgcggcggctgggtgacgtcgtggaggcgcctgcgctggtgctgacgccggcctccatgcagcaggctggcgggagggggagctccggcgccttggacgccagcatggtcgtcatcctcgccgcgctgctctgcgtcgtcatctgcgccctcggcctcacctccctcatccgctgcgcgctccactgcgcccgcggcctctcccccaccacggcgacgccgacgccgtcggtgtcgacagctgccacggccgggctgaagaagacggagctgaggaggattccggtggaggtgtacggcgccaagcaggccggcgtccccgacggcgagtgcgccatctgcctgggcgacttcgccgacggcgacaaggtgcgcgtgctcccgaggtgccaccacggcttccacgtccgctgcatcgacacgtggctcgccgcgcacacgtcctgccctacttgccgggactccattctctccgtccatggagtcgtcgccggcggccaaacatagctagtaatataatttcttgaacagaagaggtctaaaatgtaaatagaatataggtggtaaagtactccaaaattgggattgcgtaaatgcaagggattggacacaatgtttgaagtgtctctgtcacttggattatccatctgtttagctgtttctatgagttttctcctttaatttgtgtgctagcacatgatatttcccccaagattcgctgttcgtttgttctgggcataattttgtcaccactcaacaac

SEQ ID NO: 2238 - DNA, 817 bp, Oryza sativa
  ref <308>: DATABASE ACCESSION NUMBER: AK060109
  ref <309>: DATABASE ENTRY DATE: 2001-12-06
agctgcgctgctcccgttttcgcgcgaaagcaagcaagcaagcaacggcggcggcggcgatgctctcgttggccacccgactccggcgagtcgccggcaaactcgcccgctgcttagccacctgcgtcttcgccacaggcgtgcaagccggaatgatgctaggcgccattgctggcgtcatcgcaggcttcgtcagcgaggacgggttgctccaggggacgctgatcggggccatctccggagctttcatcgccatggaggtcgtcgactcgctcgccaagatttggtgctacgaggagtactccatcgccactcgagctcacctcatgctgcttgtgttctggaatcttgtgattgatcgcctcaccgtgcgcacctcggttttccctaccttaaccacggtgttggatagccagttgaacgcggtgccgtcgcgccatagacgagcagaggtgagcggcgacctgaccggccggagttacccggtggtgatgggcatgcggctcgccgccgtcgaccagcttccggtgatcaagctcacggcggcgcagacggacgccaccggcgcctgccccatttgccttcacgatttcaaggccggcgagattgccaggagattgccggcgtgttgccacatcttccatttggggtgcatcgacaactggttgctgtggcatgccctatgcccaatgtgccgtcgtcctgtcaactaaatgcaggtgtacatagtacatatgtagacttgcaaaaataactcaggaaacctagaaacctttttgttgcacaaagcatttaacaagagtttaatttttttgcg

SEQ ID NO: 2239 - DNA, 1032 bp, Oryza sativa
  ref <308>: DATABASE ACCESSION NUMBER: AK104243
  ref <309>: DATABASE ENTRY DATE: 2002-08-28
agggtttctcctcgccgcttccacctctctcgcgccgccgccgccgccgagcgcctggagcagcgtcagccatggccgtaggtaagaacaagcgcatctccaaggggaagaagggatccaagaagaagaccgtcgatccctttgctaagaaggactggtatgatatcaaggccccgtcggtgttcaatgtgcggaacatcggcaagaccctcgtgtccaggacacagggtacaaagattgcttctgagggcctaaagcatagagtgtttgaggtctccttagctgatctccagaacgatgaggatcaggcgtacaggaagatcagacttcgtgctgaggatgtgcaagggaagaacgtgctcaccaacttttggggcatgtcgtttactaccgataagctcagatcacttgttaagaagtggcagacactgattgaggctcatgtggatgtcaaaaccacagacggctacatgctgcgtctgttctgtatcggcttcaccaagcggcggcctaaccaggtgaagaggacttgctatgctcaagcgagtcagatcagacagattcgtcgcaagatggttgaaatcatggccaaccaggcttcaagctgtgatttgaaagagctagtttcaaagttcattcctgaagttattgggaaggaaattgagaaggcgacatccagtattttcccccttcagaatgtgtttgtccgcaaagtgaagattctaaaggccccgaaatttgacctggggaagctcatggaggtgcatggtgactatgccaaggaggacatcggtacgaagcttgataggcctgcagaagatgaggccatggccgggcaggaggtcgctgctgccgagtagagattatcacttattttgctgcccgtttatttagacaacaagtaaacagctatctagttgtggatcgtgaacatcctagcctgtgtcaatggcagatattctgaatagtttgttgggattacttgccagctgcatatttgctttctgatgagaaatgaatgtttttgagtct

SEQ ID NO: 2240 - DNA, 1014 bp, Oryza sativa
  ref <308>: DATABASE ACCESSION NUMBER: AK060110
  ref <309>: DATABASE ENTRY DATE: 2001-12-06
accgtccgcatcgcgatcacccaccaccacatcacgccggagaagtagtcggcggcggcggcggcgaaggcgaagatggtgtgcatacggcaggcgacgatcgacgacctgctggcgatgcaggcgtgcaacctgatgtgcctgccggagaactaccagatgaagtactacctctaccacatgctgtcgtggccgcagctgctgttcgtggcggaggattacggcggccggatcgtcggctacgtgctcgcgaagatggaggaggacccctcggagccttgccacggccacatcacctccctcgccgtgctccgctcccaccgcaagctcggcctcgccaccaagctcatgtccgccgcgcaggctgccatggaccaggtgttcggcgccgagtacgtctccctccacgtccgccgctccaaccgcgcggccttcaacctctacacctccacgctcgggtaccagatccacgacgtcgaggccaagtactacgccgacggcgaggacgcctacgacatgcgcaagccgctgcggcagccgcagcccaagaagcaccaccatcaccaccaccatcatcacggccccggtggttgttgctcacacgatgctcctcccgcggcatctgggtcttctccgccgtcctctaattcgccagagaagaccgattcatgatggaaggaaatggagaggctgaaggagttggtgagcccgttggacttgcatctggtgcactcactcttttgataagaagtccagcgaaatcatttcctaaggaaacaaaagatatgtactgtgattatgtgtgtttgtaggcatctttgttggccgatgattcacccatgggccagggtccactgtaattctgtttgatggacgtacaaatacttttgttagctacttggcatttgctgtcgtgcctgtaatatctccccatacttgcggaattttttttggcacatctgggcatatgtacttggctacattctgtagcacgcataaagtcatttttggtgt

SEQ ID NO: 2241 - DNA, 1027 bp, Oryza sativa
  ref <308>: DATABASE ACCESSION NUMBER: AK104244
  ref <309>: DATABASE ENTRY DATE: 2002-08-28
ctctccccagatccgaagcgagaagcctcttttggatctatccattcgggtcaccgtggcagttcggtaattttggcggagaggaggaggaggacgacgacgacgacgacgtgatgggtctcctcgacaagctgtgggacgacaccgtcgcggggccccgccccgacaccggcctcggccgcctccgcaagcacgccgccgcccgccccgccgccgtcaagatcaacgacccgacaggggacgcggcgatggtggccgtcccgccgacgacgccggccggggcggaggaggcgccggtgaaggtgacgcgcagcatcatgatcaagcgccccgcggggtacccggcgtcgccgaggagcgcggccagcacgccgccggcctcccccgccggatccacccctcccatctcgccgttcgccggcgccggtggtcgcttcagaaggaaatcatcgtccgacgcatatgagagggcaacacctgggacaaccagtcaccctcctccctttgaagtgtgagcccccagcgtgctcacgctcgtttttgctcctaggccagcgtctactgcacacacaaggcagaggaggaggagagacatatcagagaccgaagcggatggaagtcgagtgttgtctacctatcttacctctactactgtgatataacgtagatgctactagtaattaagtacgcctgctgctgctcgccgtctactatgttgagtcgtgtatggtttgtgtagtaaggttgtcgtctgctgtgtcatatatgtacatatgtttgctctgggctgcgatggagcttgctgcagtctgcagccaagcccgcagttcatcgctgcgtcgtgttttcgcgtccttttaagccctctgcaactatgtcaaatggatgggcatgtggaggatggtggaatgagctttcaggctgtgatgctaaagatggaagcactgatggctggtgtgtgattttgcttgatgtattatctgaattctcaagtagtagatgctttgcttgaaccttgtatatttgc

SEQ ID NO: 2242 - DNA, 1075 bp, Oryza sativa
  ref <308>: DATABASE ACCESSION NUMBER: AK060111
  ref <309>: DATABASE ENTRY DATE: 2001-12-06
agaatcttctccctgctgaaccttccccttccatggcctcgctgctgccgcctactcatctcctcactcctcccccgctctgctgctgctcgtacgctctacttttcccgagagccaggagggcgcctccaagattctcgaatggggccttctccgcggcggaatcgctggtccggggtgagttcttggggaaagtcgggaccttggctcggagaatggagggaaggcggcgccttgccgtggctagtgccgggagaggcccactttttggcggcggcggcggcggtggcgggcagcggggctccggccgggtggtggggaaccttgccttcgccgccctcttgacgttcctcgccaccatcggccagctccggtgggttctggacgccatcgtctccctctggcttctcacaatactgctgcctattttgggtctcgctgcatttttcttctttgcaggccaagacatacttcagagcaattgccccaactgcggaaaaagcttccagatactgaagtcatctttgaaggatggtccacaactgtgtccatattgtactcaacctttctcggtgcagggaaacaaatttgttagagaatctgctagattttcatctggaaggaccaccacaggtgctcaagccttcagtgagtccttcaaacgtggttcggaggggaagaagacaccttctggaactgttgtagacatcgaagctgaagtgaaggatgccgagtgattcttctgcaggaatgtgctaagaatctctgcctcgttgacatcagttttgcagctcttcatggccaatttttcagagggctattaaatctggtagcagtgtcatggttgtaccaaccgttcgctagatttgttgatatgctaggtccaggatatcaagacgaactgacacttgattccataagtgacgacatgtagcgccttcttctcgttgcaacttgtaaattgcaattacctctgcttgtgtaaaagtaacaacagaaaaggtagatgtgaatatttacttcttttttttttgcttttgtatgtggatgagcaatcaaagatcagttgaagaac

SEQ ID NO: 2243 - DNA, 1039 bp, Oryza sativa
  ref <308>: DATABASE ACCESSION NUMBER: AK104245
  ref <309>: DATABASE ENTRY DATE: 2002-08-28
gtgcgaaaaaaagaaagaagagttcgactgttcgagcgaggagggagaagaagagggggagagagagagccagcagctagccatggcggagcacaaggaggaggagtcgttggtggagtcggtgatggacaagatctccgacaagctccacggccgcgggggctcgtcgtcgtcgtcgtcggactccgacggggagaggacggccgacttgaaggccaagatctaccgcctcttcggccgcgagaagcccgtccactccgtcctcggcggcggcaagcctgctgatctctttctatggaggaacaagaaaatctccgttggggtactcgctggcgccacggccatctggctgctgtttgaagtcatggattatcatctcctcaccctgttgtgccactgtatcatcctcaccctggccatgctcttcctctggtccaatgcctcaactttcatcaacaagtcccctcctaacattcctgaagtgaagatcccagaggacctggctgttaatgttgctcgctcactgagatttgagatcaataggggctttgctaccttgagggagattggtcaagggcatgacctgaagaaatttctgattgttgtcgtgggtctctgggttctctctgttcttgggagctgctgcaatttcctgaccttgttctacatagtctttatggtactgtacaccgtgcctgttctgtatgagaagtatgaggaccaaatcgatgcttttggagagaaggccatgatcgaactgaagaagtactatgctattttcgatgagaaatgcctctctaagatccccaagggtccgttgaaaaacaagaagcattagaaattgtaggatgagccgtagaaggtactatgctaatttatcatccagcctgatcactaattgtcggttttaaaggatggctacgattccatgcctttactgatagtaaatacctacattttggtgtggctagtagttgcgatgtgctgaacttcaatgaattcgaattatgccagcatgctctatctatatcctgttttc

SEQ ID NO: 2244 - DNA, 1046 bp, Oryza sativa
  ref <308>: DATABASE ACCESSION NUMBER: AK060112
  ref <309>: DATABASE ENTRY DATE: 2001-12-06
cacgatgcgctgcctcctcctcctcgtcctcgcgctcctcgcggcggcggcggcggatgccgagcccgttctccgcacggtgacgggcgtccccacgggagtgtcctccggcggcggcggcgggggtggagaatcttccgacgagctgtactgcgacggatggaggctgtcggtggagacggggaacgcggggccgtggaccgccatccccccgcggtgcctggagttcgtgcgcgcctacatggaaggggagcgctacgcctccgactccgccgtcgccgccgcggactccctcgccttcgccgcgcgggcgctggcgtcgggcggcgggggggccaggccggcgtgggtgttcgacgtcgacgagacgctgctcaccaacgcgccctactacgccgtcaacggctggggatcactagagttcaacgagacctcatttgatgaatgggtggatgtagcaaaggcacctgcattaccagccagcttgaaactgtacaatgagcttcagggtcttgggatccacatcatcctcttgaccggtcgaagtgaattccaacgtaacgccacacaagtgaatcttttatttgcaggctaccattcatgggaaaaactcatcctgaggcaatcccctgatattggcaagacagccgtgcagtacaagtcagaaagacgagcagcactggaagctgagggattcaagatacttggaaattctggggatcagtggagtgatttattgggattgccaatggctacgagatccttcaaacttccaaacccaatgtatttcatcagttgaatttattagtgaaaagtggagaaaatctgtcatgtcgcttggaacctcctttactctttcttttaagttcgtaatgaattcaagaatcattctttggacataattgccgaggatttatctctagacatgttgaacccctagtggggtttgggaccatgcccaatgatggctttgtaatgtatcctttgcccaaagtcaaaataattatgtattagacaaaataatatatcttatgaatattgcatct

SEQ ID NO: 2245 - DNA, 1176 bp, Oryza sativa
  ref <308>: DATABASE ACCESSION NUMBER: AK060113
  ref <309>: DATABASE ENTRY DATE: 2001-12-06
aaataaggcggatatggctaagatgggtttcgctcccatgctttcagtggccgtgctccttggaaccttggcagcatttcctgcagcggtacactccatcggcgtgtgttacggcgtggtcgccaacaacctgcccgggccgagcgaagtcgtgcagctgtacagatccaaggggatcgattcgatgcgcatctacttcgcggacgccgccgccctcaatgcactcagcggctcgaacatcggtctcatcatggacgtcggcaacggcaacctctcgagcttagcttccagcccctccgccgcagccggttgggtcagggacaacatccaggcctacccgggcgtctccttccgctacatcgccgtcggcaacgaggttcaaggcagcgacaccgcgaacatccttccggccatgcggaacgtcaacagcgcgctggtggcggccggcctcggcaacatcaaggtatccacgtcggtcaggttcgacgcgttcgccgacaccttcccgccctccagcggcaggttcagggacgactacatgaccccgatcgcgaggttcttggccaccaccggcgcgccgctgttggcgaacgtgtacccctacttcgcctacaaagacgaccaggaaagcgggcagaaaaacatcatgctcaactacgccaccttccagccgggcacgacggtggtggacaacgggaacaggctgacctacacgtgcctcttcgacgcgatggtcgactccatctacgccgcgctggagaaggccggcacaccgagcgtcagcgtcgtcgtgtccgagagcgggtggccgtccgccggagggaaggttggggccagcgtgaacaacgcgcagacatacaaccaggggctgatcaaccatgtccgaggcggcacgcccaagaagcgcagggcgttggagacttacatatttgctatgttcgacgagaacggcaagcctggggatgagatcgagaagcactttgggctgttcaaccccaataagtcgccatcgtacagcattagtttctaaggggatcgtacagactgatatatatttttatatggaataagttgctcccgtgataggccaaacgcaagcatgggaagcaagcatagtgccgtgtggtgtccatgcatctttcccaatttgtgaaatatatactcccagtgaatttt

SEQ ID NO: 2246 - DNA, 1009 bp, Oryza sativa
  ref <308>: DATABASE ACCESSION NUMBER: AK060114
  ref <309>: DATABASE ENTRY DATE: 2001-12-06
ctcgcgccgcggagaggattccatcctcctccctctccccgccgccgccgtcaatcccgaatcccgagggctcgggtggtcgtcgtcggtccgggatggcggggaggaagcggaaggcggaggcggcgcgggcggcggaggaggaggccgaccgggcgctctacggcgccttccgcggcgccgccaactcgctctcgcagctctacgcgctcgccggtgcccaccagcgcctctccttccacgccggtgagcgccacgccttggaaaaactctaccagtggatggtgcgacagcatgaaattggcttgaggctcacagtatctgacatagcatcccacatccagcacgagattgagtatggaggtgacaatgcattaacttcaccgagatcgcaacacgcattccagaatctccaagctccaatgcacatccccaacacaagcacgcagcagccgccatcttgttcaatcacaccatcaaacccttccaaggactctatgatattttcgaaagcgctatccagccctgtccggcaaaacctgcaactgtaccatgtacagcaatgcggtgacacaggatgctttgcagatggcattttttgccctggaaacggtgactcggatcctgcagcatcaaatgattcgtcggtggatatgcattcagatagcccaggtcatgactcatgagccctgattcctgaatgagcaattaccattttccagtttgattccatgaactgcaatcaacaaacttgaagtaaagaagtggaattgccctcacgcaatctgggatctcaatttaatccctcacccaagttaacttgtaatttgtaactagctattgcccagttacctcagatataacgtgcacatatatatcatccatgtatgtactttcagattatataatagctgacgtatcagttttttatggtactaaacagtgaacactgatcagtaatttcagattgcaaaactttaagctagcttatatagctgtttcttcggtt

SEQ ID NO: 2247 - DNA, 1081 bp, Oryza sativa
  ref <308>: DATABASE ACCESSION NUMBER: AK104246
  ref <309>: DATABASE ENTRY DATE: 2002-08-28
acagcctcctcgatctcctctacagcagctcactcactgctcaacaatggcgacggcgaggttgatcctcctgctcacggtggcggcggcggcggcgggctcctgctgcttctgcagcgcccaggaggtgatcgtgggcggcgtcggcgagcagctggcgacggcgccgccggccgcgcccgctccctcgccgccgccgccgtactgcggcagcgtgaggacggcggtggaggcgcacaacatcatcggctggaagacggtgccggcggactgcgccgagtacgtctccgactacttgaccggcgagcgatacggccgcgactccgacgtggtgatcaacgaggccatcgcctacgccgagagcctcaagctctccggccatggcaaggagatctgggtgttcgacgtcgatgagaccgccctctccaccctgccctaccaggccaagcatggctatggaactaagccatacgaccacgcgagcttcgtccaatacgtggctggagggagcgcaccggcgctacagggaacactgcgactctaccgacggttgctgcagctcggcatcaagccggtgttcctgaccgaccgcaccgaggaccagagggccgtcaccacccacaacctcctctcgcaaggctactacagctgggagaagctattactccagcctgttgggctccagaccacgactcaggcgttcaagaccggcgagcggcagaaattggtgagcgccggctatgtcatcgtcggtaacatcggtgaccaatggagcgatatcctcggatcaccggagggctaccgcaccttcaaataccccaaccccatatactacgtcgcgtagtttggtgtcggcgccatcgctagctagcttagctatagctagctatatcgatggatcatagttcgcgtgcgtttcatctacttattttcttctcatgaactgtcgtttgtagttaatgtttgacgcgtttgctttgatttttcctcgttagttgttgatgagatgaaatttaaatttgtaataatgtttgtttggcatggcagttggccattcattgatcaatgcattgtgttgagc

SEQ ID NO: 2248 - DNA, 1008 bp, Oryza sativa
  ref <308>: DATABASE ACCESSION NUMBER: AK060115
  ref <309>: DATABASE ENTRY DATE: 2001-12-06
gagcaatataatctctctctcacagctgcacaagtggtagctagcttactctaattaaccttggttgtaatccatggcgagctgcagcaagtggctggccgggctgatgctgctggcggcggcgctggcgtgctcgctgccggcggcgagccgggcgcagctgcaggtggggttctacaacacgagctgccccaccgccgaggctgggccccctgatgcacgtccggctggggtcgacgcactgcgttgtggcgagctcggcggaggtggcggcggagctgatccgcagccttcgccgcccgcgacagcgtcaacctcaccggcaactccttctaccaggtccccgccggccgccgcgacggcaacgtctccatcgacaccgacgccttcacgctccccgggccaaacctcacggcgacgcagctcgtcgacggcttcaagctcaggaacctgaccgccgatcgcgcacaggcagtcgacggaggagatccagatccgagggttcaggggacctgccgagactgccgtatctgcaggcggcgtacaaggagacgctgcggttgaggccggcggcgagggcgtggagccgcgcgggcagcacttccagttcatgccgttcgggagcggccggcgcgggtgccccgggatggggcttgcgctgcagtcggtgccggcggtggtggcggcgctgctgcagtgcttcgattggcagtgcatggacaataagttgatagacatggaggaggcagacggcctggtttgcgctcggaagcatcgcctcctcctccacgcccacccgcgcctccaccctttcccgccgctcctctagctacccctacctacctaccactcctactcctttcctgtccctgtaacgcaccgtaatacaaccattataaattaattaccactttactatattgtaataattaatgtgtatgtattccctacctagacctattgcatgtctctcaaatcaaatattccaagcaagcttgattgtgatac

SEQ ID NO: 2249 - DNA, 1111 bp, Oryza sativa
  ref <308>: DATABASE ACCESSION NUMBER: AK060116
  ref <309>: DATABASE ENTRY DATE: 2001-12-06
ctcaccaaagttgttgagttggtgtcctgttcttggacggacaagggtgtttatccaaaagaaatccatcccgagatttgcttctcttgcgcgcacactggcaccgtccggatcgctgaatcttgctggtggtggtggtggtggtggtggtggtggtgcacggccatgtcgacggcggtggcggacgtgccaccggcggcggcctacgggttccccggatcggccaagagagggaagcctgaggaggtggtggtgctgatggggaagaggaggaacgaagggttcttcatcgaggaggaggaggaggaggaggaggtgctgacggagagctcgtcgatcggcgcgccgtcgccggcgagctcgtcgatcggggagaactccggcgaggaggagggaggggacgacgaggaggaggtggagagcaagctcaaggcggaggatgagcaggtcggcctcggctgcttggacgccttggaggaatccttacccatcaagagggggctctccaacttctacgccggcaagtccaagtcgttcaccagcctcgccgaggcgacggcgtcgccggcggcggcggccaacgagctggccaagccggagaaccccttcaacaagcgccgccgcatcctcgccacctggtcgcggcgagcctcctgcagctccctcgccaccgccacctacctcccacctctcctcgcgcccgaccacgccgtcgccgagggcgacgagggtgaggaggaagacgacgattcagacgacgatgagcggcagcaccgtggcaagaacggcggccggcgagagtcggcggcgccgccattgccattgccgccgccgaggctcaccttgcacacccagatgggaggaatggtgaggaggaatggaacattcaggtcgccgaggtcgctctcactgtctgatcttcagaacagtggcggttcatgttagtttgctgctattagtacaaaaaaaataataatttttacagttagagcaaaaagccattgatctccttttggctggtagagttgttactgctacaactgcttactattagtaactatataattataattataattgcaatgcataaggtccaagtttgttgtgatct

SEQ ID NO: 2250 - DNA, 1097 bp, Oryza sativa
  ref <308>: DATABASE ACCESSION NUMBER: AK060117
  ref <309>: DATABASE ENTRY DATE: 2001-12-06
tgaggatattgagcaggaggctcttgctactcttgttgtcaacaagcttagagggtcattgaaaattgccgctatcaaagcccctggttttggtgagcgcaagacccagtacttggatgatattgccattctaactggagcaactgtaatcagggatgaagttgggctgtcacttgacaaggcagacaaatcagttttaggaacggctgcaaaggtggtccttaacaaagagtcaacaacaattgttggtgatggcagtacacaggaagaagtgactaagagggttgcacaaataaaaaatctcatcgaggctgccgaacaagaatacgagaaggaaaagctcaatgagaggattgcaaagcttgctggtggtgttgcagtcattcaggtgggagcacaaacagagaccgaactaaaagagaagaagttgagagttgaggatgccctaaatgctaccaaggctgctgttgaggaaggtattgttgttggtggagggtgcactcttctgagactggcagctagagttgacgccatcaaggacaacctggagaatgatgagcagaaggttggagctgaaattgtaaggagagcgctgagctacccgcttaaattgattgctaagaatgctggtgttaatggaagcgttgttaccgagaaggttctctctaacgataacttcaagtttggttacaatgctgcaactggacagtacgaggatttgatggctgctggtatcattgaccccactaaggtggtgagatgttgtcttgagcatgctgcgtcggtggccaagacattcctcacatcggatgtcgtcgtcgtcgagatcaaggagcctgagcctgcgcccgtcaccaacccgatggacaactccggctacgggtactgatgactaagttacagttacttgttctccgggaaggtcactggccgtcaatttttgggtagtaggcttgaatctgaattttggtgagatttgagtagtttcgagacaatttgatttgttcccatgggaagtgaaataaacagggtcactatagcaaaatttgtggtgtaactggaacggctgtcaaattacgaaggaagatatttgaaag

SEQ ID NO: 2251 - DNA, 1064 bp, Oryza sativa
  ref <308>: DATABASE ACCESSION NUMBER: AK060118
  ref <309>: DATABASE ENTRY DATE: 2001-12-06
ataccaaacttgcacaaactcctttaaaaccacgccacccgccgccgacgacgagaccctttccctccgtttccacacacctctctctctctcttcttcttctccgatggcctcctccgcgcgcgacctctccggcgacccaccggagtccacccggctgcggatcggcgacgacatcgcctggtcggacgtgggcggcgtctacgaccgcgacgactcgctcaaggagaacaccaaccccaagtgcatcctcaagaaccacctccccggcgcccacaacggcgggtcgcagaggttctccggcaacctcaagcccacggcggcgcccatcatcgggatatcggggaagctcgggcagggcggcaagaaccgccaccacccgccggcgatgttccccaagaaggtggccgtcacgggaggcggcggccgcaaccccaaggcggccgtccccgagcacgagccgacgtcgcccaaggtctcctgcatcggcaaggtcctctccgaccgtgagcgcgcgcgccggggtcgccggccggcggggcggatggtccccgccggtggctgctgccccgggctcggcggtctgttccgccggagtcactcgcggaagaagaacgccgtggagtgcgtcgaccagtccccgcctccgctgcctccatgggcgtcgaggcggggagagccgaaggaggtcaaggaggcgacgccggcggcggcggcggcgatggcgccggggttgggagggatgatgcggttcgcgtcggggaggcgggcggcggattgggcgaccgagatggagccggatggacgcgtggcgagatctgggccgttgtagtagaggactatttgggtttggtacgagtctctgttgctgttagttggtgccagtgctttcggtgtagttgagatgtgtacatactgcagttaggacacatttttttgggctccttctccatttaatttttgtttaatttttttggcttgtttttgtctgttgagatttgaatagtttgttgggttggagtgttgtatgaaaactatcagaagatttcgtatttggattgatt

SEQ ID NO: 2252 - DNA, 1214 bp, Oryza sativa
  ref <308>: DATABASE ACCESSION NUMBER: AK060119
  ref <309>: DATABASE ENTRY DATE: 2001-12-06
caaaaaacaaggagaggacctggcgttctctgaggagggcagcttgcccgcggtgaccatggagcagaaagatgaagccgagatggaggaggtggacgaggaggaggaggaggaggtcgacgaagacatggccggcgggcacgcggcgcagtcgccgtcgccgtcgtgcgggctgggcgagaagaagcggcggctggcgctggagcaggtgcgcgctctggagcggagcttcgacacggacaacaagctggacccggaccgcaaggcccgcatcgcgcgcgacctcggcctgcagccgcgccaggtcgccgtctggttccagaaccgccgcgcccggtggaagacgaagcagctcgagcgcgacttcgccgccctccgcgcccgccacgacgccctccgcgccgactgcgacgccctgcgccgcgacaaggacgccctcgccgccgagattcgggagctgagggagaagctgcccaccaagccggcggacacggcggcatcggtgaaggtagaagccggcaatgacgcggcggccggcgccgcggccgccacggtgtgcaaggacggctcgtcggacgacagcgactccagcgtggtgttcaacgacgaggcgtcgccgtactccggcgcggccttcattggattcggcccgtcgttcttggtcgacgacgcgtcggcggcaaccgtgggctgctcgtcgtcgctccccgcgctcgagtccaaatggcacggtccgtactccgacgactcgtgcaaaggcggcgtctatggcttcacggaggaatggctcgctgcctgctccggcgagatggccggcaacgacgccgccggcttcttctccgacgagcacgcctccaacctcaacttcggttggtgcgcgagtggtaacgagggttgggaatgagattttgatctccacggttagtgtaaaaaatggcagggttagtagcactgtgcataaccgcattggcgcattgcatgcttggatggagcacgtacttttagtttttttactgtactcatttactaccgcctttggctacctggcgtgcttactgctagtactgtagcaaagtagcaagaagtggaacgagcctagaggacgaaattgatatagggtaattaacgaaggatcaaggatgtaaattttaagccgccaaggggtcgaagaaggatagcacaggacagcaaagcatagctgtctgcgttttact

SEQ ID NO: 2253 - DNA, 1356 bp, Oryza sativa
  ref <308>: DATABASE ACCESSION NUMBER: AK060120
  ref <309>: DATABASE ENTRY DATE: 2001-12-06
gacaccaattcaacgacctctcgcgactgatcgatcgatcgatcgatcattcgatcgccatgaggctctcggtctccgtcgccgcggtgctcgtcgttcttgcggcgctccggccgccgcgggtggcggtggcgcagaagtacgcggccatcttcaacttcggggactcgctggtggacgccggcaacctcgtcgtggatggcatcccggactacctcgccacggcgcggctgccgtacgggatgacgtacttcgggtaccccaccgggcgttgctccgacggccgcctcgtcgtcgacttcatcgcgcaggaggtggggttgccgctgctgccgccgtcgaaggcgaagaacgcgacgttccaccgcggcgccaacttcgccatcaccggcgcgacgtcgctggacacgccgtacttccaggggcgcgggctggggcacacggtgtggaactccggctctctgcacacccagatcaagtggttccaggacatgaaggcctccatctgcaagtcccctcaagagtgcagggacctgttccggcgatctctgttcatcgtggagctggtggtgcccggggtgctgccgatcgggtgcttcccggtgtacctctccatcttccggaagcagccggagatgtacggtcgccggagcggctgcatcagggacctcaacacgctgtcctgggtgcacaacgctgcgctgcagcggaagatcgccgagctccggctcaagcaccccggcgtccgcatcatgtacgccgactactacaccccggcgatccagttcgtcctccacgccgagaaatacgggtttttgaggcagacgccgcgggcgtgctgcggggctccgggggtcggggagtacaacttcaacctgacgtccaagtgcggggacccggggtcgtacgcgtgcgacgacccgtcgaaccactggagctgggacggcatccacctcaccgaggcgtcctacggccacatcgccaagggctggctctacggcccgttcgccgaccctcccatcctcgagacatcgccaccactgatcgatcgaaaacacgatcggtttgtgatccactcgttcgtttgcatatatgacaagcagacacacaccacatacacacacaccttcatatgcactggagatgtgaaggatagcgaaaggggccggacaggcagaagaacagagaatgtgatggttaatttgttcagattaattagatggttggttggggatgtgttgtagtttcattcatgtaagaagcgttttggtttgtgtatttcgtttgttggtccttggtagagaaagagagagtagatgtaattcctatttcttgagaaattaaaattgctctcat

SEQ ID NO: 2254 - DNA, 1233 bp, Oryza sativa
  ref <308>: DATABASE ACCESSION NUMBER: AK104247
  ref <309>: DATABASE ENTRY DATE: 2002-08-28
gcaagccaatccaatccggttgcttctcctccaatccaacctcgtcggcggcggcggcgacccgcgccgcgcaggctgttgagttatcacgtatttgattatggatctgccattgatggctgctaaagcctataagtacaaagcagaactacttgttaaggactacctgctagcagattcgtatgttccatacgcttctgtgcttggcggaattctgatgtgcaagttgtcatatgatttcacacgctttatcagttcattctacttcaaaggctatggttctctcacaaagatgcaaaaggttgaatggaataacaggggcatgtccaccgtccatgcaatattcattacacttatgtcagcatacttagtcttcttctcgggtttattctctgaccagcaggatggaccagtaacatttagaagttcgagcctctccaatttcacgctaggggtctcagttgggtatttcattgcggaccttgccatgatactatggttttacccttcactcggtggaatggagtatcttgtccaccatgtattgtcacttactgctgtaacgtatactatgctttctggggaaggacagttatacacatacatgagtctcatctcagagactactacacctggaatcaacctaagatggttccttgatgttgctggaatgaaaagatccaaaagatacgttgttaatggagttgcaatgtttcttacttggctggttgcaaggataattttgttcatgtacttgttttatcagatctttttacattatgatcagattaagcagatggagacctttggttatcttctggtttgtgttgtgcctgccatactgttcgtgatgaatatgatatggttttccaagatcttaaggggcctcaagaagacactggccaagaggcattgagtggggcaaggggtatgcatgtacagccacgacaaaccacctatctgtaaattcactcagcaggccagcagcctatagcttctcattagtcacgatggctaatcctggtaatatcagcttggccattaagatccagatttatgattgaatgcccagctttttatgcatggatgatatattaatttgtatatatgttccgctatggctgtatgttcttaatacccatcttctttttctcggtataaatgattatatcttagttttaacttaaacaactatttgccccaatttcagtcacattgtcaacacattgctgt

SEQ ID NO: 2255 - DNA, 1003 bp, Oryza sativa
  ref <308>: DATABASE ACCESSION NUMBER: AK060121
  ref <309>: DATABASE ENTRY DATE: 2001-12-06
acaccacctgcactgctgccatcctctcaccaccgccatggctgccacactctcctctgctcctgccccctccaagcactgctccattgtcagagcccagcactcccctcccccttccatcctctcatcatcaactaagacggccttccatgggctgtcactggtggacaggcggtgggcggcctctgtcggcggcggcagcgggcggcggcggagggtgcttcaggtgaacgcgaggacggccggcgcggcgaagaacatcgaggtggaggtcgacaagccgctcggcctcaccctcggccagaagaccggcggcggcgtcgtcatcaccgctgtggattctggagggaacgcggcaagagcaggcctgaaatcaggtgaccaggtgctctacacaagtagcttctttggagatgaactatggcctgcagataagctggggttcaccaagacagccatccaggcaaagccagactctgtctactttgtggttagcaggggtgcacaagttgatgtgaagcgacttccgaaaaggccggcgcctccgagatttggccggaaattgacggaatcacaaaaggctagagcaacacacatttgccttgattgtggatacatatacttccttcccaagcctttcgaagaacagcctgatgaatatggctgcccacaatgcaacgcaccaaagaagcggttcgcgaaatatgatgcagaaaccgggagggcgattggtggtgcgctaccacctattacagtgatcgtcagtttgataatcggcattgccggagtaggggctttgcttgtatatggccttcaataggctgccaatatcttcacaggtttttgactgtgtaacaagaagctcagcagattgctggtgcactctcttatctagcaagaaattctgagtgatatatatcaagggggaaaggaaaaacatgagttggaggctaatggctaaatgaaaaatcaaatcttcttatatgaatggagattaattttc

SEQ ID NO: 2256 - DNA, 1010 bp, Oryza sativa
  ref <308>: DATABASE ACCESSION NUMBER: AK104248
  ref <309>: DATABASE ENTRY DATE: 2002-08-28
ctctccctctcctcctcggcgcggctcggcggcgctcccctcgcctgcgcggccgcgcagcggtagggcggaggcgccggcggtggctcagccgacggacaccgtgggttggccctctacgacgccatcagcccggctcaccagcctccgctgacctctaccgctccacagaccacagcaaggcagcaagagtgattggcacttttcaatggcatgtgcttcaaagacaatctctattggttttgccaacagtggtctatatggagaggcaaggctactgtcgccaagctacaaaaactacccaaggagatcctcttacaaatttatcaaagttcgtgcagtacagggaaatgatggtcgtcgaaggctagttgatataatccgaaccatccctgaactctctagaaactatttcagaagccggtcaaggagagctctttttggtggtatctcacttctgggaggcttttatgtggcgcagacaatatctctgtctttcggagcgttgggtgtgaacgatgtcatagcagcagttgtgtgtgtcctgcttactgaatacgtaactaagttctactacagccggcctaaggttaccttcccatttgctctcctcaacaacttcaagatgggtttcacatatggcctgtttattgatgccttcaagcttgctagctgacctgcaattcttcctattggtgctttgacatgttatgttcttgaatcttgaaaaacagcaaagatggtgaaaaaatagcatgcccccacgatgttattactgagacgagggatctatagttctgtggctttcctcagctttgttctcctatgtgaaggcaggcttgttgctggtatagtttttgagttggtggatagattttcaaagattggtccacatgtgggtatactgtagtgtgatgataacaactatttattttgagattcagattacatatgattgaagcccggtgtgtacatatgcaaatttcaagctatctgatcttgatcatctc

SEQ ID NO: 2257 - DNA, 1187 bp, Oryza sativa
  ref <308>: DATABASE ACCESSION NUMBER: AK060122
  ref <309>: DATABASE ENTRY DATE: 2001-12-06
ctctctttctgttaattgagtaaattggtgttgctgcttcttcctcctccgatcaatcgatcatctcccatcggcggtggcagcagacccgatctttctgttaattcagaagatggaggggtacgacgagcgtgagttctggcagttcagcgaccagctccgcctccacaacttctccagcctctccatcgccgactccatctggtcctccccctcgcctgccgccgtcgatcatagcagcaacaagctcgccctcgccaacaacagcaacaacaacgccaccgccaagacctacttcaacaagtccgtcggcaggccggccaacaacaacttcaacttcaactacaacagcaacagcgtcgtcgtagatgcgttcaacgggaagaagaaggccgctgtcgacgctcctgctggaggaggaggaggaggcaggaacaacaacaagaagaacagcagcagcaacgacaacaagatgagcagcaggttgaagaagagccagctgccggcgtcggagtcggtgccaaaggaggaggcgatcgggggatacatattcgtgtgcaacaacgagacgatggaggagaatctcaagaggcagctgttcggcctgccatccaggtacagggactcggtgagggccatcaggcccggcctcccgctcttcctctacaactactccacccaccagcttcacggcatcttcgaggccaccagcttcggcggatccaacatcgatcccggcgcttgggaggacagcaagtgccccggcggcgagtccaggttcccagcgcaggttcgggtggccacgcgcaagatctgtgagccgctggaggaggacgccttcaggcccgtgctgcaccactacgacggccccaagttccgcctcgagctcaccgtcgccgaggccctatcccttcttgacatcttcgccgagaagctcttcgcctgaccatccatcttacctcttccatctcaattatactactgtaacacaccatccatccatcgcccttgttaaatttatagtactagtaactggagtactacttacaacttacttactgctatatggagtagctaatagaggacggaacagaagcttattgctgtttcttacgcatagtacgctcctatggctgtaagaacaagttacataatataggcgaggaaaaataatatggcttttgttc

SEQ ID NO: 2258 - DNA, 1283 bp, Oryza sativa
  ref <308>: DATABASE ACCESSION NUMBER: AK104249
  ref <309>: DATABASE ENTRY DATE: 2002-08-28
attccattccactcgccaacccgacacgtctctcatcttcacgcaacgaacagcagcagcagctcaagctaagctaagctaaagtactacgtgttctttcgtcttcgtcggcgccggagtttgattcgtcggagctagctagcaagaggaagaagaaaatgttggccatattccagaagcaggtggcgcacgcgccggcggagctgaacagcccgcggagcagcgcggcgaagcccaagaaccccgacgagatcctcagggacttccacgccctccaccccatcgaggccttctccacctccttcggcggcggcgccgccctcgcctgcgtcgccggccacgcccgcaatggcctctctggctacgagaggatgttctgtgggctggatgacatctactgcgtgttcatggggaggctggacaacctgagcagcctgatccggcagtacgggctgtgcagccgctccaccaacgaggcgctgctcgtcatcgaggcctaccgcaccctccgcgaccgcggcccctaccccgccgaccaggtcgtcaaggatctctccggctccttcgccttcgtcgtcttcgacaacaagtccggcgccgtcttcgccgccctgagtacggatggggaggtgccgttgtattgggggatcgcggcggatgggtcggtggtgatctgcgacgagagggagatcgtgaagggagggtgcggcaagtcgtacgcgccgttcccggtggggtgcatgttccacagcgagggggggctcaagagcttcgagcacccgatgaaccggctgaaggcgatgccgcgggtggacagcgagggcgtcatgtgcggcgccaccttcaaggtcgacaccttcaccaagatcaactccatgccccgcgtcggcagcgccaccaactgggccgccacctgggacgacgctgccgcctgatgatggcgctccgtacgccgtcgtctcgtcgccgtgcgcctgccctcgccgccggcctcctcgccgtttgccgccgccgctcatctcttcctcctcttcttcctcctctctatatccgatgtgcttctccgtccgaagcatgcagattattagagcgatatttgcagctagcgtggaagcgcgccaatctatttttctgcggtgtttttacttaattttcacctcttctttttaaatttttatgtccatctttgggctctcgcctctcggcaatgtatattctcggtcgcgggtggcatgtcatggtacatactatgaatgatgaataagaaagagtttgcttcactc

SEQ ID NO: 2259 - DNA, 975 bp, Oryza sativa
  ref <308>: DATABASE ACCESSION NUMBER: AK060123
  ref <309>: DATABASE ENTRY DATE: 2001-12-06
gctctcgatctcgatctgagcgaggcggcgacgaggacgacagaacgaagatgagttcgtacatggaggcggcggcggcggcgagggcggcggaggcgaagacggaggggcttctccggggcgcgtgcgcgctgctggcggcggcggcggcgctgctggtggggctcaacacgcagacggagacggtgctgttcatcaggaagaaggccaccgtcaaggacgtccaggccctctgggtgttggcgatggcggcggcggcggcggccggctaccacctgctgcagctgctaagatgcttctacctcagccgcttcgccgacggcaagccctgccggcatcgcagggccatagcctggctttgcttcctcctcgacaagggttgtgcatacataacattcgcgacgacggtggcagcggctcaggcatgcgtggtggcactatatggcacgcacgcgttgcagtggactaagctttgcaacatctacacccgcttctgcgagcaggttgctggtagccttgtgtgtgccatgctcgctgccgtcggtactgccctcctctccgtcgtctccgcccgcaacctcttccgcctctatccctccatgctttcacctccgccgtcttccttcgtgggatagacattgtccaccgcccctctccctaggccttcgtttgtactcttatattgggctgcatagaaaaattaagcccaactatagacccaagtaaagcatacctaccttttatttttcttaacttttgttagagtgcatttaggagtaatacttatccacatgtagtatatactccacagaaggtatatgttcttgtacctctctctcaaaaaagtgtatccataggtaatgtgctttgcttcctctctctctcataagaacaatagtagagaagatggttgtaaggtaattaaggaccaacctttgtggcatgtttcagtgcagaagtgataatgttacacac

SEQ ID NO: 2260 - DNA, 1077 bp, Oryza sativa
  ref <308>: DATABASE ACCESSION NUMBER: AK060124
  ref <309>: DATABASE ENTRY DATE: 2001-12-06
aatgcaaatcagtgacaacaactaactaagatgacctcacagcaattaggctactgctgggtcctcctaattgccttgctatcgtgcagcgcagccactgccagcgaggtcccggcgatcatcgtgttcggggactcgacggtcgacgccggcaacaacaactacatcctcaccgtcgccaagggcaatttcccgccttatggtcgcgacttcgacggcggcgtcgccaccggccgcttctccaatggccgccttgtcaccgacttcgtgtcggaggcgctggggctgccgtcctctgtgccggcctatctcgactccacctacaccattgatcagcttgctactggtgtcagctttgcttcaggcggcaccgggctcgatagtctcactgccagagttgtatccgtgataccactgagccagcagctggaatacttcaaggaatacatagaaaagctaaagcaagccaagggcgaagatgtcgcgaacgagatcatcaccgaagcgctctacgtcttcagtatcggcaccaacgatttcatcatcaactactttaatctgcctctccggcgcgcagtctacaccacggcggagtacaccgcttacctcgttggcgaggctgcagccgccgtccgcgacacccacgagctcggtgcccacaagatcatatttgccgggctcgcgccgatcgggtgcttgccatcggcgaggacgctgaaccacgatgcgccgggggagtgcaacgaagagcacagccaggtggcggtggcattcaacaccgcactgacggaggccatcggcaagctcaacgacgagctcaccggattaagggtggtatattcagatacttacagtgttttgtccgccatcctgtccaacccgtcatactacggttagtgctcaatcttgctcgtgttttttatttttcatttttaagacctaaggtccgttgaaaataaatccaatagattatgtgttttataattttatttgaaacaacccgtattagatagtgcgatgtttctattgatatagcatgaaaaaatacaaatctatagtcctgggtgactatagtcc

SEQ ID NO: 2261 - DNA, 979 bp, Oryza sativa
  ref <308>: DATABASE ACCESSION NUMBER: AK104250
  ref <309>: DATABASE ENTRY DATE: 2002-08-28
actgctgagcagtgagcacaaatcacagacacaaatggaagcagcagtggctactccttccttgctcttctctagcccaacccccaggaggccttcctcctgcttgcctcctcctcctccttgcagcagcagcagcagcagctacgcctcccatggtttcaagctgctgcagccgcagttgctgttcatcaatcggctaaccagcagaaacagcaacgggagtagcagaagaagcatttccattttgtcgctgaggtgctcttccagtggcactgacagcgcgtcttcttccgccacttcagaaagatgggttctcgagcctgcaggagacggcgattggcgtcatatcgggtaccgcgtcgcacgacccggcggcttccagatagcatccgaggcggcggtgacggtgggtcgggttcctgaacaggctgacatcgtcctgtctgtcgcaacagtttctgggacgcacgcacggctggagaagaaagaggggagcttgttggtaacagacctggagagcacgaatggcacctacatcaacgagaggcgcctcaccccgggtttccccactcctatcgatcccggcagcctcctcatctttggtgacatccacctggccatgttccgtgtctccaagatgatcgtcgatgtgtccagtgacaccaatgaagctgagcaggaagctgagacggctcaagtatcagcggcaactcaacaaaccaattagcaacctccctcttgccatctactgcttaatgctgaaggcaagcagctcaagaagcaccagctgttacccaatgcctgacatgaagcgcatgttacgaacgacagagtttctttgcaaataagtgcatacagatgttgtgtgataggaatgtcatctcatctgtattatctaaaaataatgaacgtcatctgtagccattaagaaaattcacgaagcaacaactctgcatatcaatagagagcacatattggt

SEQ ID NO: 2262 - DNA, 1332 bp, Oryza sativa
  ref <308>: DATABASE ACCESSION NUMBER: AK060125
  ref <309>: DATABASE ENTRY DATE: 2001-12-06
aagtgcaagtgctcctactacccaactggcaactgctgctgccgctgtacacgcgcggacccaagaacgcgcctcctctcaccgcccgggaggaagaaggaagaatctctcgcgaagcatctccagagtctcccccgctgcctccgtctccggcggctcaccccgtttctgtggagcaatgcagctatatcaccacccgtattcgctggatagtcagaaagtgcggatggcactggaagagaagggtattgactacacctcataccatgtcaatccactgaccgggaagaacatgaacgtggccttctttcgcatgaacccttctgcgaaactccccgtcttccagaacggcgcccatgtcatttatcgggccttcgatataattcagtaccttgacaggctttcggtgcatttaagtggtgaaatcgtccctgtgaacactgaggtttaccaatggatgcagaaagttgatagttggaatccgaagatgttcactctcactcacaccccgatcaagtaccgcacgtttgtctccaagttcatacggcgagtgctgattgctcgcatggctgaagccccagatttagccagcatgtaccatgctaagctccgtgaggcttatgagaccgaagacaaattgaaggatcctgacattatgaagcaaagcgaggaggagctgagcaaactcctcgatgatgttgaagcacagctcaacaatggcaaataccttgctggcgatgaattctcgcctgcggattcggtgttcattcctatcctcgcacgcatcactcttttggaccttgatgaggaatacatcaactgcagacctaggttactcgagtactacacattggtgaagcagaggcccagctacaaggttgcaattggcaagttcttcggtgggtggaagaagtaccgaactctcttcaagacctcgttcttcctttgtgtccgaaccttgttcaggaaatactaggtggttcagcagacagcaatgtgtacagtgaattcaacctgaatatacgaccactacatcttgatgtgttttctgccgaggggttgtggttgatggctcctgatagttttcgttttagtttgtgaaatcaaatgcgtttgtttccttatatgtctctctgcttgcatgctcctgtccacagctcagaacttgtacatcataatgcttacacaatacatatacattttggttttgtttatttagctcatatggaattggaatatctctaatcagggttgtttcttgaaacaattcatgtcttgagtaccttgtattctgttctattttctgctatcaaaaggggtaattttcactgc

SEQ ID NO: 2263 - DNA, 1005 bp, Oryza sativa
  ref <308>: DATABASE ACCESSION NUMBER: AK060126
  ref <309>: DATABASE ENTRY DATE: 2001-12-06
accactatacacttagcttagtgtttacctagctagctagcagctggctgcaacaaacattctgcatgcactttgaattctagagataggagagttaattagatagcttagctaccacaatgcatgcgtgcaacctgatagcttagctacgcgtagttgccaattcaaccggccgacatatatatcggcctgaggaaactagtggaggactccaaagggatcgcattgatctggctagctatctcgatcgatcgcctcatcgatcgacgacgacgtgcatgatcgatcagtgcaatccctttggaattttcctcttgcttccgcctcctcatcttccttgatcgatcgatcctttgcctgctggacgcgcttgcctgccggcttgcttcttccatcgccgccttgatcaatccgcaagctgctccagattcaggagttaaatcgaagcccaacgctagcacacagtgatgtctgctgaaagtgcatatttggcagtgcaagaaggtcttttgacagacagggtaaaacatatagagtcccgagtcccgacaagttcagtttatgacgatggaatcaatcaaaggaatatggttcgcacggctgaatcgctgaaccactctgaaatctgagggcgtgtttgcttgctgccctcagattcgcgcccggctcatgcgtcgatctcaggcgtccgatttcggtcgcctgcggtcggatcgacctgcctgagcaatggtctccaggcgagggcagcaaccaaacagcccctgaatacctggctagctaaggtttctgatctattctggctgatcagtgtccattttctttcgtccataaggccgagtgcagaacaacttgtatatatatatttatgtgttgatctggtaattcaatgtagtagcaaagaggcaattgaggattctgcacacacgcatctactgtagcagaatactgatgtcttttatgtaatcctgtcaaagttactagtaaaattttctttcagagagg

SEQ ID NO: 2264 - DNA, 984 bp, Oryza sativa
  ref <308>: DATABASE ACCESSION NUMBER: AK060127
  ref <309>: DATABASE ENTRY DATE: 2001-12-06
atctcgatctgagcgaggcggcgacgaggacgacagaacgaagatgagttcgtacatggaggcggcggcggcggcgagggcggcggaggcgaagacggaggggcttctccggggcgcgtgcgcgctgctggcggcggcggcggcgctgctggtggggctcaacacgcagacggagacggtgctgttcatcaggaagaaggccaccgtcaaggacgtccaggccctctgggtgttggcgatggcggcggcggcggcggccggctaccacctgctgcagctgctaagatgcttctacctcagccgcttcgccgacggcaagccctgccggcatcgcagggccatagcctggctttgcttcctcctcgacaagggttgtgcatacataacattcgcgacgacggtggcagcggctcaggcatgcgtggtggcactatatggcacgcacgcgttgcagtggactaagctttgcaacatctacacccgcttctgcgagcaggttgctggtagccttgtgtgtgccatgctcgctgccgtcggtactgccctcctctccgtcgtctccgcccgcaacctcttccgcctctatccctccatgctttcacctccgccgtcttccttcgtgggatagacattgtccaccgcccctctccctaggccttcgtttgtactcttatattgggctgcatagaaaaattaagcccaactatagacccaagtaaagcatacctaccttttatttttcttaacttttgttagagtgcatttaggagtaatacttatccacatgtagtatatactccacagaaggtatatgttcttgtacctctctctcaaaaaagtgtatccataggtaatgtgctttgcttcctctctctctcataagaacaatagtagagaagatggttgtaaggtaattaaggaccaacctttgtggcatgtttcagtgcagaagtgataatgttacacactgaaattgttgtggat

SEQ ID NO: 2265 - DNA, 930 bp, Oryza sativa
  ref <308>: DATABASE ACCESSION NUMBER: AK104251
  ref <309>: DATABASE ENTRY DATE: 2002-08-28
atcgccaccgtcgttcacaccacaccacctgctgcacacagctcgatcgagttagcccactagctaccaaccaagctgccggcgagaggtatggcggcgtggcgcggtctggcgttggcagcggtggtggcgtggtgcgtggcggcggcggcggcggcgccagacgcggcgctgcagagcaaatgccagcaggacttcacgaagctgacggactgcatggactacgcgacggggcacgaggaggcgccgtcgtcgacgtgctgcggcgacatgtcggcgacgcagcaggcgcggcccgagtgcctgtgctacatcatccagcaggtgcacggcggccggaacgaggtccagtcgctcggcctccgcttcgaccgcctcctcgccatgcccaccgcctgcaagctccccaacgccaacgtctccctctgcatcaacctgctgcacctgaccccaagctcaccggactacgctgtcttcgccaacgcctccaaggcggctacgacgccgtcaagcaccaccccgggggcggcggcggccaccgccggcggcttcaaggttcaggcggggctcagctacggcgtcgtcgcggcggcgatggtttctgccgtcttctcatccatcttctgatccgtgaaacaagctagtcacccacccatttttctttgggaaaaaatcttttctgtctcttgatctctacgtcgttcagcttttactctgcaagaaacgaatgcacactggatggatggatggatggttggtttgtgatgtgctacacgaagattcgttctgatgttgtactcttttgtaccctgataaatagatttgagacttgatttttgttcttctgtggcttgatgctagctagctacattctgaatactgatacacgcatatgctagtactaaatctgaataatcaataatgtacctc

SEQ ID NO: 2266 - DNA, 924 bp, Oryza sativa
  ref <308>: DATABASE ACCESSION NUMBER: AK060128
  ref <309>: DATABASE ENTRY DATE: 2001-12-06
aacgcatcaccctttcacctcacagcattttccaccttagagctcaccaacacagcagctgatacttgtttagggtaagacaagatgaacaggaagccaggagactgggactgcagggcgtgccagcacctcaacttcagccgccgggacctatgccagcgctgcggcgagccgcgtggcgccgctgatcgcggcagcggtggtggcggtgactacgccaacttcggcggccgtggtggttcctccttcggtggaggctttggcactggctctgatgtccgcccaggtgactggtactgcaactgcggcgcgcacaacttcgccagccgctccagctgcttcaagtgcgctgctttcaaggacgatgctgccgtcaacagtggcggcgctggtgcctttgatggtggggacatgtcgcgctcgcggggctacggcttcggcagcggcgccgtccgcgccagccgccctggctggaagtctggcgactggatttgcaccaggtctggatgcaatgagcacaacttcgccagcaggatggagtgcttcaggtgcaacgcaccgcgggactccggcactgaggtgtaatttgccgtacgtgtccgatcgatctggatccgatgaggcttgcagcagtgacgacgagcagcagaagcagcgttaagagttgtgatgtctacataagaagaagaagaaagtagaatgcaaaagaaatctccccatggttttactagttttgtttcttcccgttttagatttggttctgattcccatttgggaggacccgtcgacccctgattatctatgttttacccgttttatttcctgtttctttcggcatgtttgctcttcgatcgagtcgtgtaacccgaaacgcttgcgcttgagaagtattattattattaactagtatgttgcttcttaatt

SEQ ID NO: 2267 - DNA, 1040 bp, Oryza sativa
  ref <308>: DATABASE ACCESSION NUMBER: AK104252
  ref <309>: DATABASE ENTRY DATE: 2002-08-28
acagcctcctcgatctctcctctacagcagctcatcactgctcaagagaaaggagacggcaacaatggcgacggcgaggttgctcctagtgctcacggtggtggcggcggcgggcagctgcttctgcagcgcccaggaggcgaagccgccgccgtactgcggcagcgtgaggacggccattgaggcgcacaacatcatcggctggaagacgttcacggcggattgcgccaaatacctcgccgactacctcaccggcgatcgatacccccgcgacgccgacgtggtgatcaacgaggccatcgcctacgccgagagcctcaagctctccggcagcggcaaggagatctgggtgttcgacgtcgacgaaaccgcgctctccacactgccctaccaagccaaccatggctacggagttcagccatatgatcaggcaagcttcatccagtacgtgtccgagggaagcgcaccggcgctgcaggggacgctgcggctctaccaacggctgctccagctcggtgttaagccagtattcctgactgaccgcaccgaggaccaaaggacagtcaccaccaacaacctcctctctcagggttactgcagctgggagaaactgttgttccagccggttgggcttcagaccacaacacaggcgttcaagactgatgagcggcagaagcttgtggacgccggctatgtcatcgtcggcaacatcggcgaccagtggaccgacatcctcggctcgccggagggctgccgtacgtttaagtaccccaaccccatgtactatgtcgcctagctcggctgccggcctgcgccataatgctagcttcgctagctagccatatctcgatgatccataattcgcgtgtgtttcatatatttacttgatttcttctcatgaactgtttgtagtagttaacctttgaagcatatgcttgatttcctttcttagctattgatgagaggtgagatttgaatttgtaataacccttgtttggcatgggttggccatatattgatcgatgtatcgtgtgttgagc

SEQ ID NO: 2268 - DNA, 1081 bp, Oryza sativa
  ref <308>: DATABASE ACCESSION NUMBER: AK060129
  ref <309>: DATABASE ENTRY DATE: 2001-12-06
atagcatcgatcgccagttcgccacagcacaatgccgacgaggaggcgagggatcgcggagggggggcacgccacccgggcggccgtggtccggtgcatcgtcgccgcgatactcgccgccatcgtcgtcgccggcctcgtcgcgctcgtgttctggctcgtcgtccgccccaagcccatcgagtacaccgtcaccagcgccgccgtgcgccacctcaacgtcacgccgcgcgaccgcggcccgggctgcagcgcccccaccgtcaacgccaccttctacctcaacgtcacgccgcgcgaccgccgcccgggctgcagcggccccaccgtcaacgccaccttctacctcgccctcgccatcgacaaccccaaccgccgcgtctccatgcgctacgaagacagcgtcgcgctccgcgtgctctacggcggctccgagctggagctcgccgccggctacgtcgtgccggggttccaccagccccaccgcaacgagacgacgctgccggtgcgcgccgtggcgcgctcggcgccgttcccggtcccggtcacggacctggtcgcctgggagctggagcacgacctcgccgccggcgagctgagcgtggacgttgaggtgaccacgggcgtccggttcatagtcggcggcgtcgcctccaggtactaccaagtcaatgtgacctgctcgccggtgaacatcggcttgtcgccgtcggcggcgcggtccttcaacagcgtgccgtgcgacgtcgagatctcgtgaggcaaccaaatgcatgcatgtttccgtgtccgaccaaagtgatcgtttagtttggattggatttgtttatattttacagcacacgatctactatacttttgatacgtactacctccgttccaggttataagactttctaatattatccacattcatatatatgttaatgaatctaggcatatatatgtgggtaatgctaaaaagtcttataatatgaaacggatgaagtatttgcgaggttgtaaatttagctctagttggagtggccttcttttcttcatcatctcttttaggggattatttatttatttattacgcgat

SEQ ID NO: 2269 - DNA, 1251 bp, Oryza sativa
  ref <308>: DATABASE ACCESSION NUMBER: AK060130
  ref <309>: DATABASE ENTRY DATE: 2001-12-06
gtgagctgattgccaacgaattccccgtgcgccgtgcgcctcgccctcccctccctccctcctcgtgccgttgccccccggttggactcggcgcgcttgcttctcgctcgcggctgctcgtaacctcgcctcgcctcgccctcctgcagcacgcgcggctggctgcccgacccagatccggagcgccatgtcgaggaatccgggctgcaccgtcttcataggtaacttggatgaaaaggtacctgagagggtcttgtatgagattcttattcaggtaggtcgtgttgtagacctacacataccacgtgacaaggaaactaatcgctccaaaggttatgcttttgctgagtatgaaacagaggagattgcccagtatgctgttaagctattttctggccttgttcgtcttcataatagaacacttagatttgcgatttctggacaagacaagcaatcttctaatggaaatattcctgtaacacctaaagtgaaccctataccgccaccaaagccggctcagctaatgagatctagtgatactcccgcatcgcaacatacagtggtaaatggcaggattgctggtatttctccaaaccattcttatagtgcgcactctgaggcaccaagtgggatatcgagtagaggattaagcaatggtacatacgaatatagtagacgcgtatttggttctgttctgaatgacgttagccgtcgtactgacaggcaaccaattccatacccgtcctactagcatattgagctccagggaagaacatggtatgctaacagattagcccagcgatgtcaatgttcgttgtctcagcccttctgtaatatcatctatgtattcaccattacatgcatgtaaatatgtcttatggcttagtcgtgtaggccgatgcttatcttttccattgttctgttctcaacattgtagtcagacttgtgcccgctggttatctcccatgtcatgtcctagtgatagcatcatgcctccactaatgcagctgtaccaagacttagtctaattgcagggatggctggcaatttgtgttttaatatttaatctagtgatgtttgttgttgcttctgtgttccagtgggaccaagtttgtgcttgagttcttggtgtattttgttcttctcgtcaaagttggtttgtattatgttgggcatcacaaaagataatgtcattgtctactatttaaaaaacagtgcaaatctactgaaatttaatgtttatttatgaat

SEQ ID NO: 2270 - DNA, 911 bp, Oryza sativa
  ref <308>: DATABASE ACCESSION NUMBER: AK104253
  ref <309>: DATABASE ENTRY DATE: 2002-08-28
atcaaacacacacacacataggcaacaatggcaagcaaacaggcaatgaactctgccttgttctctgcattggttgttgtggtcttggcttctgctgtgaatgggcaactaaacccatgccaagcaccggcaccaaccccgactggaactccagccccagcaccagccccggtggtgacaccgacgcccgcaccaactccagtcccgacgccatcgccggcaccaacaccttcacccaccgttgcccctgtcaatccgccatctccgacgccgcctcccaagtgtccgctggcgttaattaatctcaacgcgtgcattagtgtcggtcttggcaacccgctcttgaaccaggcgtgctgctcgcagctctccagcctcccgagcgacaccgctgctgtctgcctttgcgaagccatcaaggttaatgctctcgtcaatctgaaggtcaaaatccccgacatccttaaagtatgcgggaaggtctccgctgtagtttgtgtttaataagtacgtcgagagatagcgtgcatatatatacgtacgtacgtatgtatgtacatgctatacataggtgtgcagcatatatatatatatatatatatatatatatgctgtgtgcttgcctctacatatatactgtattaaacttttggacgacccaaatatatatccgccagcagcatgcgtgcgcgtacgtgccgtgcttcatggaggtagggtcttaatatccatatatgtttaagaataattaagttacaggatctgggattgtgctatatatgtatgtgtacacacacgtggcttgatcatatcattatgtgtacgtgctagaagatttgattgtgtactgatctgtgtgtatgcatgcctgcctacaaaatcaaaatatagtgggtacaagtgtatgtgat

SEQ ID NO: 2271 - DNA, 1117 bp, Oryza sativa
  ref <308>: DATABASE ACCESSION NUMBER: AK060131
  ref <309>: DATABASE ENTRY DATE: 2001-12-06
cttcatcgctgaaagcctgggactgccttacctcagtgcgtacctcaactcgataggaagtaacttcacacaaggtgctaactttgcaacggccgggtcgtcaatcagaaggcagaacacatctttgttcctctctggtttcagccccatttccttggacgtgcagtcctgggagtttgaacagttcatcaacagaagccagttcgtctataacaacaaaggtggaatctacagggagctcctacccaaggctgaatacttctctcaggcgctctacacattcgatatcggccagaatgacattaccacaggcttcttcataaacatgacctctgaacaagtcatagcttacatccctgatctaatggaaaggctcacgaacataatccagaatgtgtacggtctcggaggaaggtacttctggattcacaacacggggccgatcggctgcctgccttacgccatggtgcaccgccccgacctcgccgtcgtcaaggacgggtccggctgctccgttgcctacaacgaggtcgcccagctcttcaaccagaggctgaaggaaaccgtgggccacctccggaagacccacgccgacgccgcgttcacctacgtcgacgtctactccgccaagtacaagctgatcagcgacgccaagaagctcgggatggatgacccgatgctgacgtgctgcggctacggcggcgggaggtacaacttcgacgacagggtcgggtgcggcgggaaggtgaaggtgaacgggacgtgggtggtggcggggaagtcgtgcgacgacccgctgaagcgggtgagctgggacggcgtgcacttcaccgaggcggcgaacaagttcgtgttcgaccagatcgccggcggcaagctctccgacccgccggtgcctctcaggcaggcctgccagatcagcagagggcagtgaatcgtcgccgccggtgcgggtgcatcgagccgtcgtcaggttggctgtgccgtactgccatttctgctgctgctgctgcctctggctttgtaagtgtgcaatattgcagaggcatatggttgatataaagtacatatactgcttcctttgtgcaataaagggagaatgagattcataacgagt

SEQ ID NO: 2272 - DNA, 1220 bp, Oryza sativa
  ref <308>: DATABASE ACCESSION NUMBER: AK060132
  ref <309>: DATABASE ENTRY DATE: 2001-12-06
ctgactctaataaatctcctccattcccccaaatccatccatcatggagttccctcatcgccaccaccaccacggccaccgcggcgacgacgacgacgacgatcgccgccgccatcccgctcccgctcccgcctacggccacgactcagcccctccgccgggtccctacggccaagcgcctcctccggctgatccctacgctcgccacccgccttcccacgactacgctcatcctcctccggcgtatgggggagggggctacggcaacgtcgtccacgtttcccacgaggtctccgaccaccagaggcccacgccgcactacggtggatccgagtacatcagccccgtccaagagacccgcccttaccacggtggcggaggagccccaccggtgacccacaggatctactgcaaggccggggaggacaactacagcctcgccgtcagagatggcaaggtctgcctcgtccgctccgatcgcgacgaccacacgcagcactgggtgaaggacatgaagtacagcacgagagtgaaagacgaggaagggtaccctgccatggcgctcgtcaacaaggccaccggcgacgccctcaagcactccatcggccaatcccaccctgtccgtttggtgcgctacaatccagagtacatggacgagtctgtgctgtggacggagagcagggacgttgggagtgggtttcggtgcatcaggatggtgaacaacatctacctcaacttcgacgcgctccatggagacaaggaccacggcggcgtgcgcgacggaaccaccctggtgctctgggagtggtgcgagggtgacaaccagcgctggaagattgttccctggtgatcaaatcaaatctatctgtctatctctacatatgagtgagggaggtttatggaataataagaggcgcctctgatcgatggaggggccggcaggtgtggtcgctcgactggccctagctaagtgttttgttttgtttggtccagctctgtaataatccagccatctcattgtttggaatgtttgttgttgatccataaaatttggtcccggtacgaatatgaacatgtcacgtctgtgtgtgtgtgatactgttacttgtgatgcatctacgtacattgcatacaagctgctgttggttaattgtgttgcggacgtactacgtactgtatttgtgtgcaaagatatatttgcatcgcaagacttttctgcc

SEQ ID NO: 2273 - DNA, 1056 bp, Oryza sativa
  ref <308>: DATABASE ACCESSION NUMBER: AK104254
  ref <309>: DATABASE ENTRY DATE: 2002-08-28
aatcgagcggataacgaacagaacacacacccactgtgctcatggcttcctcttcctcctcccttggccttggcgccatcttccaaagcggctgccccctcctcccgcctcgccccgccgtccgccgcgcgcccaccaggcgccgcgccgtcgccaccaagatctcctgcatcggatgggaccccgagggcgtcctcggcccgccgcagggcggccacatcgtgcgcctcgagttccgccgccgcctcgagagggactccgacgcccgcgaggccttcgagcgccaggtccgcgaggagcacgagcgacgccgccaggagcgcgaggcgcgggtcatccctgacacggacgccggcctcgtcgagttcttcctcgacacggaggcgcgcgagatcgaggtagagatcggcaggctccgccccaggctcaaccagcccttcttcgactacatccagcgcgagatcgcccagatcaagttctcaatcacccgaacagcggaaatggaggaccgattgatcgagttggaagcgatgcaaaaggttctgcttgagggagtggaggcctatgacaagttgcaaaatgaccttgtcagcgcgaaagaacgcctcacaaagatcctgcaatcaagcgacaaaaaatcgacacttcttgaaatggttgaacggaatgagctcaacatgtccatactaacactcctcgatgaaaatatagcaagcgccaagaccaacaatcaggaagaagctgtggctttcatggagaatgttcgctcatccatcctgaaatatattacagtatgaaattggtaggcatgtggacttagccctgtcacatggttatcaaaattaggtcatgaacctgtaatttgcaaggacatgtcacatattcaagggtctgattatgtttctctcttgtatttagttattgtgttccatatatgctcatgtcagtgtcaatagttttttggtaaagagaaattgtacaatcatatacttgtaccaccaacatatacttgaaccagtttcctggttggacagctagttttacctgttgcacatc

SEQ ID NO: 2274 - DNA, 917 bp, Oryza sativa
  ref <308>: DATABASE ACCESSION NUMBER: AK060133
  ref <309>: DATABASE ENTRY DATE: 2001-12-06
aaccaccacacacctgagcttcagctccagcggcggctctcttggcgtgctcctgctcagctgagctcgggtgagctctttctacctccaagatttcctcctcctacctccactccactcgcctcacctcagctcacctcagcgtcgtcttcttccttccgcaacctcgcaggttgaaccggagagcgggaggagcgagtgagtggtggtggaggccatggcggaggatgaggcggccagcgccaagaagctcttctccgcctccgatgtcgtagggcacgcgtccaggaaggattgctgggtcgtcatccatggcaaggtgtatgatgtgaccaagttcttggaagaccaccctggtggagaggatgttctcctgcatgcatctgcctctggggatgccacggaggcatttgaagatgtggggcacagcacatcagccatcagcatgatgaacaactacttgattggaagcatcaaggactatgtgcctcctagtgcatcagaggctacaaccattggcggcaatgatgtgccgccaaacttcagaaggatgccacagaagaaaggacctcctgctcccaacacctttctggacttcctgctccctctgtttgtgctcggccttgcctttgccgcttggtactacctgaccttcattgccaaggcctagtaaatttggtgaaggtttgaagtattgaacattttactatgccacgtctgcttcagcgacacatggagatatattctggtcagttctaagttttattatgaggtttctggctgtgaattagaaatgtcatcgtattattatttgttaccaaattgttggctttgcttcgaagttggtaccactcttacatgtaaatggcgatggctgcatcagtaaaatgtatggatggggcattttccctttcgct

SEQ ID NO: 2275 - DNA, 1131 bp, Oryza sativa
  ref <308>: DATABASE ACCESSION NUMBER: AK060134
  ref <309>: DATABASE ENTRY DATE: 2001-12-06
gtgctcagtttcactcttatcagtgaattagatcatatacttgtgtccttgatagctcgttaattagcatggctaggtcactcgctgctgtcctactccttttggtcgccgccgcgggagccagccatgccgcgtcgccggcggagatgtactggaagatcgcgctcccgacctcgccgatgcccggcgccattcgcgacctcatcagcccagcgagctcagtgggctcagcttcgaaggaggacacggtgggcaacgtgttcttcctcgagaaggacctcttcccgggctccaagatgacgctccacttcacccgcgccaccgccggcgccgcgctgctcccccgcggccgcgccgagtccgtcccgttcgcctccgaaaggctcccggagatcctctcccagctctccatcccggccgtctcgccgaccgccgacgccatgtggtccacgctcgccgagtgcgaggccgcgcggctcgccggcgagacgaccaagcacaagcactactgcgccacgtcgctcgagtccatggtcgagttcgtcgcgtccagcctcggcacccgcgacgtccacgccgtgtccacggaggtgatcagcacgttgacgccgacgccgaggcaggcgtacagggtggaggccgtgaggcccgtggcggtgcccggcggcgacatggtggcatgccacgggatgccgtacgcgtacgccgtgttcgggttgcacgggctcaagggcgcaggcggtggccgcgtgccacggggacgtggacgggcacggcgcggtggcggaggcatacaagaggctcggcgtggcgcccgggagcgtggccatctgccacttcctgcctcaggacgacatgatctgggtgcgcaactgaattaatgaagcagctaccttgcgcgccatccatggctaattattttagacatgctccttcctatattttggatctacctgccggctatcatgttatcataaatttacgcgtgtgcgcgcgacgatccgacatgcccacactaacgtgttttactttgttaattaataagtctgcatacccaggtcatcttgtacggtgctactccctctatcccgaaataaaacaacttatagagattgaagtttgtcccaaaat

SEQ ID NO: 2276 - DNA, 1060 bp, Oryza sativa
  ref <308>: DATABASE ACCESSION NUMBER: AK060135
  ref <309>: DATABASE ENTRY DATE: 2001-12-06
gaaaaacaagaagcaaaaaaattattcaagaaacatcatagagccagagctagagcatcacagagaaagaagaacttgctcccaataaactatccatgcttcttgcagagatgatgaacagctcagtgctgttcttgccaagctcatccctgttcctcacaaagcagctggtacctgcaaccaagggcagagcatcagcagcagctgctgttaggtgcagcagtgggcccaatctgtcagaagcacatgaggaggaggatggtgtagcctccttgatggggaggaggcatgcaatggcttctgctgctgctgcctgtggagtttcagtgtttggttttgcaggtgagagcatggcagtgaagcagggccttctggctgggcggatccctgggctctctgaccctgatgaaaaaggttggagaacataccgtaggccagacgacaagtccggtggacatggagttggatggagcccaatcattccctacagcttcaaagttcgtgatggctgggaagaggtcccggtgtcgattgctgatcttggtggcaccgagatcgacctgcggtttgcgaattccaagcagggacgtttgttcgtcgttgtagcaccggttcgcaggtttgcagaactcgacgatgcgacaattgaaaagatcggtacaccggagaaggtgatcgacgccttcggaccagaggtgatcggtgaaaatgttgaagggaaggttttgtccatggcaacagcagagtattcaggaagaacttactaccagtttgagctggaaccacctcatatcttcatcactgcaactgccgctggaaacaggctctacctgttcaatgtaactgcaaatgggctacaatggaagaggaattacaatgacctgaagcaaatagctgaatcatttcgtgttgtctagggtttaaataaattgctcacgatgtatctgtttatgtgcataccattagagaaaatgaggtgctattatacagactgcagaggggcaatgagtaagaaaacataacttttgaatatgagttgttaaagctgaagcttttgaac

SEQ ID NO: 2277 - DNA, 1168 bp, Oryza sativa
  ref <308>: DATABASE ACCESSION NUMBER: AK104255
  ref <309>: DATABASE ENTRY DATE: 2002-08-28
aagccagccgcccaaaccagcaaccaaagaaacagctagagagagaaagaaaccccggattacggattcctccctcccccaaaggccaaagcctcccaccgccgagccgccgccgccgccggctttcttgtttctagcttcctttgatgatgaacgctctcggtttatcggtggcggccaccagcaccggctcccccttccacgacgtctgctgctatggcgctgggattgcagggaacatcttcgctcttgtgctcttcatctccccgctgccgacgttcaagaggatcgtccggaacggatcgacggagcagttctcggcgatgccgtacatttactcgctactcaactgcctcatctgtctctggtacggcctccccttcgtctcctacggcgtcgtcctcgtcgccaccgtcaactccatcggcgccctcttccagctcgcctacaccgccaccttcatcgcattcgccgacgccaagaacagggtgaaggtgtccagcctgctggttatggtgttcggcgtgttcgctctaattgtgtatgttagtctggcgttgtttgatcaccaaacacggcaattgttcgtcggttacctcagcgttgcgtccctcatattcatgtttgcgtcccccttgtccatcattaatctggtgatcaggacgaagagcgtggagtacatgcccttctatttgtcactctctatgttcttgatgagcgtatcgttcttcgcatatggagttctactgcatgatttcttcatatatattccaaatgggattggaaccgttttgggtgtcattcaattggtgctctatggctacttcagaaaaggatcaagagaggacagcctcccattgctagtcacacatacatgagcacaccaaggaacaaggtcctgcaagcaatttgcctgcctttgtttcttggaaaatcatcggttctcttatcagttatcacatattggattttgtgttggtggtggtgtttactgttcttttgtaaaattgttttgtggtttgaaatgtacaaatagattttggtataccatattgaaagtagttttccagctctgttgctagctgccacatcatttcttggttcttggatacctttgtatatcagaaacaaaaatcgtcacaatctacaattggagctgtaagaggtg

SEQ ID NO: 2278 - DNA, 982 bp, Oryza sativa
  ref <308>: DATABASE ACCESSION NUMBER: AK060136
  ref <309>: DATABASE ENTRY DATE: 2001-12-06
ttgcttctccccagatccgaagcgagaagcctcttttggatctatccattcgggtcaccgtggcagttcggtaattttggcggagaggaggaggaggacgacgacgacgacgacgtgatgggtctcctcgacaagctgtgggacgacaccgtcgcggggccccgccccgacaccggcctcggccgcctccgcaagcacgccgccgcccgccccgccgccgtcaagatcaacgacccgacaggggacgcggcgatggtggccgtcccgccgacgacgccggccggggcggaggaggcgccggtgaaggtgacgcgcagcatcatgatcaagcgccctgcggggtacccggcgtcgccgaggagcgcggccagcacgccgccggcctcccccgccggatccacccctcccatctcgccgttcgccggcgccggtggtcgcttcagaaggaaatcatcgtccgacgcatatgagagggcaacacctgggacaaccagtcaccctcctccctttgaagtgtgagcccccagcgtgctcacgctcgtttttgctcctaggccagcgtctactgcacacacaaggcagaggaggaggagagacatatcagagaccgaagcggatggaagtcgagtgttgtctacctatcttacctctactactgtgatataacgtagatgctactagtaattaagtacgcctgctgctgctcgccgtctactatgttgagtcgtgtatggtttgtgtagtaaggttgtcgtctgctgtgtcatatatgtacatatgtttgctctgggctgcgatggagcttgctgcagtctgcagccaagcccgcagttcatcgctgcgtcgtgttttcgcgtccttttaagccctctgcaactatgtcaaatggatgggcatgtggaggatggtggaatgagctttcaggctgtgatgctaaagatggaagcactgatggctggtgtgtgattttgcttgatgtatt

SEQ ID NO: 2279 - DNA, 1281 bp, Oryza sativa; identical to SEQ ID NO: 2107
  ref <308>: DATABASE ACCESSION NUMBER: AK104256
  ref <309>: DATABASE ENTRY DATE: 2002-08-28

SEQ ID NO: 2280 - DNA, 1072 bp, Oryza sativa
  ref <308>: DATABASE ACCESSION NUMBER: AK060137
  ref <309>: DATABASE ENTRY DATE: 2001-12-06
actacttgtactgcgagccacacgcagccaccgcgcaaaacccacgcgaccccttcctcctccgcctcgacccgatccgatctgagccagagccagccatggcggcgactagggtttggctctccgccctcctcctcgccttcctcctcgccgccgcccccgtcgtccaagttgccagagctcagtccatggaagaagctgctacagctgaagttgttgatggggctgatctaggaatcgtcagtgatgatacacaagtttccagcgatgggcctctaagtccggctcctggtgtggagacagtatgtgtttttcccaaaaacgctggcaaaattgtgctagcaggtgaagaaactgaactactggttggcctgcaaaacgagggtgaatcaactttgaatgttgttgctatccattcaactctccatcttccttttgaccataagatgtatggacaaaaccttactgttcagaacttcttcaatgcatcagttcctgtctctgtacaagcaacctttccgtatacattcgccgtgagcaagttcttgcagcctggagcatatgatctagttggttacatagtgtatgagattgatcagaacccataccagaatgtcttttacaatggcactgtagaggttgttgaggctggaggtttactcagcgttgagtctgtgttccttattacccttggagttgcccttcttggtctcttcggattgtgggcatatggtcaagtacaacagctctcaaagaaaacaaagaaggcccccaaggtggaactgggaactggaactactgatgccaacatggatgagtggctggagggcactgcatttgcacagggaagcaaatccaagaagaagaaatagattggaggcccttgaactctagttaatcattttcaggatctagaatgagacagttgagggtagcccttcacaagtaacttttgcagacgatagatgagaaaatggaggtgttttaaaccgtagtttcgtggctgctgcacatgtttgttgacaccaaatttcgaccttgttgtgtacttttacatgaaagttttttcttg

SEQ ID NO: 2281 - DNA, 1089 bp, Oryza sativa
  ref <308>: DATABASE ACCESSION NUMBER: AK060138
  ref <309>: DATABASE ENTRY DATE: 2001-12-06
gttttcgtcaaacttctcatctccccttcccgtccgccgccatgccgccggccggtagcctcaccgacgagcagctccgcttcttcgacgccaatgggtacctcgtgctggggtcgttctccagcgcggaggaggtgagggcgatgagggaccgcatggcggagctcgtcgacggcttcgacggcgctggcgacgtcttctccacaaaggatcaccggcaggtgaagaacgactttttcttcaagagtgcggagaatatctctttcttctttgaggaaaaggcatttggagatgatggatgcttgaagcaggcaaaggaactttcaatcaataaagttgggcacgcgttacatgaacttgaccctgtgttcaaaaagttctcttttggagcgaatgtttccagcctgttctcttctttacgctacaagagacctgcagttattcaatctatgtacatctttaaggcattggtggcgaggtggtaccacaccaggataatacattcctatatacagaccctccatcgtgcacagggctgtggcttgcactcgaagatgcgacaaaaacgaatggttgcctttgggcaattcctggatcacataaaaatggcctgaaaaggcgaatgatcagagatgaaatcgatactcattttgatcatccttcgccaacctatgatctgaaagaatttgtgcccttagaagtaaagtcaggtgatttggtggttattcatggagatcttatacaccagagctttgaaaatctttctccggtgtcaagacatgcactgagcttacatgtaattgataccgaaggatgtgaatggtccaagcaaaactggttacaaaggaaaatcccacctcagccactttatgaaaattagttgaagcagttacctatatgtcaaataaacgagtgatgacctagaagcaatggtgatgatgctgattacctatcctcgtcgcaataaatctgcagtacgatgttgagtagctgtgctttcttctcccgtcttcagacagtgtaaataccttgctactctgttttcatggatgaattttatggcaataaatttgatgtacgatgtagagt

SEQ ID NO: 2282 - DNA, 1147 bp, Oryza sativa
  ref <308>: DATABASE ACCESSION NUMBER: AK060139
  ref <309>: DATABASE ENTRY DATE: 2001-12-06
aaaatggaagggccgtcgctcaacggataaaagttactctagggataacaggctgatcttccccaagagtccacatcgacgggaaggtttggcacctcgatgtcggctcttcgccacctggagctgtaggtggttccaagggttgggctgttcgcccattaatgcggtacgtgagctgggttcagaacgtcgtgagacagttcggtccatatccggtgtgggcgttagagcattgagaggacctttccctagtacgagaggaccgggaaggacgcacctctggtgtaccagttatcgtgcctacggtaaacgctgggtagccaagtgcggagaggataactgctgaaagcatataagtagtaagcccaccccaagatgagtgctctctcctccgacttccctagagcctccggtagcacagccgagacagcgacgggttctccacccatacggggatggagcgacagaagcatggaaataggataaggtagcggcgagacgagccgtttaaataggtgtcaagtggaagtgcagtgatgtatgcagctgaggcatcctaacgaacgaacgataaaatcccccacacacttgcacctcgtctcgctctcgcgccaagaaagcaccgcgagttcttcttcttcatcctccatggccacaaccgcgtcgctgtccgccgtcgcggcgcggccactgtccgtggcctggctcaagaagcccctgtgcgcctcgttccagcccgtgccgagggcgaggccggcggcggcggcgaggatggccgtgagggcgtcggcgtcgatgaaggagagggcgacggccgggctgacggccgcggccatggcggcggcgatggtcctccccgacgtcgcggaggccgcgcagggcagcctgacgccgtcgctcaagaacttcctcctcagcatcgtgtccggcggggtcgtgctcgtcgccatcgtcggcgccgtcgtcgccgtctccaacttcgaccccgtcaagcggacctgatcttctccttctccttcattcacagacacgcctcgatcgctgtcttgtatcgagatcatcgtctctttgcagtgttgttttggagattctgtaaactgatttacgatatggagatatggagttgttgatggttaattgcttccat

SEQ ID NO: 2283 - DNA, 1010 bp, Oryza sativa
  ref <308>: DATABASE ACCESSION NUMBER: AK104257
  ref <309>: DATABASE ENTRY DATE: 2002-08-28
atccattcagagttagcaagctcttctaattcatatatagaactcagaatggcaggtgctcctcgaggactagttctcctcggcgtttgcgccgtcctgatggtgctcgccgtcagtggcgaagcggcgtcggtcgtcatcggcacggccaagtgcgccgactgcacccggaagaacatgaaagccgaggatgctttcaagaatctccaggtggcgatcaagtgcaagaacggcaatggcgagtacgagagcaaggccgctggaaagcttgacggctccggcgctttcagcgtccctctcgacaccgaccttcacagctctgactgcattgcccagctccacagcgcaaccaacgagccatgccccgggcaagagccatccaagatcgtgccattgtcggagggcacctttgtcaccgtcgctggcaagaccagctatccgtcggctttgtgtgcgtcggcgaccatctgcggccccatcaagaagaagatcatcgaccacttccataagaagccggtgccaccgaagccggatcccaagccagagccgcccaagccgaagccagagccagagcaccccatcctcgaccacttccacaagaaggagaaggacttctttgaccacttccacaagaagcccgtaccacccaagcctgagccaaagtcggaacccaagccacagcccaagccacagccagcgcctgagtaccacaaccctagcccaccagcgaagcactaaacattatctacgtttggtcttgtatgatttcgtgccatatcagtgtgtccgcagaataacgctttctacccccgtgtgagattatacattgaaatataatgtacttgctagctttcatccgcaggagtttttttttaaagtgtgaccgggttcatttattggatatcgcatgcatattagcagggcacgatgtgtactgtaatatctgcctgttgtttttatttctctacctaaatgaagttaaccacaaaggacaaacataaattcacatg

SEQ ID NO: 2284 - DNA, 1126 bp, Oryza sativa; identical to SEQ ID NO: 2058
  ref <308>: DATABASE ACCESSION NUMBER: AK104258
  ref <309>: DATABASE ENTRY DATE: 2002-08-28

SEQ ID NO: 2285 - DNA, 1281 bp, Oryza sativa
  ref <308>: DATABASE ACCESSION NUMBER: AK060140
  ref <309>: DATABASE ENTRY DATE: 2001-12-06
aaatccgaaggggaaaaaaaaaggagaggaggaggaggaggaggagaggggaaggggaggaggccgccatcccattcgttgctagttcggcgggtccatttcgacggcggcggcggcgcgcgcgcgcgcagcggggagaggagagccgaggcgaggagatcttcgcggggtgaagcttcaaagccctcccctccgccgccgcgtcaggtgaggaagcatttagaatggtggacaagaacgatggatctgaagggctcaaattcaacacatcacacctgatgcaaacaactgaagaggtagcgagagcatttattgctgcagcttctgcagccactgtacagtcaacacgaccatctgtggtgtactcttccagagaagagagtggcagcccaatgcagaagctgcaacaacaattttcgaagatcctgaaagggttttcaacgtcacctgaagtgtctggatcttacaacccggaggttctcacaacacaaaagcgccagtggtccaggttccaactaaagtcgctggtcatagcatggtcacaagacaagataacagtcgcttcaacgtctatgttgttccatttacacgaactatgtgtattttttgatcaacattttttgtcttggagttttacttatagaaaataccagaactcatttaatatcgcttgtcaggctcaatgatctatcacacattgagtttgatttgcatgaaagttttactttggttctttcaccttgctcatgtatctatcatgtgtacttgtgtagtgagtggtgacttatcagcattttgctgaattatttgaaactatttaggaaggtttactcaacagttatgattacatttatactagtcatctctggacagtttcacactctatagattataaatagcagttacctttgttctgtaatggttgaaataacctgagcatcataacaaaaatatccattttgttatattcttatgtacttgttcacaagtgcctctgaattctgagtacttattccagtgcaatagccatgtacagtaagaactcaatagggtagctttgtttctcgtctacctttgtctttgttggtacagctttcttagactttgtagggccaaagtgcaaaagttgttgctgctgatgcatcaaaatggtgggatggcgccatttgtgagcagtcagttcagctttatcttttctgctgttctgctttcagtttatatcttgtaatgaactactatcgtttctattaatggaaacgggagaggctctctctccacttc

SEQ ID NO: 2286 - DNA, 975 bp, Oryza sativa
  ref <308>: DATABASE ACCESSION NUMBER: AK060141
  ref <309>: DATABASE ENTRY DATE: 2001-12-06
attacatgaatggcacctcttggtgacagccagccagccactgcgtcacatcgcttgtgagttcgtctcgtcggcttacttactaactccggcgccacgtcgtccccgtcgtcggctcgccgccggcccgctgccggcccgctgcaagagcttccggcgatgtccaagaggcaggcaatcctgaagtcgatatggtcgccgctcaccgccgtcttcaggaccaagaattgtgctgcgacctcgagcaacctcgtcgtcgtcaatgccggcggggagatcatcgccggcggcggccgtgaggatgcaatcgtaacgagaaaatcccggtctagcctggaggacctcctgaagatcgaatcgtcatcgaatcctggaaccatggccgccgacgagccactaccaaatcacatggcttcgccgaagaactcctcgatggagagcgagttgcaagtagtgctggccggctacccggagaacagccacggcggcgttatcgccggccgtccaccggagtctctcgacggcggtggcggcgccgtcgtcgtgcgggctcagacggtgagggtgaaggtgaacaggctcgtcgtgcccgttccatcagctctgcgggcacggtcgcgcgccgcgaagatggtggatgcggcggccctgccggcgaagcgtggctcgtactggaggatcgccggtcgcggccgcggcggcgacaagagtgagctgttctaccagcggccgatcccgttggggcgcagatgcagggtgcaacacttggaggaggttacactgtctgataattaaggtccatccccatggtgcatggtttggatttggaaaagaaaattaaacaccgaactgtactatagtggattgctactatactattagtgcatgcagagtctttgtaaactgtaatatataacgtggtaattaactaattgttgtaattatatgacaatgcaaattataagatgtgttttc

SEQ ID NO: 2287 - DNA, 1047 bp, Oryza sativa
  ref <308>: DATABASE ACCESSION NUMBER: AK104259
  ref <309>: DATABASE ENTRY DATE: 2002-08-28
tgccaccgctcgtcttcctcccaccttccgccgccgccgccgtcgctctcctcttcgctccgccgcgcaggtaagaaggagaggaggagaaaatggtgaagcacaacaacgttatccccaatggccacttcaagaagcactggcagaactatgtcaagacatggttcaaccagcccgcccgcaagcagaggcgccgcattgctcgccagaagaaggctgtgaagatcttcccccgcccaacatctggccctcttcgacccattgttcagtgccaaactttgaagtacaacatgaagtcgagggctgggagaggctttacccttgaggagctgaaggctgcgggcatccccaagaagtatgctccaaccattggaatttccgtggatcaccgccgcaagaaccgctcacttgagggactccaggctaatgtccagaggctcaagacatacaaggccaagctggttatcttcccaaggcgtgctcgcaaggtcaaggctggtgattccactgccgaggaacttgccactgccacccaggtccagggtgactacatgcctattgctcgtggtgagaagcgctcagttgaggttgtgaaggtcaccgatgagatgaaggcgttcaaggcctatgctaagctccgtgttgagaggatgaaccagcgccatgttggtgcccgccagaagagggctgctgaggcagagaaggaagagaagaagtgaagtgaccggacatagtatctgttttgttatattcagcagctagtggatgctatcagggactaaatctaaattttgtttttgtgctggaaatagagaccagcttatcattttggtgtcatcataccccttctgtttgatatctggtactgatttgcatgctctgctatcgaatgaaattccatccatgtgttgtgtctgattaatctgtgctgtgtgcaccttcaggaatgtttgctaaaatgcattaggcatgttgtacaacatatgcatgtttgttcctagtgctgctactgattattgagatcctacagtgcagagttatgttgtt

SEQ ID NO: 2288 - DNA, 886 bp, Oryza sativa
  ref <308>: DATABASE ACCESSION NUMBER: AK104260
  ref <309>: DATABASE ENTRY DATE: 2002-08-28
attgcatctcaacagagcaacacaaactcacacattgccaattccctttcttggtttgattctggctgctgcaatggcttcgtcgctggccctggtagctctgctcctcgtgagctgcgccgtggtggcggcggcggcgaccaagtacaccgtcggcgacacgtccggctgggcgatgggggcggattacaccacctgggccagcgacaagaaattcaaaatgggcgataccctcgtgttcaactacgccggtggggcgcactcggtggatgaggtgagcgcagcggactacgctgcgtgcaccgctagcaacgcgctccagagcgacagcagcggcacgaccaccgtcaccctcaagaccgccggcaagcactacttcatctgcggcatcgccggccactgcagcaacggcatgaagctcgtcgtggacgttgccgcggcctctccagccccagccccaaaagccccgtccaccacaccgacgactccatctacgacaccagcgacaccggcgtcccctggcacaagctccggtctgacgcccacaaccccagcaacggtgctcgcgccgcccgccaagcagtccgccggtgcagctgggctcagggccaggtcatgggctatgctgggcctggcaggacttgccgccgtgcaactgggcctcttctagggccaaggccagggtggaggcagtgctgttaggttgcatgtcatttagacatcgacacacaccgtgtcaagtgtttgttcaggaagtgagttgaggtttcttttcacagagggaactggtgcttttgttgtggtgagctggcagtagttggatgctgtgtttgaattgacttcctgttaatttgttgtcctatctatgtcatggatttttagcctc

SEQ ID NO: 2289 - DNA, 1062 bp, Oryza sativa
  ref <308>: DATABASE ACCESSION NUMBER: AK060142
  ref <309>: DATABASE ENTRY DATE: 2001-12-06
actctatcccatctcttccccgttcccacttcgccggagcaccaccgcggccacggcgcgcgacgcgagcacccaccccgccgccgccggcggctgaccaacttcctcctcgccgcctcccaatcatctcgagattttaactgaactcctctcttgaacttcacgagtttttgttcaacaaagaacaatggaaggccggtcccagttgaatccagatgccagtcctttcataccttcctcactaagtcttttcacatacaatgattctaagagacaagcagagtcatcctcgatgaacgatccttctgctagagcttgccgtccttccatgtgcgaggaaaatgatatggatccacttgctttgaccaaatctgtccttttaatgttcccgaatatctctgaggaattcattgatgagttactccaggcaaatgaatttgacatatgtctcacggttgatatgcttcatgagctgaattcacaaaatatgcttcatggtgatgccataatgggcttcccaacattcccagatgtgaagaaatttcacggcaacctaggcctacctgatggtgatttgtctgaaagcaacagcagtcttgatcaatctcttcagaagggtatgtcactgacgacttctggtgcgaaatctgcctcggcaatgattccagataacatttctcttcatgataaactgggtgtacagaaagacgataagccagcaattgcttctaccacaaattaatctgcaatgcatcctgctgtagattctgtattcttttactgctagtttgggtgcctgactgaaagtagtgcaaagtgcagacagtgcaaaactgcaaacaatgattgtcttcttaatccatgtttgaaggactacttggttttctgggtttgagcttttgaaagtgtgcatcgcagtttcagtttgcttgttagttgttaccgagagttgtataggtcttttgatgtattcgtcagtcactattatgtactctgaacccagtggattgtgcagcagcggcagctctcgtgtaccccctgcgagtgctacctatggttgtc

SEQ ID NO: 2290 - DNA, 988 bp, Oryza sativa
  ref <308>: DATABASE ACCESSION NUMBER: AK060143
  ref <309>: DATABASE ENTRY DATE: 2001-12-06
acacatttcagctcaccactgctagcttgggaagaggaggaggagcttgagcttggagagagacaacaatggcggctcaggctcttctctctgggaggcagctgctggggaggccattgcaatcttcagtctccaggtcttcttcctccaggaaggcacccttcatggtcagggcagaggccactccccctgccaagcaaggtgctgacaggcagctgtggttcgcatccaagcagtccctgagctacctggatggcacgcttccgggagacttcgggttcgacccgctggggctatcggacccggaggggaccggtgggttcatcgagccacggtggctggcctacggcgaggtgttcaacggccggacggcgatgatgggcgtcgtcggcatggtcgccccggagctcctcggcaagctgggcctcgtccccgccgagacggcgatcccgtggttccagaccggcgtgatcccccccgcgggcacctacacctactgggccgacccttacactctcttcgtcttcgagctcgccctcgtcggcttcgccgagcaccgccgcttccaggactggtacacgccgggctccatggggaagcagtacttcctcggcctcgagaagtacctcgccggctccggcgagccggcctaccccggcggcccgctcttcaacccgctcggcttcgggaccaagagcgaggcggagatgaaggagctcaagctcaaggagatcaagaatggcaggctcgccatgctcgccttcctcggcttctccgtccaggcgctcttcaccggggttggccccgtgcagaacctgcttgatcacctcgctgatcccgtccacaacaacatcctcaccagcctcaagttccattagagatgccatcaactacgtatttaattaattacgagtttttaattatgtatgtatgtacgtgcgtatgcgtatatgtgtgtacgtatgtatgtacgcaactttgtacgatc

SEQ ID NO: 2291 - DNA, 1036 bp, Oryza sativa
  ref <308>: DATABASE ACCESSION NUMBER: AK060144
  ref <309>: DATABASE ENTRY DATE: 2001-12-06
acactcctctcaactctcaacaagaagaagcagaagcatcgatccaatccaatcgaggccatggccgccggcgtgaagaacatggtcatcgccatcctcgtccctctcccttccctcctcttcttcttctctttcgtccgccccacccggccgcggttgcggacacggcgaggtcggcggtggcggtggcgctcacctgggtgtggagcgccaggctgacgcacaactacctgaggagggaagggtggcaatggggcaagagggaggattggaggttcgccgagatgcgggggcagtacggcagggcgtggtggtggatgtccttcttcgccgtctacctctcgcagcaggtgttcctcatcggcatctgcctccccatgtacgccatccactccaccacccagccatggggcgcctgggacgtcgtggcaacaatggcatgcctcgccggcatcgtcatcgcccacttcgccgacacgcagctgcacaggttcgtgaccaccaacgagaagctgaagaaggtcggcgagcccacggtgctgaccatggaggccgggctgtggcggtactcgcggcatcccaactacttcggggagcagctgtggtggtgggggctgtacctgttcgcctggaacatcgggcagccatggatggtggtcgggccgcttgtgaacagcctgtgccttggctatgtcaccgtgctggtggagcggcgaatggtgaagcaggagcaccgagcagaggcctacaagctgtaccagaagaggacctccgtttggatcccctggttcaggaagcccgtccctcaaccctacaaccacaaggacagctcaaaccaaaattcgctcaaaatttcgcactcttgattgttcacctttatgtgtttgatcactttgattgctccttcctgtctgtcgtgcttttgtgatgtttcatttgttgtcgtgtaattaactatttgtaatctgtaacttgtaccatcatcactttgcaaggtgtctgcaaattcacggtgtaatctctactcatcgccttc

SEQ ID NO: 2292 - DNA, 1027 bp, Oryza sativa
  ref <308>: DATABASE ACCESSION NUMBER: AK060145
  ref <309>: DATABASE ENTRY DATE: 2001-12-06
aaaaaactgcacccacgagctataccaagtactctctttctcactcgattgattcaagcagcaaataattagcctagcttactctttccatagctagctagcttgttgcgagcaagatcaggttgccggtgcagtaacagagagcaaccatgggtgtattggacagcctctctgatatgtgcagcctgacagagaccaaggaagccctcaagctaaggaagaagcggccactgcagacggtgaacatcaaggtgaagatggactgcgaggggtgcgagaggagggtgaagaacgcggtgaagtcgatgcgaggggtgacgagcgtggcggtgaacccgaagcagagccggtgcacggtgaccgggtacgtggaggcgagcaaggtgctggagcgcgtgaagagcaccgggaaggcggcggagatgtggccctacgtcccgtacaccatgaccacctacccgtacgtcggcggcgcctacgacaagaaggcccccgccggcttcgtccgcggcaaccccgccgccatggccgacccctccgcccccgaggtccgctacatgaccatgttcagcgacgagaacgtcgactcctgctccatcatgtaaaaccaataatccatatatatactacaactccggcgacttctccggccggccggcaacatgcttgcttaattagctagcttgcttggttgatgtgtactactgcgttaagcctgcatagagatgaggtgtctagctactgtgtatattatggccatatgttatgtagtactacgtgctttgttttggattattactaaaatagttgcataaagagagtgaaagctagagctgtggctacgtgttctgaattgtgattacgtgtacgaactagaaacgacacgtctgttgtcgattgaattggtctttttggagcggtagctaggccgggtgaaggggcggggttaatcaatcaattgtttggttgaaccgctaggtaagctctctatgatgatatgaataaaaaatccctgtcagtgtcatgt

SEQ ID NO: 2293 - DNA, 1105 bp, Oryza sativa
  ref <308>: DATABASE ACCESSION NUMBER: AK060146
  ref <309>: DATABASE ENTRY DATE: 2001-12-06
atgcatcactcatgacatgatcgattccacgaacatgtcgaaattgccatgggagcaaccaccctcctgaacgctctcgtgtgccaccaccatcatcgcctcaatcctctctctcatgctggcgtctcccatcacctcctccactctgccggcgaggtgctccttcgtgaccatgcccgacttcttgtcggcgacggctgggagcccgacacgccagatgtcgcagatgtacgcccggttgacgaactggtcggcgaagtagggccacgccacgaacggcacgccgttccggacgccctccatgatcgagttccacccgcagtgcgatacgaagcacgccaccgccgggtgagccagcacccgctgctgcggcgcccacgccacgaccttgccacggccgccgtcattgccggaggcgacgacgcggtccaggaagccgtcagggtactcgtgcgcgtcgccatggacgatgtctgggcgcaccacccacaggaaaggccggccggtgagctcgagccccagggcgagctcctggaattggcgccggtcgaacacggtgaagctgccgaaggcgacgtacacgacggaccgcgccggctgcacgtcgagccacgacatgcacgcgccgtcctcggggcgccagaagtggccgaccggcttgcctgggcgctcgccggtgaggagcgggccgatggggaggatcttggggaaccgcgcgaacgtggccgcctccgcgtcgcggaaggagttgcagaggatgtaatcacactcgtcgacggcacggacgccagcgaggacgcaactgaacagcagctcctgcccctggtcgttgccgatgcagttccacgccaggtgcgccggttgcatcatcggcatgtccggcgacagctggaaggcctcctgcgttagtgctgaccctgcccaggaaaaacaaacaagatggaaataccagttggaagcctattagtttctgatttcagaatttgaaatttgttttgtttgtgaggaatttaacatctttgatgtccggttagcattttggatcttccacgaaatttgagttgcttcccgtacaaaattttggtccgtgaaacgtaattttgtc

SEQ ID NO: 2294 - DNA, 1140 bp, Oryza sativa
  ref <308>: DATABASE ACCESSION NUMBER: AK104261
  ref <309>: DATABASE ENTRY DATE: 2002-08-28
atcgcagcggcgatttctcatctgaattgcaggccaattccagttgagtttctccacagaccacagatatggcttccggcaggatagctctgctctgccttcttggcttgctgctggtagcagcctcaccggctgccattgctgccaaagatgacaaaatcttctaccagattactttcatgtggccgggagcgtactgcgcgcagacgaaggccggatgctgcatgccgaagaccgacgtcgcgccggcgtccgacttctacgtcgccggcttcacggtctacaacgccaccaccaactcttccctgtccagctgcagcaacactccattcgacatgaaccaaattggggatgtcacgaggctgatgcagtactggaacaacatcaggtgccccagcaagagcggccagaagggctggaagaacgcgtgggagacgtccggcgtctgctccgacctcaccgagagcgcctactttgacaccgccctcgccctccgcgacaagatcaaccccctttctcgcctcgtcagcaacggtattaagccggactttgggctgtacagcgtgaagaagatcaaggaggtgatcgaggaggggatcggcgcgccggcgctgatccagtgcagcaagggcccgttcaacaagttccagctataccagatatacgtctgcgtcgcggaggacgccaagacgttcgtggagtgccccagcccgaggaagccgtacacctgcggcgacgacatcctcttccaccctttcaagaagtggatgctcaagaccaactccaccaaatcctacgccgccgccgacgccatcgaccagctgctcgaagcggtcatggaaatctgagctcgatcgatcgatcgatcaagaagacaaattaacccttgttgtgatatgcgatttgtgcgtgtgtgttgtctgtttcgatcgtgatgttttctgcgtgtttatttcgtgatgttctctcatcgcgcccgcgcgcggttgggtacgatccgggacacctacgtagcactgaatccgtctctgtgatgcattcagagaataagtccgaatatgtgcggccttgttaatgttttcatgaataactcgtgtagtgggattactttgtcatcggacatttcatgatttccgatgc

SEQ ID NO: 2295 - DNA, 1110 bp, Oryza sativa
  ref <308>: DATABASE ACCESSION NUMBER: AK060147
  ref <309>: DATABASE ENTRY DATE: 2001-12-06
aacgaacgctaaaaaagtaacagtttctgtactttattgaagtgtccgtggggagttggtttcgatgatcgacggcagcaccgtgctcttactcgcagaagtcgtcgtcgtggcgctggtcgtggttgccttcgtggctgcgaggaagtacagcaccacaaagcccgaccccgctaaggtgttcaccaagttccagtgcaagccgacgcagggacctacactgagcatcgttgtgccgtgctacaacgaagaggaacgactcccgcccatgctgcagcagaccctcgacttctgtctggatgccaagaagcgttgcgtggatgatgccacctcccgcgcggaaggcctcttcgcggacttcgagatcgttgtcgttgacgattgcagccgtgacaagaccgccgatgtggtcaccaagttcgcgaaggaccacccggaagccatcatcaagctggttcgtgtcaatccgaaccgcggcaagggcttcgctgttcgccgcggctttttcgaagccagtggcgactacgtcttgatggccgacggcgacaacgcgactcagatctctgacgtgacgaagctttttaaggcgctgcgcaaaccgttgtcgtcctcggggcaacctgcgagcaacatgccgccggtgatcgcgattggatcacgcgcgcatcttgaagagaaagctatcgcccgccgaactttcttccgcacggttctgatgaaggtgttccatttcgtcgtctccgtgacatacttcttcggcactcggggatcgctctgcaagcttcgcgacacgcagtgcggcttcaagctcttcgaccgccgagtcaccgagatcctcttcttgaacaaccgcctggagcgctgggcgttcgatgtggagatccttctcacggcgcgccgtcgcggcctcaaggtggcggaggtgccagtgcggtgggaggagatccccggtagcaaggtgcgcctgcgcggcatggtgcagatggggctggagtgccttttgatgtgcttcacgtacagcctcggcgtgtggagcatcgtgaagcctccgagtaagcctaagtcatcgtcgtcgtcgtgattcgcgagtgtccatgtgctcgaaagggg

SEQ ID NO: 2296 - DNA, 1188 bp, Oryza sativa
  ref <308>: DATABASE ACCESSION NUMBER: AK060148
  ref <309>: DATABASE ENTRY DATE: 2001-12-06
ctcgtctcctcgcgtgttcgcccgccgccctgcgccgaccagcgcagccgcagcggcgccggcgtcctgctgcttccgcccgcatcctcgccggtaagaggcagaatcacttcgttaggcaaggatgagcaaaggcccagctccgttcctcaacattgggaagagagcaaaagatcttttgtacaaggactacaattttgaccaaaagttttctttaacgacaactagcaattctggtttgggtctaacagccaccggtgtgaagatagacgaactcttcatcggtgacatacagacacaacataaaagtggcaaaaccactgttgatgtcaagattgatagtgaatctagagtgtcaaccacagtcactgttgatgaagcccttactggtctgaagacttcttttagcttcagggttcctgatcaaaagtccgggaagcttgatttgcaataccttcatgaccattttgcactgaattctaccattggtttgacatcaacgcctttaattgagctggcagcaactatcggcacgaatgaacttagtgctggtgctgaggttggattcgacagcacttcagcttctgttactaagtacaactcagggatctgctataacaaacatgatttttctgctgccgtactattggctgataaaggggagactttaaaagcttcttatatccacacgttcaatgaaaccaatggagctacagtggcggctgaagtaacgcacaagttaaaaacaaaagagaactatttcaccatcgggagctctcatgctattgattcttcgacgttgctgaagacaagatttagcaatggtggcaaagttggagttctctgtcagcatgagtggaggcccaagtctactgtaagtatttctgccgagtatgatcccaaagtggtgagttcgccttcaagattcggcgtggccatagccttgaagccttgattatcacctcctgtacaagtgttagatacttcttgcccgtgtgcatcctagccatacttacgaaagctccaccattttatgcccgttttgtaagtgtcttggccgaagaaacgttgttgtcttggagttggtcttagttttgtggaaccctaccaccagccgacttcatcccgagaattgaaaatacagagagttttgtactggaaacaatagatttactgttttgctgcttc

SEQ ID NO: 2297 - DNA, 1030 bp, Oryza sativa
  ref <308>: DATABASE ACCESSION NUMBER: AK104262
  ref <309>: DATABASE ENTRY DATE: 2002-08-28
atccatctctacacatcagcaatatttagctacacagagctagctaggattagctcagcaatggcaggtgctcctcgaggactagttctcctcggcgtttgtgccgtcttgatggcggtcgccgtcggcggtgaggcggcgtcggttgtcgtcggcacggccaagtgcgccgactgcacccggaagaacatgaaagctgaggatgctttcaagaacctccaagtggcgatcaagtgcaagaacaccaacggtgagtacgagagcaaggctgccggaaagctcgatggcaccggcgctttcagcgtccccctcgacgccgaccttgacagctccgactgcatcgctcagctccacagcgccaacaacgagccatgccctggtcaggagccatccaagatcgtgccaatgtcggagggcacctttgtcgccattgccggcaagacacactacccatcagcgttgtgcgcgtcagcgaccatctgcggtcccatcaagaagaagatcatagaccacttccacaagaagccggtgccacccaagccggagccgaagccggagccacccaagccgaagcctgagccggaacaccccttcctcgaccatatccacaagaaggagaagcacttcttcgaccacttccacaagaagccagtgccacctaagccagagccgaagccagagcccaagccagagcccaagccgcagcctgcgccggagtaccacaacccgagccctccggcaaagaactgatgaatatgatccgcactggacgtttgatcatgccgtcctgccccctgtcagattgtctgcataataacagtttgagatcgaagtcatgcattagctttcatcgacaggagttttaatttgtacttgtatctatttcttctctatcaaatgcagttatatatggtaagataatttatttatatttaatcagtactgttgtggcggactattcactgtatcagccaaagccattggatcgtaagaggttagcattggttaaagaaaaagttatttttatctg

SEQ ID NO: 2298 - DNA, 1056 bp, Oryza sativa
  ref <308>: DATABASE ACCESSION NUMBER: AK060149
  ref <309>: DATABASE ENTRY DATE: 2001-12-06
gtgctcagtttcactcttatcagtgaattagatcatatacttgtgtccttgatagctcgttaattagcatggctaggtcactcgctgctgtcctactccttttggtcgccgccgcgggagccagccatgccgcgtcgccggcggagatgtactggaagatcgcgctcccgacctcgccgatgcccggcgccattcgcgacctcatcagcccagcgagctcagtgggctcagcttcgaaggaggacacggtgggcaacgtgttcttcctcgagaaggacctcttcccgggctccaagatgacgctccacttcacccgcgccaccgccggcgccgcgctgctcccccgcggccgcgccgagtccgtcccgttcgcctccgaaaggctcccggagatcctctcccagctctccatcccggccgtctcgccgaccgccgacgccatgtggtccacgctcgccgagtgcgaggccgcgcggctcgccggcgagacgaccaagcacaagcactactgcgccacgtcgctcgagtccatggtcgagttcgtcgcgtccagcctcggcacccgcgacgtccacgccgtgtccacggaggtgatcagcacgttgacgccgacgccgaggcaggcgtacagggtggaggccgtgaggcccgtggcggtgcccggcggcgacatggtggcatgccacgggatgccgtacgcgtacgccgtgttcgggttgcacgggctcaagggcgcaggcggtggccgcgtgccacggggacgtggacgggcacggcgcggtggcggaggcatacaagaggctcggcgtggcgcccgggagcgtggccatctgccacttcctgcctcaggacgacatgatctgggtgcgcaactgaattaatgaagcagctaccttgcgcgccatccatggctaattattttagacatgctccttcctatattttggatctacctgccggctatcatgttatcataaatttacgcgtgtgcgcgcgacgatccgacatgcccacactaacgtgttttactttgttaattaataagtctgcataccc

SEQ ID NO: 2299 - DNA, 1181 bp, Oryza sativa
  ref <308>: DATABASE ACCESSION NUMBER: AK060150
  ref <309>: DATABASE ENTRY DATE: 2001-12-06
catcaatctgattcttttcattgggaaagttcttgcatcagttgaaagtttatcgatggcagtaatagcatcgacactggactccctactggatcttttgtcaggtttcatactctggtttactgcacatgctatgaaaaagcccaacaagtatagctatccaattgggaagagacgaatgcagccagtgggcataatagtatttgcatctgtaatgggtacacttggcttccaagtgctaattgaatccgggcgtcagcttatcacaaatgagcaccaagtgttcgaccacaggaaggagctgtggatgatcggcagcatgtcctcagtcgcagtggtgaagttcttcctgatgctctactgccggtcgttcaagaacgagatcgtgagagcctacgcgcaggaccatttcttcgacgtgatcaccaactcggtcggcctcgtcagcgcgctcctcgccgtccggtacaaatggtggatggatccggtcggagccatactgatcgcggtgtacacgatcacgacgtgggctcggacggtggtggagaacgtggggacgctgatcggcaggtcggcgccggcggagtacctgacgaagctgacgtacctgatatggaaccaccacgaggagatccggcacatcgacacggtgagggcctacaccttcgggactcactacttcgtggaggtggacatcgtcctccccggcgacatgccgctcagccacgcgcacgacatcggggagtcgctccaggagaagctggagcaactccccgaagtcgagcgcgcctttgtgcacgtcgacttcgagttcacccatcgccccgagcacaaggccgaggtctgaattctcatttatgcaaattttctcttcacttcacttcacttctgtttctgtttggcttgtacaagtcatcgtttccctgtgaaacccacaaggatgtcagttttactaccactgtctctgtagtctttaagtagctgtgggtgaaactgaattcttgttgttcttgttttattgagaagagaaaactgatcgaattcttctagtggattatatacgctgtcttttgctggaaaatggccaaaatggctgggcatgtgtacatgttgtacccatctgaattgtcatatctgtgatcagaagtactactatatatatatttccatttccggtggtc

SEQ ID NO: 2300 - DNA, 1114 bp, Oryza sativa
  ref <308>: DATABASE ACCESSION NUMBER: AK104263
  ref <309>: DATABASE ENTRY DATE: 2002-08-28
atcgcagcggcgatttctcatctgaattgcaggccaattccagttgagtttctccacagaccacagatatggcttccggcaggatagctctgctctgccttcttggcttgctgctggtagcagcctcaccggctgccattgctgccaaagatgacaaaatcttctaccagattactttcatgtggccgggagcgtactgcgcgcagacgaaggccggatgctgcatgccgaagaccgacgtcgcgccggcgtccgacttctacgtcgccggcttcacggtctacaacgccaccaccaactcttccctgtccagctgcagcaacactccattcgacatgaaccaaattggggatgtcacgaggctgatgcagtactggaacaacatcaggtgccccagcaagagcggccagaagggctggaagaacgcgtgggagacgtccggcgtctgctccgacctcaccgagagcgcctactttgacaccgccctcgccctccgcgacaagatcaaccccctttctcgcctcgtcagcaacggtattaagccggactttgggctgtacagcgtgaagaagatcaaggaggtgatcgaggaggggatcggcgcgccggcgctgatccagtgcagcaagggcccgttcaacaagttccagctataccagatatacgtctgcgtcgcggaggacgccaagacgttcgtggagtgccccagcccgaggaagccgtacacctgcggcgacgacatcctcttccaccctttcaagaagtggatgctcaagaccaactccaccaaatcctacgccgccgccgacgccatcgaccagctgctcgaagcggtcatggaaatctgagctcgatcgatcgatcgatcaagaagacaaattaacccttgttgtgatatgcgatttgtgcgtgtgtgttgtctgtttcgatcgtgatgttttctgcgtgtttatttcgtgatgttctctcatcgcgcccgcgcgcggttgggtacgatccgggacacctacgtagcactgaatccgtctctgtgatgcattcagagaataagtccgaatatgtgcggccttgttaatgttttcatgaataactcgtgtagtgggattactttgtc

SEQ ID NO: 2301 - DNA, 1037 bp, Oryza sativa
  ref <308>: DATABASE ACCESSION NUMBER: AK104264
  ref <309>: DATABASE ENTRY DATE: 2002-08-28
acggtgcaaagtgtgcagcgaactcgataaacattaaacaagctgtgtgaacttcttttttcgtgacaagtttaattctttctcgatcgatcgtcgtgatggctgacgagtacggccgcggcggctacggcaggtccggcgccggcgccggcgacgactacgagagcggcggctacaacaggtccagctccggcggcgccgacgagtacggccgccggccgggaggcggtgccggtggctacaacaagcccggtggcaccgacgactacgacagcggctacaacaagtccgccggcggcgacgacgacgactacggccgcaccggcggcggcgggtacaacaagtccggcaccgacgacgactacgacagcggctacaacaacaggtcaggggctaacgagaagtacggccgcaacaagtccggcgacgacgagtacagcggcggcggcggcgccgaagccgacgaggagtacgtcgacgggttgtcgtcccgggacgacccggagaagtacaggaaggaggagaaggagcacaagaacaaggagcgcctcggcgaggtgggcgccctcgccgccggcgccttcgccatgtacgagaggcaccaggcgaagaaggacccggagaacgcgcagcggcacaggatcgaggagggcgtggcggcggcggcggcgctggggagcggcgggttcgcgttccacgagcaccacgacaagaaggaggccaagcaggcggcgaaggacgccgaggaggaggcggaggaggagtccggctccggcgcccgcggcggcgaggggaagaagaagcaccacctcttcggctgatgatccatcgatcgatcgcgccatgcatgcggcggcggcggcgccatggccggcgtccgcgcgcacgcgtaaggtgtggccatgggcgtgtgcagctgaataagagccggggtttttgtacgtatgggctcagtatgtgtacacctcgtatatggtatggatgtacgtataagcgtatagtgtgtactataccaataaagctatctgttgctctgt

SEQ ID NO: 2302 - DNA, 999 bp, Oryza sativa
  ref <308>: DATABASE ACCESSION NUMBER: AK060151
  ref <309>: DATABASE ENTRY DATE: 2001-12-06
aggctttccgcattgcggcgcggcctcagcggcggccggcggcgtgggctccggcggctcgagctccggcagcgccggcggcggacggcttccttttggtcttgcgcgcgaaatcgaagccttcgtttgacgattccttcccaaagctaagcccctaccaaatggagaagttcctcgtggcggcgcctccaccttccggcgatgctccggcggcaccggttcctccgagacggcaccggtggagccgcgtcgccgccgagctggacggccgcatcgacgctaggtttcggcaccgggagtccgttcgcctgcgcgattcgttctccgaggtgacagaaatctcggaaaagagcatttgctttgtttccgtgttggttattacgaagttgttttcactactgggattactgcatatgagttagacactggaactggaattctctagagcggctaacgacatatttacttttttgtttctttttagtaatgctaatcataggttgtagattccaatagcaaagctgctcccttatgtttcttctgttgcaataagctggtagaagtgctagaacttgcgaagtagcacttataggatgtcattggtcgccctgatctctttccggttgctcaatgttctttcctgagctggtggtcaggcatcaggaaaggggtccctaacagcttaggcgcgggttcgataccgtcgtcgtgctcgctgcctagtccatctggaaggaaaggaacaacagggtgttctatcagcagcagcactcgtggccggacgtagctagggcagcggcagaggaggctgccttgtggagatcggcaggtctgctcccggagttgacaatcagcattagggtcgcaaaatttatgccgggacatatcacctttgtaaccttctctttgtttcttttttctgtccgggttggtttgtaagttgttgactttattccctaatcgtaatacaaagatgcgcaaatattttgcgcattctcg

SEQ ID NO: 2303 - DNA, 1199 bp, Oryza sativa
  ref <308>: DATABASE ACCESSION NUMBER: AK060152
  ref <309>: DATABASE ENTRY DATE: 2001-12-06
gattcccctcctctccacgcctccgcggtgtccaaactccagactcccccaaaaaatcccccaaaaccgaagggaaagaggaaaaaaattactcttcgctctcgcgtcgcgcacgacacgaccgagccagcaaagccgcccatccaccatcccgccgctcctgcaatctacagccgcgtcgccgcttgtccgcctgcgctcgttctcgctagggttcggaagggggagggtggggatcgcccggcgatggactggagcgcggtgacggcggaggacctggtggacgcgctgcgggaggtggactggtcgacgccgccgcgccccgtgccggagttcttctcccgcttcaccgtcccccgctcctactccaagtggaccagccgcctcaagtgcaacctctactactacaggacaaattacttcatcttgatcatgttcatccttgggataggcttcatttggaagccggttgctatacttgcagcctttatgactggaatcagcattgcatttcttaatgacagctttgcagtcactttcaatgagaaagtcacgaggactgtcagacaattttcaccacatttagctgcaaaaatgaggccaccaataacccctgttcttcgtggtagaccaagttcaaagaggtcgattcatatttgtgggcgacctcgctggctatttgtgctgttattttctgcagttagttgcatgctctggttgacttcctgcagtctcctcacagttctatgggcccttttaattgctatctttgcaactctgcttcatgctagcttcagaacacctaatctgaaagcacgtctgaatacattcagagaagaattccgagctgtttggaggaattatagtgagctttaaggttcatgtggtaagaagtgcttagtgctgaaacttcgtgctgtttgtgaattgtgtttgtgggagataccaagatatgaacaatggtgacaggcagctgcgttctattgtgattacttgctcgttttggaggtgggccttgactgtctaagtacatgatgatgttacacttggtacgccaccttccaaatcactataattgttcacatggaattctccctaaccaagcattggaaaaagaacagcatgtaaaggatgtaaacaagtattctaatcaacacagcatatattgtttgttgaaatgtttgtttcatgtttccccc

SEQ ID NO: 2304 - DNA, 1271 bp, Oryza sativa
  ref <308>: DATABASE ACCESSION NUMBER: AK060153
  ref <309>: DATABASE ENTRY DATE: 2001-12-06
atccatcccgcgaggcgccgccgccgactccgcctccgcctccgcctccggcgatccccatccatcacgcgaggcgccgcctccgcctccggcgacccccatccatcacgcgaccgccgcttcgtcggcatcctcccaccgcatccatcctgaagaagatcatcgtcaaaacatgtcgctcatttcgaagctgcggttgatcactgtggatgtcaccggtactctgcttgcctacaaagggcagcttggtgattactactgtatggcagctaaggctgctgggaagccatgtcctgactaccagcgaatgcatgagggcttcaagcttgcatacaccgagatggcaaggcaatacccatgctttggatttgcagcgaagatgccgaatatcgactggtggaggatgtgcgtcaaggattcttttgttaaggctggttatgagtatgacgaggagacatttgagaagattttcaaacggatttactcttcttttggctcgtctgctccgtactcggtattccctgatgcgcagcccttcatgaggtggcttcgcgggaaggggctcacggttggaattgtcagcaacgcagaataccgttacaaagacgtcatcttgcctgctctaggactgaaccagggctccgagtgggactttggggtgttctctggaatagttggtgtggagaagccagatccaagtatctacaggattgcactggaaatggcgggcaaggtcgcgccagaagaggcgcttcacataggcgacagcatgcgcaaggactacacccctgcacggagcatcggaatgcacgcgctgcttctggaccgattcaagaccgccgatgctgagagctggaggaagtctggagcaactgtgctccctgacctggtagctgctcaggagtggctcagcaagaatctcaaggatgagccagtagcagctgaacaaaatgtctgaccttagaaaattcagttcccctgtcactgagctgaattccctcttgtttcctagttatgaaacgagggaggcaaaagaaatgtgccattgatgtatttgtattgtactgatggaataggttatgtgatggttcttggctgctggattatgtaagctgtttggtgttgaactgttgatgctgattgctgaatatgtcaagcaaatcagtgtggcagagcattgttgtagtctcccatgaactgtgtttcagcgaagaaaactagttttgtttggcatcttcgcctgtctgaagcaataaaagcagggcaatttc

SEQ ID NO: 2305 - DNA, 1203 bp, Oryza sativa
  ref <308>: DATABASE ACCESSION NUMBER: AK060154
  ref <309>: DATABASE ENTRY DATE: 2001-12-06
ccctccacatcgaatcaaatccatctcttttctccccttccttccttccgcctcgcctccccttcccctcctcgccgcctcgctcccctccgccgcgccgtcccgtcgaatcccgccatgccgaagggtgccaagaagcgcgccaagctcaagaagaagcagcagggggaccaccccgccggctccgatgacggcggcaacaacaacaacaacaaaaacaacgccgccgaaaacggcagcaatgactccagccgccgccgcgacgccgccagcgacggcaaccaccacctaccgtcgcgaccaaacgttcctcatgtggatgtgagtgaggactccatggagagctccgaggagatggtgacgccgagggccgccgcgtccgaggcggacgaggaggagaggaaggccgccacgtcggaggtgcccgtggaggtggtcgaggccggggaggaggtcatggtggacgccttgccgcccgaagccgccgcaggtgcgcaggagcaacagggtaaggcggaggcgcttgtggtggtgcaggaaccggaggtgaagcgcgaggagttggtggccaaggtgcatccgatgcatgacccggaaccgcagggcgaggaggtgctcatcgtggaggcggctgcggtatccgcggtgcaagaaccggaggtgaagcgcgatgaggtggtggtcatggagacggctgcgccgcctgcggtgcaggaatcggagacgaagagcggtggggtgttggtcaaggatgtggtggaggtgtcacggtctctgggtgcagctgatactacagaggtggcccggggacctgcagtggctgtggctgcagcagggcagcgggcaacatggtggaattgctgtggggtatttgatgcgttctctggttcggagagatagattaaggttggaacttggaagccaagaagacagtagacgcgaagttgttcaaagctgatggtaattgtaactagtctggtttatgctcatatgaatggagttgaagaatggataacatcgagctgatgtttctctctggcccatgtttctacaccgtgctgtgcaaagttacatccccttggttgtggttaatattctcgagtcgcgtagtactctgaaatctacacccttgtctattatcatctaggttatgttcatgtagcataagagttgagttgagtcgtcagcaaagaaattttgttc

SEQ ID NO: 2306 - DNA, 1014 bp, Oryza sativa
  ref <308>: DATABASE ACCESSION NUMBER: AK060155
  ref <309>: DATABASE ENTRY DATE: 2001-12-06
cgccaactacacgttcggcaccaaggagcccaagatggagaaggacacctccgtcgccgaccgcctcgcccgcatgaaggtcaactacatgaaagaaggaatgcggaccagtgttgaagcaatcctattggtgcaagaacacaaccatccccacatactgctgttgcaaattggtaatacattttgcaagcttcctggtggacgtttgaagcctggagaaaatgaaattgagggtctgaaaagaaagttatgcagtaagcttgcagtgaactcgccttcctttccacctaactggcaggttggagagtgtgttgctgtatggtggaggccaaactttgagactgtgatgtatccttactgccctccacatataaccaagcccaaggagtgcaagaagcttttcattgttcacctatctgaaagagagtattttgctgttccgaggaacctgaagctgcttgctgttccactgtttgaactctatgacaacgttcagcgatatgggccagtcatttccaccattccgcagcagctgtctaggttccagttcaacatggttagctcgtgaaggtgatgagagatggagattagtgtgcactaggctctatttgatgggatcttcaacgggctgaactacctaatcgacttggcatgactaatttgttctatcacagagaatttccatgaattagcttgggaaaaatattctggatccatcgttggactgttagctggacatgcatttcgactgtattttgttggattgttttgtatcacatcgcaaagctggtgcctggtgtatttttagatgatcttttgttggctctgcacgctaattgttggtgtacatggctctgtatgcttactgccttgatgttgtatgctgtagctgtaactcttcaggctgcctagcttttttttctagccaggaactccccctcttaactgtaaaaatgctttggatttaagacaacatagagaggattaagctttttacagtgttccatcacatgc

SEQ ID NO: 2307 - DNA, 1062 bp, Oryza sativa
  ref <308>: DATABASE ACCESSION NUMBER: AK060156
  ref <309>: DATABASE ENTRY DATE: 2001-12-06
attgcatcgcctccctccctcctcctccgtctccatccaacgccgacgactcgagcctcgacggcgacgaccccacaccggcggcggagatgaacgcgttccggctagccggggacatgacccacctcctcagcgtggtggtgctcctcctgaagatccacaccatcaagtcctgcgcaggcatatctctaaagacccaggagctatatgcacttgtgtttgctgctcgttacttggacctgttcattcattttatatctctgtataacactgtcatgaagttggtctttctggcaagttctttctcaatagtttggtacatgaggcggcataagattgtccgaagaacctatgacaaggatcatgacacctttcgtcatcacttcttagtgttgccatgtttggctctggccctccttattaatgagaggtttacttttagagaggttatgtgggcattctccatatatttagaagctgtagcaattctacctcaacttgtgttgctacagcgcacgaggaatattgacaacctgactggccaatatgtcttctttctaggtgcataccgtgtgctgtatatccttaactggatctaccgatacttcactgagccccatttcgttcattggataagctgggttgcgggcatcgtgcagactctcttgtatgctgacttcttctactattacataatgagctggaagaacaatgtgaagctggagctaccagcctgagctcatttttcatccaagatagactaggtaaaacttgttaaatagatagaaaggcatgatacaccaaggccactgctcctggttatgatatatgcatcttggtttcctgctctatcctcttgtttatttcttttcctatttgtcggatgagaggaaatccaagggtcaccttgtatcttgtaagacaattaagcacagagagatgagtaccaggacgttctgagttatgataggttttgagacacaatggaaatgctatcttttagtgtacaacgtggtatgatccttcagcttggaagaataaagtattctgtgttctgtcttc

SEQ ID NO: 2308 - DNA, 884 bp, Oryza sativa
  ref <308>: DATABASE ACCESSION NUMBER: AK104265
  ref <309>: DATABASE ENTRY DATE: 2002-08-28
gagaaaccaaagctccagcaatcggcggcggcggcggcggcccgtgagaggcggtccggcgacgatggttcacgtcagcttctaccgcaactatggtaagacattcaagaagccacgtcgcccttacgagaaggagcgtcttgatgcagagctgaagctagtgggtgagtatggactgaggtgcaagcgtgagctgtggcgtgttcagtatgctttgagccgtatccgtaacaatgcaaggcatctgctcacacttgatgagaagaatccacgccgcatctttgagggtgaggcactgcttcgccgcatgaaccgttatgggctccttgctgatgggcagaacaagcttgattatgtccttgccctcactgttgagaacttcctcgcaaggcgtcttcagactcttgtcttcaaggctggcatggccaagtccatccaccatgctcgtgtcctgatcaggcaacgccacatcagggtcggcaggcaaattgtcaacatcccgtcgttcatggtgagggttgagtctgagaagcacattgacttctcactgacaagcccattcggtggaggcccccctggtagggtgaagaggaagaaccagaagaaggcaagtggcggtggcggtgacggtgaggaggaagatgaggaatgagaacagaagtttgcaactagttgtttccgtaatgatcataaaactctgtgctgagtaactaggcccaaattctgtagcttgcctatctgggattcagaattcaagcaggttgtgcttcaggtgttggtttatgttaaccctttttggcattatgttaggtatagacttgtggttaatgctgttttatggattcgtttcatggtaatcctcatcgtaccagtgcgcttgaact

SEQ ID NO: 2309 - DNA, 999 bp, Oryza sativa
  ref <308>: DATABASE ACCESSION NUMBER: AK060157
  ref <309>: DATABASE ENTRY DATE: 2001-12-06
ctctgctatctgctgctgctgctgaaaaattctctcgaatcgatcgcccgatggtggtggccatcgctaccgaagcgtgggcgctcgccggatgcggcgcggcggccaagtcggcggccgcggcggcgcaggaggcgccggtgcagctgcagcagcatagtctttctgcagccagggccaagaaaccgatttcgttcagagcggtggcggcggcggcggtcagtagccaatgccaccaagaacggcgcgccgtcgtcgtcgggagacgcagcggcatggcgtcctgcctgctcgccgccgtcgctgcctccctctccggcgccggtgaagcgcgggccgcggtcctggaggccgacgacgacatcgagctcctggagcgcgtcaaggaggacaggaagaagcggctccagaagcagggcgtcatcagctcctctggcaccgagacagggtacttgcaggatctcatctacaagctgagcaaggtagggcaagccattgacaagaatgacctccctgctgcaagcagtgtcctaggcccaaactctgacgctcagtgggttcagaacatcaatgtagctttcaccaagtttagctctagcccagaggagaagaacatggtcgatagcttcaattcctccttggcctccttgattacatctgtgaacaagagtgatgttgattcatccaagtcggcgtttgtgtcgtcagccacaacgctggagaaatggatagcttcagccggtttgagtggtcagctcaaaggattctaaatttctgacgccaattgaatctgaatcgcctgacaagtacatgatcggagtagcatttccttgaagcaatggtctatatataatgcgtcaataccagtaagaatgttttgtccaagaaaaagaatttgaagatatggattcggctgctgtgaatcttcgaagagggtattgtaactgaatcttcagttcagacagaatatgtgataatagccatggctctgttttttct

SEQ ID NO: 2310 - DNA, 1155 bp, Oryza sativa
  ref <308>: DATABASE ACCESSION NUMBER: AK060158
  ref <309>: DATABASE ENTRY DATE: 2001-12-06
acagttacctctcacctcggcggcgggcggcggccggcggcgaggtccggacagcggagggagcaagcggggaggacgaggcatggggaccctggggcgggcgatctacacggcggggaagtggatccgcggcacggggcaggccatggaccgcctcggatccaccatccagggcggcctccgcgtcgacgagcagctgccaaggcatcgcacaatcatgaacatatttgagaaagagcccagaatccacaaggatgtttttgttgctcccagtgcagctgtgattggtgatattgagattggacatggatcctcaatctggtatggctccattttaagaggtgatgtcaacagcattcatattggagttggaacaaatatacaagacaattcccttgtacatgtttcaaaagctaatatcagtgggaaggttctcccaaccataattggaaacagtgttacaataggtcacagtgctgttctacacgcatgcatcgtcgaggatgaagcttttgttggtatgggtgccactctgcttgatggagtggtggttgaaaagcacagcatggttggtgcaggatcccttgtaaagcaaaacaccaggattccttctggagaggtctgggttggtaatcctgccaagttcctaagaaagcttactgaagaggagatggcgttcattgcacagtcagcaacaaactatatcaatttggctcaagtccacgcagccgagaatgccaagaccttcgatgagattgagctcgagaagatgctgaggaagaagtttgcgcacaaagacgaggagtacgattcgatgctcggcgtggtccgtgagatcccaccagagcttatcctcccggacagtatcctcccaaacaaggctcaaaaagctgttgctcactgagtgttttcttaaagctcccgcttgggaagctttgctgttattacatgttgacttgtttatgacagttttgtctgtccgtagaggaaaaggaagtcaattggttcccctgcttttgacttgcttgcttgatagatgtgaagttcaagttatttgatactaaatagctgtagtgtgaaaaagtcagtgagctcagaaagtagaaattttgaggattttcgtgggtgcagaactaatttatgcaaaattcctgt

SEQ ID NO: 2311 - DNA, 1020 bp, Oryza sativa
  ref <308>: DATABASE ACCESSION NUMBER: AK104266
  ref <309>: DATABASE ENTRY DATE: 2002-08-28
gcaaatacgacgcgttcccaaatcccccaatccgatctgcctttcctcttcctcctcgtcaaaccctagccaaatccacgatcggggctagctcgtcggcggcggcgatggggaacccggagaagctgatgacccagatcttcgacctcaagttcacctccaagtcgctgcagcggcaggcgcgcaagtgcgagaaggaggagaaggagcagaagctcaaggtgaagaaggcgatcgagaaggggaacatggacggcgcgcggatctacgccgagaacgccatccgcaagcgcaccgagcacatgaactacctccgcctcgcctcccgcctcgacgccgtcgtcgcgcgcctcgacacccaggcgaagatgcaggtcatcggcaagtccatggccaacatcgtcaagtcgctcgactccgcgctcgccacggggaacctgcagaagatgtccgagaccatggacaacttcgagcgccagttcgtcaacatggaggtccaggccgagttcatggagggcgccatggccggctccacctcgctctccacgcccgagaccgaggtcaacagcctcatgcagcaagtcgccgacgactacggccttgaggtctccgttgggttgccgcaggccgccgctcacgccataccagctgccaaggagaaggagaaggctgttgatgaagacgacctctcccgccgcctggctgagcttaaggcccgcggctgagggatttcacttcagatatgattctcaagctgctatgagccattgtcacgtcaaaggctactcatatttgttagattcgtaaatactgttatgctaaaatgcgtgtgttgatatcccatatgggatctgtggacttcattaaaaccttgctgtgtgatacaaatccataatatgtgagcttgagaacgtctctgtgtcgctgtatcctaagcctgcccgtttgaacagaaatgttgaagttgtccatcttttcacgggatgttttccttgctttaatgccatgaacaaattcggt

SEQ ID NO: 2312 - DNA, 1107 bp, Oryza sativa
  ref <308>: DATABASE ACCESSION NUMBER: AK060159
  ref <309>: DATABASE ENTRY DATE: 2001-12-06
acttctgctcattccgaagccttcgccgcgtctcgccggcgtacgccgcaggcgccccacctcctccggcgagccagctcggagctagacgcctgccctccccactctcgccggcggtgggcgcgcgggtggagcccctgcgttggccggacggcgggaggagatgacggtggcggcggggttagggtacgcgctggtcgcgctgggccccgccttctccctcttcgccggcgtcgtcgccaggaagcccttcctcgtcctcacccttctcaccagcactttattctggcttataagtttgataattctctcgggaatatggagggtatttctccctataagatcaggagcttggtggccgtatgcaattcttatccttacatctgttgcatttcaagaaggcattcgtcttgtcttttggaggctttacaagaaaatggaagagatgctggattcctttgctgatagaatatctaaaccgcgcctctgtttgacagacaagatgctaatatcgttggctggtggtttaggccatggagtggctcatgccgtctttttctgcctcagccttttaactccagcattcggcagagctacattttatgttgaaaagtgctcaaggatgccatttttccttgtgtcagccattatttctcttggattcttggtcatccacacattctcaatgattattgcttttaatgggtacgacgagagaaagagaagtgatcaagtatttgtcccagttgttcatctgattgcttctgtaatgacactaatcaatcttgcacctgggggctgcgtaattggtacaccactattatgcgtcatgggtgcagtgacgttgcaatactgctggcaaatggtatggcggagattatctgagcagcagcatcggcagtttagcagctagtgcctggcaatgctccttacatgtatcttctcatgtccaattttaataatcttttgtttggggtactagggcaagaagttgtaaacgtagcgaattagcgattataccactagtgggattcacatcttatgaaaattgcatgcaattcaacgtcatgactgagacattgaagcccatctgtttggttgctcatg

SEQ ID NO: 2313 - DNA, 1032 bp, Oryza sativa
  ref <308>: DATABASE ACCESSION NUMBER: AK060160
  ref <309>: DATABASE ENTRY DATE: 2001-12-06
agttctgaatctccctcggcgccgccagcccatgtcgatcgctcgaagccgcttgatcgctgctcgtctcgctccccgcacttccgtcgtccccgtacgcttcgcctcggcacgtgcgtttcgccacgccgctgcccctctcgctgcgccgcatcccaccgccgcacctgtcgccgcgctcgcgcttgctctctccggatccatcgcacttaccgccgccaccaagaagaagatgaccgactcccccgtcgctgtgctcgcggaagagcatttccaggacaagtcgtatgatcgcaccaagctgtatgaggacctcaaggccgcccacgccgcggacccagaggacgttggtgtgatgtggcgcctggcgcgcgcggcctacgatgtgtcaaacctcaagaagacgcccgccgatgaaaccaagcgcctcatctactctgcctatgaggtcatccagcaggcgctcgccaagacggaggaaatcgccgaggtgcataactggtacggcattatcctctcgcgcattggcgactttgaaggcacgaaggtcgcgattgccaactcgtacaagatcaagagccactgggaaaaggccattgagctcaagccgtcttttcccacgacgtaccacttgctcggccgctggtgcatgacgatctcagatctctcgtggcttgagcgaaaggccgcggctgtgctcttcggctcgccgcccgagtcgtcgtacgacgaagcgctcaagtttctgctcaagtgcgacgagcttgacccgggctcgtggaagaaaaacaccatgttgatcgcgcaggtctactacaagcaacgtaactgggcggtcgccaaggaatggaccgaaaagacgctcgccgcgcccattcagaccgaggaggaccagaccgtccatgaagaagccacggcgttgctcaagaagttttaggtgcacgtcgtgatgccacaccttgagggacaacggtgcgggtcagaccatgcgctttaactcatcccaatcatctccatacataatctgctcgc

SEQ ID NO: 2314 - DNA, 1037 bp, Oryza sativa
  ref <308>: DATABASE ACCESSION NUMBER: AK060161
  ref <309>: DATABASE ENTRY DATE: 2001-12-06
catgtaatgcctaataccgaccgagcttttaagttaaactgggcatcatatagcatgggagaaaagcgcgccgaacttgcttctgatcactcaatatttgttggtgatctggctgttgatgttacggatgaaatgttgatggatctttttgccaaaaaataccgatctgtgaaaggagctaaagttattattgatgcaaacaccggacgttctaggggctacggctttgttaggtttggagatgataacgacaaaactcatgcgatgactgaaatgaatggtgcatattgctctacccggccaattcgtataggacctgcaacacctagaagatcttcaggtgattctggctcctcgccaccaaggcagtcagatagtgactcaactaacaggacgatatatgttggcgggcttgatcccaacgctactgaagatgaactaaggaaagcatttgctaagtatggtgatcttgcctctgttaaaattcctgttggcaaacagtgtggttttgttcaatttgtcaacagacctgatgcagaagaagcactgcaagggttgaatggatcaacaattggaaagcaggcagtgcgtctttcctggggccgcagtccagcaagcaaacagtctaggggtgattccggccaccggcgcaatggcatgtactacggtacacctttctacggtggatatggctatgcgtcgccacttccacacccaaacatgtatgcagcagcatatggagcctacccttactacggtaaccagcagcttgtgagttgatgagaggcttctctcttgtttcctccaatggaaaacgaggttttggtccagtaagcatagtagcgtgtgatgagatatttatagatggccataaagaagttggtgagacagcaggtattacctgaaatggtacctgcagatttgtgtcagtgagtaccgagtagaacctaaaaagcttgtagacaaaataagagttgttcttattctttcaagaaattttgactcgctaataaaactgagctatgtgatgtgcgact

SEQ ID NO: 2315 - DNA, 1040 bp, Oryza sativa; identical to SEQ ID NO: 2267
  ref <308>: DATABASE ACCESSION NUMBER: AK104267
  ref <309>: DATABASE ENTRY DATE: 2002-08-28

SEQ ID NO: 2316 - DNA, 983 bp, Oryza sativa
  ref <308>: DATABASE ACCESSION NUMBER: AK060162
  ref <309>: DATABASE ENTRY DATE: 2001-12-06
gcagcactcctttttgttactccaagctttttcctgtagttttcttctcctctctccacattgccaccaccaaatcagctgagatctcacttttgattcggggactgtctttaagtagaggcagccaagctgagatatcctcctgtgtgttctcccgttcttggcattcggcaataggtcccatgaagccatgattccatcaggagaggcacatcaagacggttgctagtttctgcattcaattcagggaggacaatttgcagggtgccggtgctaatctgaactctgaagggaggagacgtgctggttgcaacctgcaagaggccaagaagcggccgaggcaggcagcaatgagcgggaggtcgaggccgtggccaggggacccgtcgccggcgcctccgcagccgccggtcgtcgccgcagcggcggacgcgggcggcgaggcgtcgacgtcgctcagggacttcggcacgtcgatggacgccatctcgttcgggttcgcggccaccgccatcctcgtctccatgttcctcctcatggccatcttcgagcacctcatcaagccccacgtcttcccgcccctcgccagcgcggcgctccgccccgcgcgccgccgccacggcgtctctcccgccggcaagctccggagccctcccatggtggagacggtgctgcaggcggcggacctgtcggtgttgatgccggggcaacggtacccgacgtacctggcgcagccggcgccgcttccgccggcgccgtgcccgagggaaggggtgcactggccgccgcacgaccacgacgtccaccactcctacatgccgccatgatcgagatctcgcgtacaatgttgcagtggaacaacatgttagagacacacgctgtcaaaccaaccaaccgaccgatcgatcgatggatcgaatcctgttgctgattgaattgctgtatagcggagacgctgtaaataataaacgcaggggagagtg

SEQ ID NO: 2317 - DNA, 990 bp, Oryza sativa
  ref <308>: DATABASE ACCESSION NUMBER: AK060163
  ref <309>: DATABASE ENTRY DATE: 2001-12-06
atgcatttcatcgaacaccttgcgatcaccctctcaccaccgctagagatcaccattgtgaggctccccggccggagctggaggttggacggagtggaggaagagccgtgctgccgccgtcgccatgggggaagccgggtagccgctggacatccagaaacgccgtcgagcaccttacgtcgccgccgtctgcccctgtcctgcaccgcgtcgagctccacttcgccgcgtttcgccatctcgccgtctcgcgttgacaatcgaaaaccatttgcaatggtgcccggaattcctcaatgttgtcaacctgactcttggtcaatggtgcctggattcaaacttctatgccctaattgtcttccttcagaactcacctagactacagaagctaactctgaaactcgaaaagagtaatatgagaataagtcgaagaatcattggcgagcttacggaaatatcgtttacatgcgagcaccttaatactgttgaagtgatatgctcggagaatgatccccaggtcatcactgtgcaagatttctttgttagcagtggcatgacctctgttcagtttcatatcaaacactggagcccgtacgcgaatgacctaccggcatttattcggtcgatatgaaatggcaaaggatcacgaattagtttgccatcccattgaagaaaatcactctctttcgcctgtcggctacatctgctggttacagtagagtgttcagtgatcttgtttggtgctttctgctatgacgtgaaggtgagtagaaacaattgcatcttgccttgcatgtaaggtcagtggtattgtacttgtttgctgcgatcacatgatgatttgtagcaataatgatgctccaagaaaaatactgtatggctatggcgtctcctgatacagcctgccactgctttctcaacttggctggtctccggtgaaacgtattgtatttgtctctctcctaatataatcccatgttatagtgttgt

SEQ ID NO: 2318 - DNA, 986 bp, Oryza sativa
  ref <308>: DATABASE ACCESSION NUMBER: AK104268
  ref <309>: DATABASE ENTRY DATE: 2002-08-28
atcctctctcgccatgacaacaatgtcgtcgaggctcgcatctcgcgccgcccgcttagctgcggtggcggcatctcgcgccgcccgcttagctgcggcgtccgcatctcgtaccggggccggggacccctcagcgcgggccaccgccactgccgcatctcgcgccgctcgcttagctgcggcggccgcatctcatgccggaggccccacagcgcgcgcgattgcggctgccgtatctcgcgccgcccgctcaatctcctcgaagctccttgacgacgacatcgctgcccgcctctccttccgctacagcaccgagcccccagatgatggtaagtgcgttacagccaaggacctcgagtcagatcaagccgtatgggccttatatgagcgctggtgcaagtcatacaacaagaagcgtgaccatgctgagatgattcgccggttcgacatattcaagctgaaagcatcgcttgtgcacagctggaacaattatgttcatgaagacaaagaggaattagctcgtgcaaaaaaagagaagggatttaggcaaacctgtcgatccttggtacctacaagaggaattaggcccatccgccgatgggggagacactgttaaccaatactggcggggcatgttgaaggaaaatgaccaagggatggatctgcctgacatccaaggaggaaaaaaaatgagcactgaagattgaacatgttacataagagcgatttaatttgcttatggaaatcccttaccctcaaggagttgaacttagctccccatataaatcaactgtaataataagttatgatttgccgttccatgtgtagtctatgcttatgtcgtaccatcttatctaagtggtcatgaattccatatgcttccgcctgtgggaagtttgtgtattttagccttttgggtttacgggcacaagtgttcaaacagatcaagatcaagtgtgaagatggtatatatgtcagttgtttgt

SEQ ID NO: 2319 - DNA, 1015 bp, Oryza sativa
  ref <308>: DATABASE ACCESSION NUMBER: AK060164
  ref <309>: DATABASE ENTRY DATE: 2001-12-06
gaagagggggactcgatagaccatgacgacacccggatcctgcccctcgtccacatccgccgcccactctcccgtctgcctcgccccctccgccgccgcaggggaatcccaagagatggtgcggccgcgcatggtgctgttcggcgactccatcacggagcagtccttccgccccggcggctggggcgccgccctcgccgacacctactcccgcaaggctgatgtagttgttagaggctacggagggtacaacacaagatgggctctattcttgctacatcaaatctttcccctggttggaatagtgcctcctcttgcgacaactgtattcttcggtgcaaatgatgcagcccttttgggacgaacaggcgagcgacagcatgttcccgttgcagagtataaagaaaatctcaaaaagattgttaatcatttgaaggattgttccaagtccatgttaattgtactaatcactccgcctcctattgatgaagatggaagggaaagatttgcacgatcactctatggagaagaagctaggaagctccctgaaaggacaaacgaaatggctggtgtgtatgcaagtcagtgcatagagctagccagagaaatgaatatacactgcattgatatttggtcaaagatgcaagagaccgcaggatggcagaaactttacttgagcgatggactgcacctgacgccagaaggaaatgctgttgtccacaaggaagttgtccaaacgttgagaagtgtgggtctgaaagcagaagaaatgccatatgatttccctcaccattccagaattgatggtagttgcccagaaaaagccttccagtgaagtgtgatgccttgaatagcttgtggtgcggttcatctggagatctcttttcctctttgaattaggagaaagatcaaattaaagacaatgttttactgcttctatcatgagcttttggagtgaggaatttagcacccatttttactctggaagaaataaagttctcttcttgaaactgag

SEQ ID NO: 2320 - DNA, 1088 bp, Oryza sativa
  ref <308>: DATABASE ACCESSION NUMBER: AK060165
  ref <309>: DATABASE ENTRY DATE: 2001-12-06
gatattctacaacgagtcggaggcccgcaagtacaccacctcctctcgcatcatcgaaatccagtcgaggattaccgagagggcgctcgagttgcttgcgctacccaacgatggcgtccccaagttgcttctcgacatcgggtgcggttctggacttagtggcgagacattgacagagcagggccatcactggattggttatgatatttcgaagtccatgcttgatgttgctctggagcgtgaagcggagggtgatctccttcttgcagatatgggccagggtttaggcttgcggcctggagttattgatggagcaatcagtatttcagcagttcagtggttatgcaatgctgacaagtcttgtcacaacccaagattgcggttaaaggctttctttggatcattatatagatgcctagcaaggggagcaagagccgttttgcaattttatgctgataatgtgaagcagagtgaaatgatcgtgactgctgccatgcgtgctggatttgcaggtggagtggttgttgactggcctcacagttcaaaagcaaagaaatcctaccttgtcctcacttgtggaccaccttctctaaattcatcgcttccgaagggtaaaggtcaagatggtgccatgtgtagtgatgatgatgagagcgatgatggaagtggtgatgaagatggagcccaaacagtcggcatatatgaaagaaataggccaaagaagaggcagaagacgaagaagaacggcaagggcaaggcttggctcttgaacaaaaaggagcagctgagaaggcgaggacgggaggtgcccgcggacaccaaatacacagggcggaagcggaaaagctacttctagtttcaaatgattcttggaatgcctgtgcaccattttgccgtttgtcatactagtagctcattattagtagtacgagaaaggttcagttgaagagttgggtgaatgcgctctctctctctacaccatagagccgttcatgttctgtaaccttctagcaattctgagttttgacaaatgctgtgcaaatctatgtcctacttttgaaggatccagtattgtatgtttgttgctt

SEQ ID NO: 2321 - DNA, 1107 bp, Oryza sativa
  ref <308>: DATABASE ACCESSION NUMBER: AK060166
  ref <309>: DATABASE ENTRY DATE: 2001-12-06
gagttggcaactttgcttggctctgcacggaccaacgccgacgacgaccgccggagccgccgcatctagctcgccgccccgccatgcagccgctgctcaaggtgtacgccgaccgccggtcgcagcccagccgggccataatcatcttctgcagagtgaaccggatcgatttcgaggaggtcacggtggatctgttcaagcgcgagcacctgtcccctgaattcaagaagataaacccaatgggacaggtgccagcaatcgttgatgggcgattcagattgtttgagagccatgccattctgaggtatcttgcaacggtgttccctggagttgcagatcactggtatcctgcagacctgttcaccagagccaaacttgaggccatcttggattggcatcattcaaatttgcgtcgtggtgcagcaaccttcatactgaacaccgtgttggctccttctcttggacttccgtcaagccctcaggctgcaaaagaggcagagaaagtactgttccggtccctgggactgattgaatctatgtggctcaaaggcaacgcaaagttcttactgggcaatcctcagctatcaatcgcagatcttagccttgtttgtgaaataatgcaattggaggtcctcggtgatagtgaacgcgaccggattcttggacctcatgagaaaatccgcagttgggttcagaatgtgaagaaagccacaagccctcattttgatgaagtccatgagctcattttcaagatgaaggaacgtatggctgcaaagcgccaatctgagccgagcaaagacttgaagacagcatcaaagctctgagggtacccgtactactctcgtatatagcagcagtgtccatgatgaacaaaaggaaagcaataatcgaaggaaaagaaggaagaacaagaaagttatatatcttgtctttttttttaaaaaaaatgatttgtggtaaatttggaggagattatgcttgactattccaatttgtaacattgcataggaacaaaagtggtgtttaaagcattgacaattcaatttactgttctaatttgtaacattgcagagttttttcaataaaacaaactgtggtgtttgaagc

SEQ ID NO: 2322 - DNA, 1041 bp, Oryza sativa
  ref <308>: DATABASE ACCESSION NUMBER: AK060167
  ref <309>: DATABASE ENTRY DATE: 2001-12-06
gtgtttggtaagcctcgtctcgaaatggcgacttgctccgctgcttgcgctcgcccagccgtcgtcgtcttcgcgtcgccggccgccgcgcggcggcgcgccgcctcctccgtctacctccctggtcggcctctgcgcggcggcggcgtcgtgcgatgcagcgctgggcctgtaagcggtgggatgatctcgaagaaggtggcggagctgtgggcggcggcgaggagcgcgtcgccggtggcggtgatcgccgcggtggccggagcggcggtggtctacaaggtggggtccagtctcctcgcgccgcctcctccgccggcgaggccccgggaggagcccagcgaggaggccccgccgcctccggagccggtgcaggtgggggagatcacggcggaggagttgctgcagtacgacgggtccgaccccgagaagccgttgctcatggcgatcaaggggcagatctatgacgtctcccagagcagattgttctatggacctggtggaccatatgcattgtttgctggtaaagatgccagtagggcgttggcgaagatgtcctttgagccacaagatctgactgatgatatatctggcctaagtttacttgaactcagtgcccttcaggactgggagtacaagttcagcagcaagtacgtgaaggttggaaccataaaaaaggtgctcgtagaacagggtggcgatagcactgccgatgcaatagaggaggcagctgtcgatggtgaagacagcatcctgactgctaagatgtctaatcaattactatatgaggaagaaatggaagtcggtagtgatgatccatgaaggcttcaggagttgaaaactgaattgccttctagcagctaacttcacgcatcaagaattcaagacaaataatcgcagaatgatgtttcatgaattcatgtgtctataggtgtagattacaagaagatactgcattactgctgtcgatttccctttgtcaatactcaaggatatgttgccgtaatgccatgttattagttggctgtcctgttcgtcaat

SEQ ID NO: 2323 - DNA, 1029 bp, Oryza sativa
  ref <308>: DATABASE ACCESSION NUMBER: AK060168
  ref <309>: DATABASE ENTRY DATE: 2001-12-06
tctggtaatggaacacggttcagttcattagttcatcacaattggttatcacgcagctgcagagaatcgtttcatgtgctgtcctgtttacttggccaattaatctgtcttctttcttgtgataatttttgtgtacagaatcctcgagccgtggtaaagaatctcttctactgcaccagagcaccggttaccctagaaggggatcatgctaggactggcatcccatcggccatggaggatgccgatgctcccaaggacagtggtggcgtgacatccaccggaacagtcgcgtccgtgctgatcgccacggtgacgttcgcggcggctctcaccgttccggggggctacgtcgccgacgaccacccgaacgccgggacggcggcgtcggccgggcggttcgccttcagggcgttcgcggtgtcggacaccatggcgttcctctgctccatcgtgggcacctgcctcctcgtcgtcggcgaggcgagggaggtccggccgagcaggggccgtctccgcgcctaccaggggtcggcgtgggcgctcgtgacggccggggcgcagttcatggtcgccgcgttcgcgttcgggctccaggtcgcgctcggcggcggcgcggacagccggtggctggtggtgttcgtccacgcgctgtgctcggcatcggtgctgctctgcttcccgggcatctgggcgccgttctgcctcgggaaggtgatctggaggcgcgccggatggcgagggctcacgaatcttcaccggtgtccgtccagtttggaagagttcttgtggtgtttcgtgacaagcttcttggccaaaactctcttgcggacattcctcccggtgcttatcgcggtcaccttggtcgtcgccatcgtgctaaatattgcaaagcccaactgctgagtcggcaagaatttgaggatcggaagtcgttagtactagttggagtatattattatagcgtatgtgttgaatgagttttgacgtatttgcctgccattctatcaagctttcgatgcattttgtgtt

SEQ ID NO: 2324 - DNA, 1025 bp, Oryza sativa
  ref <308>: DATABASE ACCESSION NUMBER: AK060169
  ref <309>: DATABASE ENTRY DATE: 2001-12-06
atccacggcgagggggcgtcccctcgagctcgcgggtctctcgtctcctcgatggcggtgtcgccgtggagctgccgctgtggggtcagccgctcccccggaaagagcagaggcgcaccggcaccttcttctcctgacaagagatccaagtactcggcacaatcagtgagagcaatgcctatgcgtgtgctaacagttggaaagaagaggtctcgaggggcacagctcattgttgaagaatacaaggagaagcttggttactactgtgatattgaggacacacttatcaaatccaacccaaaactcacaagtgatgttaaggtgcaagtggaggcagaagacatggcaatgatgctgcagctcaagcctgaagacttcgtggttgtgctggatgaaaacgggaaggatgtcacgtctgagcaggtagctgatctggtcggggatgctgggaacacggggtcgtcaaggctcacattttgtattggtggaccgtatggttttgggctacaagtgcgagagcgtgcagatgcaacaattagactatcctcaatggttttgaatcatcaagttgccttgatagttctaatggagcagctctacagggcatggactataatcaaaggacagaagtatcaccactagccactagaattgagttgcattggcgtcatgttgcgcacttgaacagatggaaaattggaagtgcaggacatggagatcgtaattcataaacgcatcagctttcagatttggaggcttggagcacacggcgcatttttgcttggtgattcactgattctacaacaaaggcacaccagagggtcgaacattggttgtaatcaatgcagcgtataggcattgtagtccgtagattgtatagcgcagagatctcccatatatcaatttttcagcagtttagacaaatctttgttctgcttatactcgcgaaactgctattcatgtacaatgctttcaattgcactccaagtgagcacaaagcaacgaaaacgctttacaagaagatc

SEQ ID NO: 2325 - DNA, 930 bp, Oryza sativa
  ref <308>: DATABASE ACCESSION NUMBER: AK060170
  ref <309>: DATABASE ENTRY DATE: 2001-12-06
atcatgattcagtccaagttgcactaataattggtcatctctgtgcaggttaattatgcgaaagagaatcttaatcccaggggctttggttgcagtattgcacacggaagcaattgtaccagcgcggaagaatcagatgcatccatggatgggattatggaaggagaaagtgatgctagctacttaccagcaggtgatgaagcagaagccggcgaaggcgcgccaccgccccggcgagagcgcgcggccgcagcagaagcaccgagtcgccaccatgatcatcgcctgccctgccgccagcagcaccagcgccccgatgccgtaccccgtcgccgcgtcggagccgtagacgcagtacggccgcgcgttctggtcgacgttcacgtacgccgcctgcatcatccaatcaacacacacctcctcgatcgtcagcacgcagcagatgatcgatcggcttcgtctccggcgacggcgatggcgacgacacatgtatgcatcaacgcgttcgagagctctcaccgtgttccggcgtttctcggcgccgatggcgaggacgaaggcgaggacgtcgaggacgaacacgacggccaggatgattatggacgccatggacatcgaatcgcagcaagaatcagtcacctagctaagcttcgaatatagttcaatttgcaggttttgtggtgcaagcaaagctcactttcctgtggttaatcggcagcacaaaatgtggattaggacgagagaatcaaatgatcagagctagctggaggcgatgctgctgctactgctaagcagctatccgtgaggttgacatttgaagacgtgacatgtttcacttcaccccgttcccgcggctttgtattttgttaagttttcctcctgtggttgacgagtgggcccctccatgatgaactgatgattaaccctgcg

SEQ ID NO: 2326 - DNA, 1151 bp, Oryza sativa
  ref <308>: DATABASE ACCESSION NUMBER: AK104269
  ref <309>: DATABASE ENTRY DATE: 2002-08-28
agagacacgacacggagcccgcgcggacgcgtcctcattcatggcctcctcttccgtcttctccccgctactccgtgcactccggccgtccacctcctgctcggggcgctcttctgccacccacgacaacagcgccgccgctgtcgttgccgctggtggcgctgccccgcggccggcgcccctcgcggcggttgtcagccacaggagggagctgttgctgggggcggcattgggcgcggcgttcctgaaggcgcctttgccggccgaggcgcgtgaggtcgaggtcggcgcggtcctgccgccggcggcgtccaaccccgggttcgtgttcttccgggctacttccaaggacactcctgcacttcgagctggcaatgtgcaaccttacgagttcattctgccacccacctggaagcaaacgcgagtggccaacattctgtccggcaactactgccagcccaagtgcgccgagccgtgggtggaggtgaaattcgaggacgacaagcagggcaaggtgcaggtggtggcctcgccgttgatccgcctgacgaacaggccgaacgccacgattgaggacatcggtagccctgagaggctaatcgcctctctggggccttttgtcaccgggaacaccttcgactccgacgagctcgtcgatacctccgtggagaagatcgatggccaaacttactacagctatgtgctagagactccattggcactgaccggttctcacaatctggcgaaggcgactgccaaggggaacacggtggtgctcttcgtcgcaagtgccagcgacaagcagtggcagtcgtcggagaaagttctcaagaccatagtggattcatttaaagtatgatgatcgctgcaggtctgctagtacgatctgtttgtggtgattttgttgatgagtacttcccagccttgagcttgggtaacttatctgaagtaaactagaggcatttttacaagagaagcggcgttgcttgtgaagcttggaaaccatagtagagagctagtactgtaattggtaaggtgacaccatggcagtactgttatagcttatctgtttatgtgagaactaagtgtacagtgcacctaacgcacagggattattttttcaatataagattaaatactatgttaagatt

SEQ ID NO: 2327 - DNA, 1214 bp, Oryza sativa
  ref <308>: DATABASE ACCESSION NUMBER: AK104270
  ref <309>: DATABASE ENTRY DATE: 2002-08-28
gtattcttagtgaccaccccccatatcacatcctctccttcctcttcctctgctcactcagctctcccccgcgcgcgccaccgtcgtcgccatgtcgggcaacatcgccttcggccgcttcgatgactccttcagcgcggcctccctcaaggcctacgtcgccgagttcatctccaccctcgtcttcgtcttcgccggcgtcggctccgccatcgcctacaccaagttgaccggcggcgcgccgcttgacccggccgggctggtcgccgtggcggtgtgccacgggttcgggctgttcgtggcggtggccatcggcgccaacatctccggcggccacgtcaacccggccgtcaccttcggcctcgccctcggcggccagatcaccatcctcaccggcgtcttctactggatcgcccagctcctcggcgccatcgtcggcgccgtcctcgtccagttctgcaccggcgtggcgacaccgacgcacgggctgtccggcgtgggcgcgttcgagggcgtggtgatggagatcatcgtcaccttcgggctggtgtacaccgtgtacgccaccgccgccgaccccaagaaggggtcgctcggcaccatcgcgcccatcgccatcggcttcatcgtcggcgccaacatcctcgtcgccggccccttctccggcggctccatgaacccggcgcgctccttcggccccgccgtcgccagcggcgactacaccaacatctggatctactgggtcggccccctcgtcggcggcggcctcgccggcctcgtctaccggtacgtctacatgtgcggcgaccacgcccccgttgccagcagcgagttctaattacccatttcgccatcggcaacacgcataaaaatggtggtcactccatcgtcagaatcttgtgaggatgtgttgtgaaggactgatttggttcagatggggaagaaggcttttgttgcgaggatgtgacacttgggtgatgatcgatccatgtttagtttcttcttgattaatttgtaatgtgatcagtgtggagcaagttggatgagatgcatgtttaagatcgaacacttctgttgagtttcattgtgagatttcatttgattcgggccatgtcatttcagtttgtttgtagcctccaaaataagcttgtgtcttctcctcgcaaataggaaatcagaaataaaattgttccgggaaatcatttgttgcttct

SEQ ID NO: 2328 - DNA, 1332 bp, Oryza sativa
  ref <308>: DATABASE ACCESSION NUMBER: AK060171
  ref <309>: DATABASE ENTRY DATE: 2001-12-06
tcgactcctcgtctcctcggccgccgccgccgccgccgccgccgagcagaggcgatctccacccgcgagcagcggcgccgtcgccggtgtgctgcttctcccgtcggaccctcgccgttcaagatgcctcgctatgatgaccgtgatcgctacgatgaccgttacggcggcaacacgaggctgtacgtaggtcgtctttcctcgcgcacccggacccgggaccttgaagaccttttcggcagatatgggagagtgcgatatgtggatatgaagcacgagtttgcatttgttgaatttagtgatgctcgggatgctgatgaggcaaggtacaacctggatggtcgggactttgatggaagccgcatgattgttgagtttgctaaaggggttccacgtggccctggaggatcacgtgaatatatgggcagaggaccaccacctggttctggccgctgctttaactgtgggattgatgggcactgggcccgtgactgcaaagctggagactggaaaaacagatgctatcggtgtggagacaggggccatatagaaagggactgccggaacagccctaagaatctcaagcgtggaagaagctactcaagatccccatcccctcgtcgtgggaggagccgtggtaggagctacagcaggagccgtagcaggagctacagccgctcccagtctccaaggagggatagccgtaatgaaaggagatcaaggagccctcgtgacagtcggagccctaggggaagcccccgtgacagtcgcagccctagggggagcccccgtgacagtcgcagccctaaggggagccctcgcgacacccagagccctaggggaagccctcgtgatagccgcagccctaggagaagtgcttcaccacccaacgggaggaaccgcagccctacccctaatgccagcaggagtcctgcaccaagggacagcaggagcccaatgagagctgacagccgtagccctgctgaccatgagcgccgtgacatgagtacagctgccaatggccggagcccaagccccagggattatgaagacaatggcaatcatcgggcctcgcctagaggaagcgcatccccttgaatgagaggaagcacatccccttaaatgagatgttaggggatgtatcagtcttaaagtttatgaatcaatttaaacctgttggagattttagtcatatctatgaacctgttgggatttgagtggatctgtatcctatttgttattgacgcctttcataagttgatagaccatgccatctgttggttgtactccgaactgcataaaatggaatttgcggcccaccgcggtttctgg

SEQ ID NO: 2329 - DNA, 1019 bp, Oryza sativa
  ref <308>: DATABASE ACCESSION NUMBER: AK104271
  ref <309>: DATABASE ENTRY DATE: 2002-08-28
gcatccgcattccaccatcttcttcttccccccaacccaacaacggttttggtgtttcgctccgccttccgcttccgccgctacgcgttcgcctcccctgctcatcctctcctctcctctccactccaccgccaccgccaccgccaccgccgccgccgcaacgcgttctcgctttccgatctcgcggtgcgggcgcccacatgaggttcaggttccgcaacaaggctgcggcggcgggagacggcagccggccggcctcttctcctcctaacgccggcaagttcgcggcgcctgttgccggcggcggaggggcggcggacgtcgccggcgagagcccggatcaggacagcacaaggaatggaagcaaagatgaatcgttcttcgaggcaagaccctggttagactccgacagtgaagatgatttccacagtgtgagaggagatttcactccatcaagaggcaccaccccagatcatcagagacagtcaccattcgcggggcgaatatcggtggacagatcggagccttctctgatcgagaagaagcagaggctcctcgaacttctccaggagaagcagcagtacgacgatgacagcgtcgctgatgtcggtagcgagatcgagaacggcgctgtccatgctgaagagtatctgaaatcatcgaggaaaggcgcaaaggcgaacagggcatccaagtccaggggaggctgcttcccaagctctttttggaagatcaaattcaggagctgcaggaagaagagaaaagagcagaatgattagctgaattttagcagcattgtgatgttgaattttgtttttctacttcctgtgaaaattgctttttacgacagcgaggggaatatatatactttttacccctgaaatgcttcagctggaaacgacaaaaagaagttttgaagtggccgcttattgtgctgtaaaaaaacaagcaatgcaaatataatgtagggaaaaagtatacatgtttacttgttaattgtcattgatgattttgttggc

SEQ ID NO: 2330 - DNA, 947 bp, Oryza sativa
  ref <308>: DATABASE ACCESSION NUMBER: AK060172
  ref <309>: DATABASE ENTRY DATE: 2001-12-06
acgacgagcaggcacgccgcgccgtacatggagggcctcgtgggcacgctcgtgcggctcaccgcgacgctgtacaacccggacgtgctcaaggcggccatggaccacgacttcgcctcggtgctcaccgccctcctcgccggagcagccggtagcggcgaggtgcaacggctcgccgccgtggggctcgagaacctcagctaccattccatcaagctgtcccggcctccgccgccgccggaggacgagccgcggccaaagaagatgaccatactcaagcgcctgaaagacgcaagggtgcataaccatagcagcagcaagaacccaccgctgaacgtctgcccggtgcaccgtggcgtgtgcacgccggcgacgacattctgcctcctcgaggccggcgccgtcgagggcctcctcgcctgcctggagaacgacgacgcccgtgtcgtggacgcggcgctgggagcgctgtgcacgctcgtcgacgacagggtggacgtcgagaaggccgtggtcgccctcgccggacagggcgcggcgaggcgcgtgctcgcggcgctgaggcagcacagggggaacagcctgtggcacaggtgtttctccgtggtggagaagctgctggtgcacggggacgacgtgtgcgtgagggaggtgaccggcgacaggatgctgcccacggcgctggtgagcgcattccaccgcggcgacgcgaacgccaagcaggcggccgagagcatcctcaggaggctgcacaagatgcctgactactctgcaacctacatgtccgtggaattctagtgctttcatttcatcgagtaaataaatatataccaccggtaaatagcagcagatatttgctgccgtgcatatatgaacatgatgtttcatacatcatcttgtacatccggtcgcaaaatttatctcagtagcatatccatgatatgttg

SEQ ID NO: 2331 - DNA, 1032 bp, Oryza sativa
  ref <308>: DATABASE ACCESSION NUMBER: AK060173
  ref <309>: DATABASE ENTRY DATE: 2001-12-06
gtgaacaaatggatttgtattgcatgtccatttcaaggtgccccaggatgcatcaatgattctctgctaactgggctacaatttgtttatgggtttgaaagcttcttttttgtttctagatgggtgatgcatcaactgcttgttgaatgcccatccatctacgaaatgctgccaaatccacatttcaagtggaagaaagcaccagttgttcaggtttggagaaagaaacctgaaaaggatggaatagcggagttagttctgtatgaagctaccgattgtttatctctgtttcaagaagctttaaggaacaatgagctcaagtataatgggaagacaattgcactgccattcaatatgtcagtcttcaagtgggccactgagacccgccgaattcttgaggatgctgaattaccagatactgtgagcttttataatatatatgggacatcttacgatactccatatgatgtttgttacggctctgaaagctccccaattggagatctgtcagaagtgtgccacacaatgccagtgtacacttatgtggatggagatggcacagttcctattgagtcaactatggctgatggatttgcagccaaggaaagagttggcatcgaggccgaccaccgagggctgctttgcgacgagaatgtgtttgagcttctgaagaaatggctcggcgtgaaggaagaaagcacacggcggcgtcggttgtccaagtccaaagtgacagactttgcaccatcataatgaaagtactaatcaagtcaaggtgctcaaaacaaaaccatcacaatctcttcaaggcagccattattttttgggctcttcacttgaagagaagatgaatatagcgaaacacttgtgtttaaaatgttacttgttattccggaaggggaagatgatatgaaccctaccattcgtagctgaaaattgtgacactttgtgacgttgtgacggttatttaatttgcatccagtaacggagcaaaacttaaaggaaataaataaatcgtattatttacaaagc

SEQ ID NO: 2332 - DNA, 936 bp, Oryza sativa
  ref <308>: DATABASE ACCESSION NUMBER: AK060174
  ref <309>: DATABASE ENTRY DATE: 2001-12-06
ttggcattggacggatatatttgggcatgcacagcttgattgatgttattgctggcatctgttttggcgttgtaatcctggcattctggttggctgtccataatcatgtcgatgcttttgttgtctccggtcaaaatgttacaaccttctgggcgagcctttctctgttgctgtgcttcgcatatccaaaaccagaattcccaactcctagctttgaataccacacagcattcaatggggtggcttttggaattgtctatggaatccaacaaacctacttccatttccacaatcctgatgtccccctcattttcagcccacaattaccgcttattgtatttgtcgggagggttctcgtggggatcccaaccatcctagttgtgaaattctgcagtaaagctctctcgaaatggcttctaccggtgatgtgcaacaccctgggcattcctattgtatcaacctgctatgttccagcgctgaaggcttccgaaaagtgcaaggtcaagtccgacgcgaagcagggcggttatctccagaaggtattctccctctttccacagaaggcgtacgatgtggacaccggcataaggttcgttcagtacgccagccttgcatggtcagtggtcgacctggtgccggccatattcactcatttaagtttgtagtgaacactgcaagatgcattctacttggagacttgcaaaatcccaaatgggctattcctactcatgagagagagataatcttatgggactgtaaatccgatgatctccactttatttttatttttgcgtggtgtgtgtagaggtgttttgtccatagtagcaaccaggaagtattaacatgctgtgaaattttgtttcatgatgaagacagcgaccaccacgaactctgaaacttaactgcaaagaaatgccattccttttcttgcattgt

SEQ ID NO: 2333 - DNA, 1353 bp, Oryza sativa
  ref <308>: DATABASE ACCESSION NUMBER: AK060175
  ref <309>: DATABASE ENTRY DATE: 2001-12-06
gaacacgcttctctttcgagccacactcctaagaagactccaaggatagctccaatggaggtgaagtgcttgctgctcctggctctcttccttctgctaggaacacatggtggtgaagcgcagccgctcgtgccggccgtcatgacgttcggtgactcatcggtggacgtaggtaacaatgactacctcaaaaccatcatcaaggcaaacttccctccctacggaagggacttcaagaaccaggtacccacggggaggttctgcaacggcaagctggctactgatatcactgccgagacgttggggtttgaaagctacgcacctgcgtatctcagcccagatgcgtcagggaagaaccttctgattggagccaactttgcatctgcaggatctggctactatgaccacactgcacttctgtatcatgctattcctttgtcccaacaattggagtacttcaaggagtaccaatctaagctggcagccgtggccggaagcagccaggcccagtcaatcatcaacggctcattgtacatcatcagcgccggtgccagcgatttcgtccagaattactacatcaatcctttcctctacaagacccagaccgccgaccagttctccgaccgcctcgtcggcatcttcaaaaacaccgtggcacaactgtacagcatgggagcacggcgcatcggcgtgacgtcgctgccgccgttgggctgcctaccggcggcgatcacgctgttcggctacggcagcagcgggtgcgtctcgaggctcaacagcgacgcccagaacttcaacggcaagatgaacgtcaccgtcgactcgctttcgaagacctactccgacctcaagatcgccgtgttcgacatctacacgcccctctacgacctcgtcacctctcctcaatcccaaggattcacggaggcgaggaggggatgctgcgggacagggacggtggagacgacggtgcttctgtgcaaccccaagtcgatcggcacctgcccgaacgcgacgacgtacgtgttctgggacgccgtccacccgtcggaggcggcgaaccaggtgctcgccgactccctcctcgccgagggcatcaacctggtcacataaattccggtggctttcagccagcagagggctgcattgtagatcgatgacaagaacaacacaggcttcaaactcgacctgtttgattataaatgagaataatgataataatgtttgctcggtggtttggcagcgacagctctaaaatgtgtcgatgtggagttgagggtgtttcgggctgtcgctgtgttgcatgccatcagcccagcaatataggacgatgttttacagttttaaattttatac

SEQ ID NO: 2334 - DNA, 952 bp, Oryza sativa
  ref <308>: DATABASE ACCESSION NUMBER: AK060176
  ref <309>: DATABASE ENTRY DATE: 2001-12-06
tatctaattattgactaatatattaattaatataatgtaatttatataggaggtagtataacctaggcatcccgtttgcaagcatgcatatatatacaagacagacagacatattacacatggagtagtagtagttgaagaagaatatgcatgataattaatatagagaagctcgatcggtcaagtgcaggacgaagctgaagcagacggaggtggattgcgagcttctgaagcgctgctgcgagacgctgacggaggagaaccgacgcctccatcgtgagctccagcagctcagggctctgacccactccgccgccgccgaccgcaccaacaagcccaccgccccgcacttgttcagccctttcgccaagtccgccgcctgctagctaaattaatctcgatcatcatcctctccctgcatatgcatgctagcatgattaattaattaatcatcatatcagtgtgtagtgtacatatatatagtttatagtagtacatatattaattcttgcatgcatgcttgcatctagtagtaaatatatatggctatagctagttagctcatcgatcagctggctctctcatgcatatgttcaccccctctgctttaattagttagcttcattttttcacaagttaattaatgtgtgaggaggatggactgagcactgccggccgcatctaggatcgatccagaaatcaaacaaaattttaattcaagttgttggttttgcttgcatctagctatagatggtcacttactggtgatgaattttattgtcaggggagttaagagtgttgtagttagatgacgacgacatgacacctagctagctagctagctcacacacatatatatactgtactctgtacgtgatccatgtattatattgatttgtttcagaaatattatatatcaatgtatattgatttgtttaattcttcagagatt

SEQ ID NO: 2335 - DNA, 1030 bp, Oryza sativa
  ref <308>: DATABASE ACCESSION NUMBER: AK060177
  ref <309>: DATABASE ENTRY DATE: 2001-12-06
aatccacctcgcattcttagcctaaagatggtggccactgctcgaatgcacgcttggcagctgctactcgtggcggtggtcatctcttgcttccactgccatctcgccgctcaccatggcgggaagaatgtccggcaaccaccgtcatccgtcgtcgtcgtcgtcggctccgtccactccggctcagacgccaccaaggccgcggtatcaggtgccccggtcgccgtccggtgccacgacggcaacggtcgggatgtcttccggcagcaggccctcaccgaccgtcgcggcgagttccgcgtccacctgccgccggaggccaagagccggctggcctccgtgacgtcgtgctcggtgaagctgctcgccagcaatgcggcgcgcccatgcgacgacgccgccgccacgtccgccgctactgccagaggcttccgcctcgccgccacgaagcacaacggcggcgacggcgcccgagtcttcaacgccggagcgttcgccgtccacccggagctctgcgacgacaaagggatcttcttcccgccgctccctctcgtgccggagccgccgaacatcggcggcgtgccaattccgccgaatccaatcacgccggcgccgccgtctctcgtcccgccggtgttccccaccccatctccaccatcaatcctgccgccgctcaccccacaaccgccgccatcgtcgttaataccgccggtgctgccgctgccgttgctcaacccaccaccgcctccaccgcccccgccatctcttctaccgccagtgcccctcctcccgccgttgatccccggcgtgccaccggcttcggcttccaggagtggccggccagtgagtacgccctgagcaacttaacacgctgattattctagctatgtgctaattaagatgtacggcaagcatgtaatcctaagatcaagaatctactgcagtatactgcaatcaatgtatacttttggaatttaccgacatgtcgagtaaaaagaatgtcaaatatattgacgttattctcaaccgt

SEQ ID NO: 2336 - DNA, 1089 bp, Oryza sativa
  ref <308>: DATABASE ACCESSION NUMBER: AK104272
  ref <309>: DATABASE ENTRY DATE: 2002-08-28
cccgtttcccctccgcctcgtctcctcctcccctcctcccgctcggctctgctccctcgcggtcctagggttgcgccccgagtccccgtttccccaccgcgcgcgctgccggacaccgctgtgggggcggcggaggcgctccgtggcgcgctcgccgacgccttcctggcgtcgcctccgacgtggaggtcggccgccgtgagcaacctcgccatcttcgtcgccggctccccggtgctcctgtctggcctctccgcctccggtttcgccgccgcgtacctcctcggcaccctcacgtggcgcgccttcgggcccaaggggctcgtcctcgtcgcctcctacttcgtattgggcacagcagcaactaagttgaaaataaagcagaaagaagctttgggggtggcggagaaaagaggaggaaggagagggactggaagtgttattggttccagtgctgctggttgtgtctgtgctctgctatcaatctacaatgtaggcagtgcagcgttggctgagctctggagacttggcttcgttgctagttattgtactaaactaagtgacacagtttccagtgaaatagggaaggcctacggaagaacaacgtacctggtgacaacacttaaggttgttccgcgaggtacagaaggtgcgatcagtattgagggtactctagctggaattcttgcatcgataattcttgcaagtgttggttatctcctggggcaggttaatgtatcacaaggcgcagtatgtgtccttgcatcccagattgcaaatttttgtgagagttatattggtgccacactacaagataaagaaggttttgaatggctcaccaatgatgttgtcaatgtactaaatatctcaactggtggtatattggctgttctgatgcagcagttgctagtaagttggcgctcttgaatacttttttatgacttcttttgttcagcctccgttattataacttattatggagaaatgactggttgatggcaatgttcttacatgctgctgccatgtgaaatggaagtataaattccggtcttagagatcatatttgagcggataaacatttgtggatgt

SEQ ID NO: 2337 - DNA, 1291 bp, Oryza sativa
  ref <308>: DATABASE ACCESSION NUMBER: AK104273
  ref <309>: DATABASE ENTRY DATE: 2002-08-28
atctcgcgcgcggcctccggtcgtcgtcgcgactccgctgccgccgtcgcccggcgccgccggtgatcccgctcatgtgctagtagaaggcgttcggagctctttgggagtgtcgcacgcatggagatgaccagaagccttacgctcgtgccgctcccggcgacgctccggccggcatccgcggcctgtcgccggcggcggaggcggcgagggcttcccttcggtgcactcttctcaccatcgcctccttcgaaccagcagcagcaggaaatgcacatcagggcgctgcagccgcggcaggattgggtgggggagtgggtccggagcaacgacacgctagtccgcggcctgcccatcctcggcggcggcgcctccctgctcgccgtcctcctcaaccgtgcggtttccggcattgcagctgtcgccgacgcctccagttcgcagtcaagggctgacatactgactcttgctctctccgtaactgatattcttgctggccttgtttggttgtccatccggccgaaatccatttctcctgttgttcctcgaggtgtcgagtgcaaacgggtaggaacgggtgtattggactcggctcttcgtgaactactttggacatgggattcccttacaactgcaacttgttgcaaatccttggttgttgtgtatggaggtaattgtgttcttcaaattggggttgctgctggctctccagaggatggtaatgcagttatggtggatgcacagaagttcatgcaaggttccctttatagaagtgccatggaatccaagaagcaatcttacctagcaaatcttgccttatatcctggaaggactgaactaccattcttgccagctaacacgcaggccctaatattgcaaccaattggtgataaaggaattgcagttattggtggtgacactataagggggttcactaatcttgatcaggcatggattgcaatgatagcagataaactggatgctacattgtcaaagtcgtaagaacgcgtagtttgttggatattgtttgtatcttgcaattggccaaactgtcacgagagatgatcatctgtcactgtacatgttcaagttacaggtagagtttgcaaaaccaacggataaaacagtacagggctggggttgaccaattgttttaagccaggctgtatgattaggcttgattaagtttgaccagcatgaattgattacaatgttagttacttcttgtaaccagtcactgttggctgaatgaatcacattactgatgctttcatttgtaagatctcatcac

SEQ ID NO: 2338 - DNA, 1399 bp, Oryza sativa
  ref <308>: DATABASE ACCESSION NUMBER: AK060178
  ref <309>: DATABASE ENTRY DATE: 2001-12-06
agctagcgcgcggcgtccatggggaaggcggaggcgaggtccagggagcacggcgggggcggaggaggaggcagcggcagcgcggggaagatcttcgtcggtggactgccccgtgacaccacggaagcggattttgtgaagcattttggccagtatggagaaatagttgattcagtgataatgagggataagcacacatctcagccaaggggctttggctttattacatattctaaccctgccgttgtggatagagtgatggatgatatccatgaattcaatggaaagcaagttgaaatcaagagaaccattccaaaagattctgtgcaatcaaaggatttcaaaactaaaaagatatttgttggtgggcttcctcaagcactgacagaagatgatttcaagcatttcttccagaaatatggccctgtggtggaccatcagattatgcgtgatcatcaaaccaagcgttcacgaggctttggatttatagtttttagttctgatcaggttgtagatgatttattagcaaatggaaatatgattgatcttgctggtgcaaaggtggagatcaagaaagcagaaccaaagaaatcctcaaatccaccaccatcatcacatggtagtgcctctagatcagcatatggtagggattctaggggtcattcttctggcaatgactatggtggactggccaatgcttatagcaactacaacagtggtggatttgggccttataggaaccatggagtttatggtggtggtagtctcagtggttatggtgggataggtgaatatggtgttcagtatggccgttactatccaggattaggaggatctggtagcatgccttcttttggttatgctagtcgtgttgggccgtatggaggaggttttgatggaccttacgctggtgggaacttaagtggatacaggcgtggtggtgatgagagctttggtggcctcagtagttctagctttggtggcgctatgtatggcggcgcagcatatgatcccgcactaggtggttatgcatctggtagcacacctgaaagaagcaggggaaatttggctggtggttcaggccggtacaatccatatggacgatagagatgcccttgaaggattcgacccatgataatattctcagcaatcttacttcctcattgccttcttttagcttcttatatggtgggcatcttagcaatgctagtacccttattagattgagcgtgtgcacaagtaatttattctgtacatgtttgctagttctcctgagcttaaagctttaatcggtaccatgtagtgatcagactagatgttgtaatgatggttttgtttgggatgaacggaattctggtgttgttagttttatatcatctacgaagtaagtttaagctgc

SEQ ID NO: 2339 - DNA, 1506 bp, Oryza sativa
  ref <308>: DATABASE ACCESSION NUMBER: AK060179
  ref <309>: DATABASE ENTRY DATE: 2001-12-06
aaaaggttggttggtctcttcttcttcctcctccatcccctttgccctcctgctgcgccgccccaactccggcgccgcaacaaagccatggccaagaagctcggcaagtcgccggtggcgaaggaggaggacaaggaggggctcttcgcgtcatgctccttcaccgacctcggcctccaccccaccctctgcgctcacctccaagataagatgggcttccaagcgccaacaagaatccaagctcaggcaattccagtcgccatgtctggacaacacatgctagtgaaggcagcaactggtactggcaagactcttgcgtaccttgcaccaattgttcaccttctccagatgagggagcctcgtgttgagagaactgatggaacttttgctctggtacttgtaccaacacgggagctatgcctacaagtttatgggattgcacagcagttggtgcatcgtttccactggcttgtccctggttacataatgggtggtgagaacagagcaaaagaaaaggcaagattgcgaaaaggaatatcaattctaattgctactcctgggcgtcttctggaccacttacaacatacgtcatcatttgtctacccaaatatgcgttggatagtttttgatgaagctgacagcattcttgaacttggttttgggaaagcactagaggatatactagagcacttgggttcaaggaatgatacttctaaccaaaataaaaacaaaatggaacctatgaaaaggcaaaaccttctgttatctgcaactctcaatgaaaaggtgaatcggttagccaagattagtttgaagaaccctgtgatgattggtcttgacgaacagaactccagtgcccatgggaagaaccacacttctctattatctgatgatgaagaggaaatactggaaaagcacaacgttacagtggaacaagcagttgacgatttcaagcttcctgcacagcttgttcaaagatatgttaaagtttcatgtggttcaaggctcgcgattcttcttaccattcttaaatctctgtttgaaagacaactgtctcataaggttgttgttttcctgtcaacatgtgactctgtagatttccaccatacagtactcagccagcttgagtggagccctggcctgcaactggatacggataagaagcaaaagtttattagctgcaaagtgttccgtttacatgggaatatggaccaggatgatcgcaagaaatcatttctgggattcagttctgagaaatctgcaattcttgtatctactgatgttgctgctaggggcttggactttccaaaagttaaatgtatcatacagtatgattcacctggggaggcttctgaatatgttcacaggtacctgaagcatctccctgtctaaaacatttatttgtaggtttctgatttattgtttccaacatagttataattgtattatttgattgtatacgaacagacaaaatgtattgttgcagactaaagcactttactcttt

SEQ ID NO: 2340 - DNA, 1467 bp, Oryza sativa
  ref <308>: DATABASE ACCESSION NUMBER: AK060180
  ref <309>: DATABASE ENTRY DATE: 2001-12-06
tttgaacggagcttcttgatcaagttcccagcatgctctcttgctgcaaaaaggcacattgattcgagcacaacaattcttgatgttcagggtgtgggtttgaaaaatttcagcaaaactgcacgtgaattaattgtccgattgcaaaaaattgataatgataactacccagagaccctatatcaaatgtattgtcaatgctggtccggggtttcggctcttatggaacactgtgaagtcctttctggacccaaaaaccacttccaagatacatgtactcgggaacaaatatcaaagcaagctgctagaagtaattgatgctagtgaattgccggaattccttggtggcgcttgtacctgtcctgaatatggagggtgtcttaaagctgaaaaaggaccatggaaggaccaaaacatactcaatatagtccttagtggcgaggctcagtgtgctcgacaaattgtaactgtttccaatggagaggaaaagataatttcttatgccaagtccaagcaccacacaatacgagggagcgatacatccactgctgagtctggatctgaggctgaagatgttacgtctccaaaagtactgagaagttacatctcccatcctaagttgacccctgtccgtgaagaggtcaagatggttagagccacgagcttttctactcgcatgcctgaatacgatgttcctgtcgtcgataaggctgtagatgcaacatggaagagagaagtgactcgaaagactgccttctcatccaaagactcttctttgacaagcacagaaagttcatccaatggctctttggaccggatcgttgcagttttgctggcagtttttatggcaatcattactttagttcggtcagttaaagatcttgctgcaaagagattgccagataaaaacgagtcagaacagaagtattcaacattatatccagactcgatgccaaaagaggaattccgaccaccttccccaactcctgggtttgttgaagctgaactattttcgtcagtcttgcaaaggctgggagatcttgaagagaagttcctgatgcttcaagataagccttcagagatgccctgcgagaaagaagagttgcttaatgctgctgtccgccgtgtggatgcgctggaagctgaacttattgtaacaaagaaggccctacatgaggctcttatcaggcaagaggaactactagcctacatcgacagtaaggaggttgccaaggctcagaaaaagaagaaggcgatgttttgctattagcaccagccaaccaggagagggtacaccccctatcttgggattatactttctgacagccaaagacggcgtttgagaattgagatgttgtaatcggcagccccccctgctcgcttccctggttctcctgtaaaatgtgaaacgacagacgtcggatgtaaatcggcaaaattctgacataaataaatgtgtttttttgc

SEQ ID NO: 2341 - DNA, 2085 bp, Oryza sativa
  ref <308>: DATABASE ACCESSION NUMBER: AK060181
  ref <309>: DATABASE ENTRY DATE: 2001-12-06
aaaggatgcagcttttggctataaatcttccaatctcagacagtgggttgaagagaagacaaaaggacggatttctgagaaccaagtttcaacaatttctgttaatctcctacgtaaagagggaccgaatgcagtctgccagcatctctgtagtttgaagaagggttctgcatgtattgtcaatgctgctagtgagagggacatgtctgtgtttgctgctggaatgatccaggctgaattgaaaggaaagagatttctgtgccgcacagctgcaagttttgtaagtgctagaattgcaataaagccaaagccacctattcgtccaactgacctaggtttaaaaagagctttaactggaggcctcattgttgttggctcttatgtgccaaaaactacaaagcaggttgatgaacttaggtcacagtgtgagcaatctctccgaataatagaggtatctgttgagatgatttcaatgaaatcggctgaggatagagaccatgaaattagccgagttattgaattgggaaatgcttatatacaatccaggaaagacactctagttgtcaccagccgccaactcatcacaggaaaaactcctgaagaaagcttagaaattaattacaaagtgagctcagccctagtggagattgtgagagggattggcagtcgaccccgttatattcttgcaaagggaggaatcacttcatccgatcttgctacgaaggctttggaagctcggcgtgccaaagtaatgggacaagctttagctggtgtccctttatggcagcttggtcctgagagtagacatcctggtgtcccttacattgtttttcctggtaatgttggtgacaacagtgctcttgcaaaagtggtccagaattgggcttgcccttctagaagttctgcaaaagaacttctccttaacgcagagaatggtggttatgccattggtgctttcaatgtatataaccttgagggaattgatgctgtcgtttcagctgccgaagccgaaaaaagtcctgctattctgcaggttcatcccagtgccctgaagcaaggtggagttccattggtctcatgttgcattgctgctgcagagcacgctagtgtacctatcaccgttcattatgaccatggaacttccaagtctgatttgcttcaagctcttgagatggtgtgcatggttttgattcaatcatggtggacggatcacatctacctttagggaagaacatcttatacacaaggagcatatcttccttggctcattcaaaaggcatgcttgtagaagctgaactggggagactctcaggcactgaagatggcttgacagtcgaagaatacgaagcaagatttactgatgttgctcaggccttggaattcattgatgaaactggtatcgattctctagcagtatgtattggaaatgttcatggaaaatatccccccagtggaccaaatctcagatttgacttgctagaggaccttcgtgcattgacaatgaagaaaggtgttagcttggttctccatggagcatccggactgcctcatgaacttgtaaaggaatgcatagctttgggggtgaggaaattcaacgtgaacacggaggtccgaaacagctaccttgaatcccttaaaaggccagaaaaggacctgattcatgtcatggcatctgctaaggaagcaatgaaagctgttgtggctgagaaaatgcgcctgttcggttcatctgggaaagcttgagttcaagttgcatcgccacttatgaacactccatgaacacttaattctggaggcatgattggtccgtgggattaagacatcttgatagactgcagtggagcccagcccataatctgaagaactcattaccgactcttggctgaagtgcttcggagtgattgatgccattctgtcatgtgatcaagttcatgtccatactacatacgtcgtctggtcctttagagcaacatgacttcaggacgttgctatcaacggctattgatgataaactagtaataaaatttgtcgatgaaattacttgccgtgataaatgattccgttgtcgccaggttacagttattc

SEQ ID NO: 2342 - DNA, 1420 bp, Oryza sativa
  ref <308>: DATABASE ACCESSION NUMBER: AK060182
  ref <309>: DATABASE ENTRY DATE: 2001-12-06
caatgtgttccaagctcgtttcatgccatacacgaacgatcaaaccattgtcacttgtgctgctgatggagaggtgagacttgccaagataggggatggtggagatgtacctactacattgctaggcgatcatgatggaagggctcacaagttggccattgagcctggcagtccttatattttctatagctgcggcgaagatgggcttgttcaacattttgatttgaggacaaatacagccacaaaattatttcagtgcagaaactctttgagtaaatcaggacactcttccaatattcatcttaatgcaatcacaatagatccgaggaatccaaatcttcttgcagttggaggaagcaattgttatgctcgtgtctatgacatccgcaaatacaaatgggatggatcttctgattacccatctgactgctactgtccaccacatcttattggcaatagatttgttggaataacaggcttagcattctctcaccagagtgagttgcttatatcttacaacaatgagaatatttatctcttccctaaaaatggaggactgggaccagacccaaagtcatctgtcaagattgaagccaacaaagggtccaaatcaacaatagtttcatctggagaagatgttgatcgacctgcaccactgatgtatgctggacatcgcaattgtgagactgtcaagggagtgacattcattgggccaaatcatgaatatgtcgccagtgggtcagactgtgggcgattatttatttggagaaagaaagatgggaagtttttgcgggcaatggagggtgatgaatgtgttgtaaactgtattgagccccatccgcacactatgacaattgcaagcagcggaatcgataatgacgcaaagatatggactccctctgccactgagcgagcaccagtggtaaacattgaggagttgaagcctcgtaaaagaagaacaaaactctggcacttttctctaccagaggaattgatctttcatgttctggcatcacgacgcagacagcaagcagctggagatgatgattcatctgaggatcttgaggacagcacaggattgcttaatcttgtactccgagctgcggagagagacgtgctatctgatgaggatgaagaatcctccgaggactctggagattgtagtctcaacttatctatggctcaaccctggaaacattgctaaattgtacatatacagtgatgttttatcctgttttcatggacgtgtgtttttcagttagcggtgtatgagtgccagatgttcctgatctatctccatcatctccactcccgcccattgatccagtgaacaaactagcacgtacagagaattcagattctcttcaagcatatgtcaagtgtaaataagttcacataaataagcagacatacaatacat

SEQ ID NO: 2343 - DNA, 1665 bp, Oryza sativa
  ref <308>: DATABASE ACCESSION NUMBER: AK060183
  ref <309>: DATABASE ENTRY DATE: 2001-12-06
gtcggtggctttgctgggcttcaggggcgtggcctcgtcgagtttttttgttcctcggaggggcggcaaggaggcggatttggagcaattcgtaagactagtggtggtggtggtggtggtggctggttggcgccatgagcttcgtgttccgggggagcagaggtgacatcgaggccggaggcttcccggggttcgccccggagcgccgcgccatgcggattcatgcgggtggtcggccggtgaacagcaacctggcttttcttgtcactgttcttatgttgttcatggtactgaactcacaccagatgtctccgaactttttggtttggctggttttgggtgtgttcctaatggccaccagcctaaggatgtacgccacatgccagcagctccaagcgcaggcgcaagctcacgctgcagctgccaacggcttccttggacacactgagctgcgggtgcatgtcccgccgaccatagctctcgccacacgaggccgtttgcagagccttaggctccaacttgcgctacttgaccgcgagttcgatgatttagattatgatgcccttagggccttggatgcagacaatagccctcatgctccttcgatgagtgaagaagaaataaatgctcttcctgtattcaaatacaaggttcaggcacatcagggaagtgcctctttccgaaaaagtgatggaccatctcaaccatctgtttcttctactgaatctggcaatgagaaaaagcaggatcgtttcaaggctgatgcaactgacaacaccctggaggatgagttgacatgcagtgtttgcttagaacaagtcgttgtgggtgatctattgagaagcctaccatgcctgcaccagtttcatgcaaactgcatcgatccatggttgcgccaacagggaacatgcccagtttgcaagcaccgtgtaagcgatgggtggcatggtgaagcagatgcttctaacatggtataagctgctgggagtggccagcaggtcttaagctaaaactactgacttaacccacggaatgaggattagctgtttagtcttgaggagtgtttttgtacataaaaaaacgttcacttctctgtgatgtttatgcatcaaaaggttgtgatatttttggttgacctgtaccctgttcagtatgaactcacatacaatcctttttactctgtttccgtggggaaattggcgtattatgggtgtttaaggctgaagatcagtagaggatttaagatccaagagtagtggtctggtctctattagtcttaagtaaaaatgatcttaactgttagtattatcacaagtaaaaaggagaaactgatttatgagtcctaccatcattatatttttttccttatttagggcaatcaagtttttgactattttaaagactcttaactactaatttagctatgcttctatgagtttactaatgtagcctctatactacgcgcacgccagcgtccaagccgagcagcgatgctgtgcactcccactcgacgcggtcgtgctgcgacgcttcagcctgggccttggatggcaattagtctgggtttcttttatgtttcgactgaatcatttgttttgaactcaaatatcccgtatatgaacatctgggaaaaggataaagaaatggcgatactttatctcggtg

SEQ ID NO: 2344 - DNA, 870 bp, Oryza sativa
  ref <308>: DATABASE ACCESSION NUMBER: AK060184
  ref <309>: DATABASE ENTRY DATE: 2001-12-06
gattctgcagtatctggccacatccacaggtatgagagggcaaggcccagggaagcatatcttgatagtcgatatactaatgaatacccaagacataggcactcaaggcatgaagaatccatccagcgagatgcatacaggagtaaatatggacactcctacctggagaggtcacacagagattcttgcccagattgtaatccaagtgatcatagttccagtgccttctataagacagaccatgagccaacaccttcatcttcccaagtagcatcccactgtgaggaatcgttcagtcagggccgtaagttgatggcatcaagttcccctgggatgtgtaattgtggcgaatgctatgttgaacaagatgcagcccccgcaagctcccaagtggtgcctcttcgtcaccagttggccaaaccttttcatgagcgaagttctgagcctgatgaccactctgcttctgcctatgaagctgcggagtacaaagaacgcaagagcaggtatcatccatcttccagagatggccccagtaatactcaccacaggaattaccgtagacaaggaagataggtccaagtaagcaaagctaagctttcgacaaggtagagaagctgctcatggcagtgcagctgctgctagagctatacttatttagtagcgtcgagttaccattggtgcattggtggtgctcccccgatgcagaatcctcccaaaaggatttctggcttttgtgggcgttgcaattttttccggccctgtggttgcgcacattttaccttgggatgccatgtcatgtgatgtgacattgtagttcgtttaccccggatacataccgatagaaatccaaagaaagagatgttaacttgc

SEQ ID NO: 2345 - DNA, 886 bp, Oryza sativa
  ref <308>: DATABASE ACCESSION NUMBER: AK060185
  ref <309>: DATABASE ENTRY DATE: 2001-12-06
tagcttaggtggaaggcgaagaaggcccccttccgggggggcccgagccatcagtgagataccactctggaagagctcggattctaaccttgtgtcagacccgcgggccaagggacagtctcaggtagacagtttctatggggcgtaggcctcccaaaaggtaacggaggcgtgcaaaggtttcctcgggccagacggacattggtcctcgagtgcaaaggcagaagggagcttgactgcaagactcacccgtcgagcagagacgaaagtcggccttagtgatccgacggtgccgagtggaagggccgtcgctcaacggataaaagttactctagggataacaggctgatcttccccaagagtccacatcgacgggaaggtttggcacctcgatgtcggctcttcgccacctggagctgtaggtggttccaagggttgggctgttcgcccattaatgcggtacgtgagctgggttcagaacgccgtgagacagttcggtccatatccggtgtgggcgttagagcattgagaggacctttccctagtacgagaggaccggagaggataactgctgaaagcatataagtagtaagcccaccccaagatgagtgctctctcctccgacttccctagagcctccggtagcacagccgagacagcgacgggttctccacccatacggggatggagcgacagaagcatggaaataggataaggtagcggcgagacgagccggttaaataggtgtcaagtggaagtgcagtgatgtatgcagctgaggcatcctaacgaacgaacgatttgaaccttgttcctacacgacctgatcaaatcgatcaggcacttgccatctatcttcattgttcaactctttgatgaaaagatg

SEQ ID NO: 2346 - DNA, 1087 bp, Oryza sativa
  ref <308>: DATABASE ACCESSION NUMBER: AK060186
  ref <309>: DATABASE ENTRY DATE: 2001-12-06
agcgatttcatccaagcaccacgccgccgccgccgtcgaagccgatctcctgcgcgcggagcggatcgcctctgtcagtcaccagctatacagtatgagttcactggagagtgcaagagcagatcttgctctgcttattttatacctaaacaaggctgaagcaagagataagatctgtagagctatacaatatggctcgaaatttgtgagtaatggacaaccagggcctgcacagaatgttgacaagtcgactagtctagctcgtaaagttttccgactttttaagtttgttaatgatctgcatgctttgattagtcctcctgccaaaggaactccactacccctgatcttacttggaaagtcgaagaatgcactgctatcaactttcctctttctggaccaaattgtatgggctggaaggacaggaatatacaagaacaaggagcgagcagaattcctcagcaagatagcattttattgcttcctgggttctaacacatgtactagtattattgaggtagccgagcttcagcggctatccaagtcgatgaagaaactagagaaggagcttaaacaccaggagctgttaaagaacgagcaataccagatgaaactgcagaagtgcaacgagaggcgtctcgctctcatcaaatcgagcctcgacatagttgttgctatagggctgcttcaactggctcccaagaaagtgactccgcgtgtgacaggggcgtttggatttgctagctcactcattgcttgctatcagttgctcccagccccagccaaatccaagtgatccacctgaaggggtgtcagtgggcagttccaatgttgcaaccagtaagaaataaaagtggagctgcttgattgactcatgtggacttgaaaatcctttgtgggttatggttaatatgatgatctagtggattgctgcagctgtaattttaaggtgcagtacttgtgacaaaaaataagaaacttagcatgggaaaaatgttgcattgtttgccaatggtttagtgttgggactagctaataagaacattgccattatatcaacatctgtttgtgtgccttgttcgagact

SEQ ID NO: 2347 - DNA, 1632 bp, Oryza sativa
  ref <308>: DATABASE ACCESSION NUMBER: AK060187
  ref <309>: DATABASE ENTRY DATE: 2001-12-06
acgaatggcctccgcgggcgtggctcggacaccatgttcaagagggacgcccccagcactgacatgatcagcggcctccccgaaggagttcttcaccgcatcatgtccttcctcaccttgcgcgaggcagtgcagacgtgcgtgctctcgcggcggtggcgcaacctctggctctccatgcctctcatcaacgcggactacaagcagttcttcgagatgacggacactaaagcgggatacgacgaggcgttggcggtggcggtgccgatgttcaagagatttgtgaaccggctgctggaactccgcgaccctgttgcctctattgacaagttctgtctctggtactccatatctgatgacaacgaggatgacaccgagtcgcaagatgctgccgccaacaggtggatcagtcaagctttgcagaagaaggcccgggttgtagaggtttacggtgacctcgtcttcgctgacctctacccgttggtgattgatcactctgtgtttacttcaagctacctgacaaaagttgtgttctcaagtgttcttctggaagatggtttcttcaagcaactcgagtcgggctgtccagcattggaagatctctccttagatgactgcgtcattagcggtgatgagatctcctcccagacactgaaggttttgaccatcaaggacactaagttctccatggaacacaagacttctattaatactccaagtgttacttctctgacattgtggaggcctgcgcacggcatagttgtactgaaggacatggcatcagtagtgactgcatcagttaaacctagtgagtttattgatgaatttgacgctaggggtttgcgccaatatctatgggcactttctggtgttaaaaatttggagttctattatctgggcgagctgacaatcgaaggcaatttgcaattgtgtccgaaattcaacaatcttgtcaacctgactctcggtcgatggtgtctggatgcgaatttctatgctttaattttattcatgcagaacacaccaagactagagaagctaacactgaaactccatccgtttcgttatcagcaacaaagaatcattggtgagcttactgaaagatcatttacatgtggtcatcttaagattgttgaagtcatatgctcggagaatgatcccctgatcaaccacttggttgacttctttgttagtagcggtatgaccactgctcagattcatatcaaacactaaagccagatgcagcatcaagggcctctaattttctggcctgagtagatatgaaatatcaaaggatctcttctcttgttgtcccattggaaaataatattctttttgggatggatatacatacattggttgattccagctgagttcgatggcacataagactagtttatcttccgctcttgtttggtgctacgacttgagtgcacccaatcagttgtcttggatcttgacttcttgagttgctccattgcttgtaccttgtaatgtcactcagtgttgttctatccgcggatattcgttctgcctgtttggttacattgtttgctggaaaaccattgatcacatgatcagaacactgcatgttacatgtttgagtatcccatatgggattcatgttttttt

SEQ ID NO: 2348 - DNA, 1597 bp, Oryza sativa
  ref <308>: DATABASE ACCESSION NUMBER: AK060188
  ref <309>: DATABASE ENTRY DATE: 2001-12-06
gacaccgttctctccctcgcgacgctgtttctccccgcgaaataaagtgacgtcaccgaacgcaggcccgccgcctccgcctccgcttccgctcgcccggacccgcctgcgccggccgcacaagggatgcgctccctcacctcccgccaccggccggaaccctaaggaggcgcgtgcccacctgcggctgcctccggcttcggcgatggggcggccgggttacctgacgctgccaatcctctcggtgctcgcggccatcgggtacgtctactacaccacggtgttcgtcgccgtggcccggtggctggggctcgccacggcggccggggccgcgaacgccgcggcgatcaccgccctcgccgccgcctgcgtcgccacctacgccgtcgccgtgtgccgggacccgggccgcgtcccgccctccttcgcgcccgacgtcgaggacgccgagagccccctccacgagatcaagcgcaagggtggggacttgagatattgccagaaatgtggccactataaaccccctcgtgcacaccattgccatgcttgcaaaagatgtgttctaaaaatggaccatcactgtatatggattaataactgtgttggacatgagaactacaaaatattttttatctttgtattgtatgctgtaactgcatgcttctatgctatgattcttatcatagggagcgccatgtacagtgttcctgtagatgaacattcaagcaatgattcttctaggacatcgattatcatttgtgggatcattctatgcccgctgactttggctttgacagtgctctttggttggcatatctacctcatattacagaataaaactacaattgagtatcatgaaggtgtgagagcaatgtggttagcagaaaagggtggaaatctttatcatcatccgtatcatcttggtgtctacgagaatcttatttcagtgctgggacctaacatattctgctggctttgtccagtatcgactaatacgggaaatggcctccgtttccgtacatcacatgatattccattatctacaccatcgatgtgattaacacgagatactgttatttatttattcattaggtagttgctaatctgaacatagacctctggcttcctattagattgcccatatgtgcctcttttttttttactgaagcattgtgttttggagcagtacagataatctgtcaaggtcttgaagctcctttatgaaatgtgctataagtgtaacgtacaggacctccccgcggctccaagttaggacatgggctaggctgctcctttgttttcgtggtggttattttacatacttgatgaggcagaacatgctgcctcgcctgtaatttagtgtagtctctgattgcgtttattaggagatttgaatgtagtcaattctgttgtagatctccccggcaggaaaaaatggggggctgctgtaaatccaacatccatactttgttctcttaaagagccacttatggcagcgaaaggccacgataggaatcatctgagattgttcgcatacatgtttattaagaacagaacttatatttatttgtcatacatcgacgcagtttctttgtgt

SEQ ID NO: 2349 - DNA, 1453 bp, Oryza sativa
  ref <308>: DATABASE ACCESSION NUMBER: AK060189
  ref <309>: DATABASE ENTRY DATE: 2001-12-06
gctattgggctccctcgtcctcgtcttcccctccatccgccaccgccgccgccgccgccgccggcgatcttctcaagtgccgccgccggtggttcgattctttctttctttctttctttcttttttccccaatccgttcgtccgccctccacctccgacgcggcggcggcggcatgaagcggcaccagatggagtcggtgccgaggacggtctcgacggtggtgcccaacacggcggaggccacccacgtgttcgacatcgtggggtacagctagatgaaggggaggggccgcgaggagcacgtcacgtcggggaccttcgtcgtcggcggcctccactgggccatcctcctcttcccggacacccacgtcatcctcctcgacgacggggaagacaacgtcaccgccctcctcgagctccagagccaggggggaagcaaggtgcgggcgtgctgcgacgtcaggctggtcgaccagaccaccggcctcgcctcctctgctgcgccggcgcagccggatgccaagacattcaaggtgttcaatgccgatgaatccaacagggtcagctgtctcaagatgaagaggaccgaattcgaggcgccgccgtatctcgtcgacgatcggattaccctggagtgtgtggtcactgtcaagaaggagccgagggtgtcgagagctagaccagtcccgaggatcaaggtgccgccgagcaacatgatgcagcaactcggcgatctgctggagtccaaggagggggcagatgtggtgttcgatgtcgcgggggagaccttcccggcgcacaagcttgtgctggcgatgcggtctcctgtcttcaaagcggagctatgcgggccgatgagggagagcgggacagagcctatcagcattgtggatatgcaaccggttgtgttcaaggccctgctccagttcatctatactgattggttgccgtcaattcgtgatcttgggggagacgataacagcgagatgatccggcacttgcttgtcgccgcggacagatatgctgtggacaggctgaagctgttgtgtcaaagcatcctttgcaagaatcttcgtgttggtaacgttgcaactacactggctctggctgatcaacatcattgtggcatgcttaaggatgcttgcattgaatttatgtcatgtccaaacatgttggatgatgtagtggcatcccaagggtttgtggatcttgaaaacacagctccttctctcgtcgcttaggcaaaggaaaaaatgggcaggttcaagaaaatgtcgaggatgacaaagagcaatgcaccggaagatgaacctaacagtaattcgtttagtttataagtaatatggatatctgtctacttttactggatcaggtccttgtggttactttactctctatataaatagaaataacttaaacactggtattgcttgcacctattgtgttaagaatt

SEQ ID NO: 2350 - DNA, 1781 bp, Oryza sativa
  ref <308>: DATABASE ACCESSION NUMBER: AK060190
  ref <309>: DATABASE ENTRY DATE: 2001-12-06
aaaaaaaaaaaaaagaatcaaggattttgtgcagagtcgagatcctgaaatgggaaccccagtaaatacgacagaactttcgggaaaagacaacatggcatctctgattgttccggatgatttccgttgccccatatcgctggatttaatgaaagatccagttattgttgccactggacagacttatgagcgaggatgcatagagagatggttggaggctgggcatgacacctgtccaaagacacagcagaagcttcccaataaatctctaaccccaaattatgtcttacgcagccttatagctcaatggtgtgaagcaaatggtatggagccaccaaaacgtgctgctcaacatcataatgcaccagcatcatgtaccgctgctgaacatagcaacgtcgttgagcttcttcagaaattattgtcacaaaacctagaagaccagcgtgaggctgcaggtatgcttcgtcagcttgccaagcgcagtcctgaaaatcgtgcttgtataggagatgctggtgctattcctattcttgttagcctgctatctataactgatgttagcactcaagagcatgtagttactgctctcttgaatctttcgatatatgaagagaacaaggcaagaataatcacctctggagctgttcctggagtagttcatgtgttgaagaggggaagcatggaggctcgggagaattcagctgccacactgttcagtctttcactagtagatgagaacaaaataacaattggggcttctggggcaattccagctcttgtgcttctgttgagtaatggaagtcaacggggtaaaagggatgcagctacagccctatttaacctgtgtatctatcagggcaacaagggcaaagctgttagagctggattgatccctgtactattgggactagtcactgagactgaaagtggtatgatggatgaggcccttgctatattggcaattctctcgagccatcctgagggcaagactgcaattagttcagccaacgccattccaatgctagttggagtaatcagaaatggatcagcaaggaacaaggaaaatgctgctgctgttctggtgcatctctgcaatggtgaacagcagcaacagcatcttgctgaagcgcaggagcagggaattgtgaccctgttggaggaactagccaaaagtggcacagacagaggaaagaggaaagcaatccagcttcttgagcgaatgaatcggtttcttatgcagcaaagtcaagcccaagcccaagcagaggccatggcacaagctcatgcgcatgcacagtctcaagctcaggttcaggctcttaacgaagctcaatctcaggtagagatgcaggtggagcaattgttgcttccaactacttcacatctttctgatagacgagacggttgataagcaggatgttattcatagttagtgggtttcttttttattcatagtcagcggcttgtttttttggctgaggctagcagttggaagatcgcctgcaatgcctagcgtggaggtgtgtggtttttgttaagcaattagaatcaggaagtgccattagcgtgattctagggccatgagcttcttgacaattgagttttgaggtcgtggaactgttaacctgtgtgccgtttgtacaatgcacccagtgatgaatgttgggaccctcgagttttagggaggtgccattctacttgtacccggtgcctattacaggactggtctgtggcttccaaggttgataattttacttgcctgactcacagtttcagtg

SEQ ID NO: 2351 - DNA, 1201 bp, Oryza sativa
  ref <308>: DATABASE ACCESSION NUMBER: AK060191
  ref <309>: DATABASE ENTRY DATE: 2001-12-06
aagtccacccccccgaccacctctccgactgccgcgccgcctcctcctgccccggcgccaactgcacgccacggaacgccaacgccaacaacgtctgcccgccctacctcgtcgtctacggctcaggatccaccgccggcctgctcatctccgacacgctgcgcacgcccggccgcgccgtcaggaacttcgtcatcggctgcagcttggcgtccgtgcaccagccgccgtccggcctcgccggtttcggccgcggcgcgccgtctgtgccgtcccagctcggcctcaccaagttctcctactgcctcctgtctcgccggttcgacgacaacgccgccgtcagcggcgagctgatcctcggcggcgcgggtggtaaggacggtggcgtcgggatgcagtacgccccgttggctcggagcgcgagcgccaggccgccgtactccgtctactactacctggctctgaccgccatcacggtgggcgggaagaacgtgcagctgccggagagggcgttcgtcgccgggggcgccgggggaggcgccatcgtcgactccggcacgacgttctcctacttcgaccgcacggtgttcgagccggtggcggcggcggtggtcgcggccgtgggagggaggtacagccggtccaaggtggtggaggagggcctcggcctcagcccctgcttcgcgatgccgccggggacgaagacgatggagctgccggagatgtcgctccacttcaagggcggctccgtcatgaacctccccgtcgagaactacttcgtggtggccggaccggctccgagcggcggcgctccggctatggccgaggccatctgccttgccgtggtgagcgacgtcccaaccagctccggcggcgccggagtctcctccggcgggccggcgatcattcttgggagcttccagcagcagaattactacatcgagtacgacctggagaaggagaggctcggattccggcgccagcaatgcgcctcgtcgtcgtaagctccaatccatggcaatggcgggggcttgtgctgatcgagttaattaattacgtactccacgtacgaaaaaaaagttagttgatgataaagctgtgcgtttatgcagctttctagtagtaattgtattagctagcgtgtcccgtattagagcgaggttagagatgaagcgcattttatgaacaataagatattact

SEQ ID NO: 2352 - DNA, 634 bp, Oryza sativa
  ref <308>: DATABASE ACCESSION NUMBER: AK060192
  ref <309>: DATABASE ENTRY DATE: 2001-12-06
tttgaggagaaccatgagtttcctccaggtcaatttagcaagccttctcagctgaaggtagatgtttcagttgatggcacagatgcaattgaaacaaaggaggctaccccattaagcaacgcaagagcttctctaaggaacattgacttaaacatagagcttactgactatgatgatgagggttcagctccactggaggtccagcctccagctccggcagcaggtgtggttacaacctcttcaggaccacttgtttcggaggtgaacgaagaggcgaagaccaaagactttctaggatggcaattgcctgagctgaccaagatggccatggaccctgttcagtttgccttgtcttcaaaccataggttagaggaggatgaggattatgacaacgaagaatgataacttgccccttttaggttaagaagctgatagatagacatgacttttgtctattgtacatccttgtagcccagcttaactctgtagctgatcttgtataatatgtgtacctgctgaagctgcagtagtttaggatgttacagaggtttatcgatcgatagctagcaactatgttgacagacagattcatcagttgtacatcctatctgatctccagtttatgatagtttgc

SEQ ID NO: 2353 - DNA, 1100 bp, Oryza sativa
  ref <308>: DATABASE ACCESSION NUMBER: AK060193
  ref <309>: DATABASE ENTRY DATE: 2001-12-06
aagagcagaggagagaaccccaccttggcaaaaagaaaagaaaaataatatcatcgcactttttgctgcccttttcatcccctcggatattcacgaagcaaatctctctgcaattcttttctttttttttttgatcttgcggatcttctccattgaggaaaggcgagagctttgggatcgattccgggccatggcgaaggaggtggatccgtgcgaccacggcgaggtcgtcgacgccgggtgcgtccgcgccgtgctggccgagctcgtcctcaccttcgtcttcgtcttcaccggcgtcgccgccaccatggccgcaggggtgccggaggtggcgggggcggcgatgccgatggcggcgctggcgggggtggcgatcgcgacggcgctggcggcgggggtgctggtgacggcggggttccacgtgtccggcgggcacctgaacccggcggtgacggtggcgctgctggcgcgggggcacatcacggcgttcaggtcggcgctctacgtcgccgcccagctgctggcttcctccctcgcctgcatcctcctccgctacctcaccggcggcatggcgaccccggtgcacactctgggctcagggatagggcccatgcagggcctggtcatggagatcatcctaaccttctccctcctcttcgtcgtctacgcgaccatccttgacccgcggagctcggtcccgggcctcggcccgctgctcacgggcctcatcgtcggtgccaacaccatcgctggtggcaacttctccggcgcgtcaatgaacccggcccggtcatttgggccggcgctggccactggagtgtggacccaccactggatctactggctcgggccgctgattggcgggcctctcgctgggctggtctatgagtcattgttcttggtcaagaggacccatgagcctctgctagataattccttttagtagtctggtctctttagatggtttcatttgcagaatgcatatattgccaggtagtaataagatgcttgtgcagcttgtaggcctgtaagggctgtataattattattttctttttgccctcgaggattttatcaacgttgataatcagccatgt

SEQ ID NO: 2354 - DNA, 1119 bp, Oryza sativa
  ref <308>: DATABASE ACCESSION NUMBER: AK060194
  ref <309>: DATABASE ENTRY DATE: 2001-12-06
ataagaagatatcgacagtggcaattgtcccaagctgcttgtttgtcttcatctatagttcctgctgctttgatgcatgggaatagagagatccttgaagcaggtgagcgaaacttcaataggtttggtggatggttgggaaagtactcgaccacaaataaaaacataaggctactggaagatgcccatagtcatattcttgcctcccagcaagcaaatttggacagggagtcattgaggctggattacctcactcttctcttgagacaattgactgatccactgaagacaatgcccaaggatgaagctgtgcaaaaagtggtggggtttatggatacctactctttaagccaggaagactttgacacaattgttgaattatcaaaatttaagggtcatccaaatcctatggatggtattcaaccagctgttaaaagtgccttaacaaaagcatacaaacaaggaagtagttctcgtgttgttcgagcagcagatctagtaaatatcccaggcatgaaaaagccattaaagaaacgagtggcagcaatccttgagccagtgggagagagtttgcctgaagaaaatggagtagcgtcatctgaaggcgatgaagaggattcctctgatgctgaaaataatgatgaactggtgcctggtgacacaaaaccaaaactggacctgcagagtgataagaagaaagggatccaagtgcagctcgacctgaagagcaatggcaatggcttgaactcgaagaagatgccggctggtagatcaaaagcttctggctctgctgggaaggctgctggaggctcaggtgggaagaggaagaggtaaacgtccgccggccgccgtcatttagtcggtggtgaatctacatgaacatcctctgatattctggggcagaatgcggttcaaattcttgcttgtacataagtcccaatcatctttgtaggcagtagtaggcaattggtatctgctccagatattttgtttcctcccacttgtatgagcttcatttcgctctactggcatttggccagttttcagctttgcaagacaacgtccattattgttgacttccgttcaatgaaattgtgtcatgtttgttgtccttttgat

SEQ ID NO: 2355 - DNA, 1824 bp, Oryza sativa
  ref <308>: DATABASE ACCESSION NUMBER: AK060195
  ref <309>: DATABASE ENTRY DATE: 2001-12-06
gaacacaaacagttgaggaatgcacacagaagagaattgactgtggtgtattttatgtttcattgttggtagcactattgttgttagtgccatcatggacgcgtcttattcaaggttttgaagtgcatccatttgtttggtgagcatataagtttgcatttcattggaagggcataaaagcatgcactctgttagtcaaatattgaaaaatttcttcctgtgttgcttctaaaccttgtgcatttttgtacgtattgaattttggttcacttaatggtttatattcacagggtttttaactatattttcaccgattcacgtgaacggcttgctttatgcgcatactggatatttgtgatatatgtatcaattagaaggttctacagtatatcaaaacaaagcaaaacggagaggattcttttgcgcaagtattaccatctcgttgctgtcctaattttctctcctgcagtaatatttcggcctgatttcttggacttagcatttggtgcagcatttgccgttttcttaatattggagatggttcgagtttgggaaatataccctcttgggcatattgtgcatcagttcatgagtgccttcactgatcatcgcgattcggaaattctaattgttagtcatttctcactcttgctgggatgtgcacttcctaaatggatgtcatcaggattcaatgaccgacctcttacaccatttgctggaattctcagcttgggtattggtgataccatggtaggttctatgtccagtgcgtgatcagttaatattttcttatgttagctgcgttcagtatgatgaattctcttgttttacctaggcatcaatgataggttataagtatggtgtcctaagatggagcaagacaggaagtgagtttaatttccattattatttattccatgattgataattgatctcttatgcacatacttttgaaatgttagagaaaacaattgagggcacagcagcaggcataacttctgtattagcagcctgctcaatcctgctgtcactcttagcttcaagtggatacatactttcacagcattggatatcacttttggtagctgtgacattgagcggtttattggaagcatatacagcccaactcgacaacgctttcataccccttgtcttctatagcctcctatgtctataggagcaaccaattgtacatcaaactaccttgaggccctattcttaccattactaatatctagtgactagtgcagtacagtataggtatagcccttcgaattttttttttaaatcctcttattggtcgcattctctgtattcctggaccgagaaattgtgtccatcactaaaaagttgagtttaggtttaggaaataaagatgaaaatatgaaaggttgtttagtgaatccttcagtagagagcatctttggtatgatagacttctgagcctatctggaggcatcaatgtatcatggaaggtatgttgtctttcagaaccagaacttcttctgcaggtggtgagacctatttcaccccacaactccacaagcagttgggcaagaatagcaagctgagagtaaagccatatgctgcaaggagcctgaaatacggagacttggttcagaattagtgtatatggtaccttatttccatggacatgcgaagtgtaattagttgtagtagctaatctcctgtaagttttgcgtcatcactgtacggagtaaaagatcactactcagattgcagccgcgcattgatgtaaattttgttcttgacctgagaaaaaatgaaatcgaagtaagcaaagctgcaaattaatgttctctt

SEQ ID NO: 2356 - DNA, 1838 bp, Oryza sativa
  ref <308>: DATABASE ACCESSION NUMBER: AK060196
  ref <309>: DATABASE ENTRY DATE: 2001-12-06
ggttttccggaaaagctcatcgaaatgccaaatgacagagaattgacatgtggaatttgtttcgaaaattgtcctcgtacgtcaatgagtgctgctgcatgtggccatccgttctgtagtgcatgttggagaggttatattagcacttctataaatgatggtccaggatgcttgatgttaagatgtcctgatccgtcctgcacagctgctgttggtcaagatatgatcaattcactggctgatgacgaggatagggaaaagtatgggcgatatcttcgcagatcttacattgaagataataggaagacaaaatggtgtcctgctcctggatgtgaatatgctgtagaatttgtcatgggcagtggtagctatgatgtgaactgcaactgttcatacggcttttgttggaactgcactgaggaagctcatcgtccggtagactgtgccactgtttcaaagtggatcctcaagaacagtgcggagtctgaaaatatgaactggattctagctaattcaaagccttgtcctaagtgcaagcggcccattgaaaaaaaccagggatgcatgcacattacatgcacacctccatgcaaatttgagttttgctggctgtgtcttggtccatggtcggagcatggagaacggactggtggattttatgcctgtaaccgttatgaggcagcaaggcaggaaggagcgtatgatgaatctgaaaggagaagagaaatggcaaagaactcgcttgagagatatacacactattatgaacggtgggcagccaatcagtcgtcgaggcaaaaggcattaggagatctgctgagtttgcaaaacgacaagcttgaaaagttaagtgatatacaaagccaaccagagtcacagctcaagttcatcatagaggcttggttacagattgtcgaatgtaggagggtattgaagtggacttatgcttatggtttttacctcccagagcatgaacatgccaaaagacagttctttgaatatctgcaaggtgaggcggaatcaggtttggagcggctgcatcaatgtgcagagaaagaacttcaagtataccttgaagcagaatctccctcaaaagatttcaatgacttccgtacaaagttggctggattaactagtgtgactcgcaattatttcgagaaccttgtccgggctttggagactggattaaatgatgtaggtccttccactagccatggtacatgcagcaagagcgcaacttcgaagagtcttggcagtaaaagtaagagtagcaagagcagagcatccagtaccagctccaaaacaggtggctcgagccgtggtgtcgatgaaagcaacatttggacgtgtgaccagtgcacatatgctaaccccagatctgccagaaactgccaggcttgtaacaaccagcatcgatagcattacatagctatggttttagatctcgactccattggttgagaaacctctggttcaaacctggtggtaaagaacatatgcaaagttgaagttttcaatgaacagtggagctggcgtgaggaggtattagcagagaactgttgcctatgcaaattagattttctcaactcatcatgtgctatggctaaaaaacctcaggtcattcccaatttttttaatcaactgacggtatccttgaagcctcgctcatcatcatctagttcatcctgtatataactctatatcgatatctgtaactcttgtgttgttctatggaagtagcgcgtactagcagatgtgcgccaccaatgaactgagttgttgtaatgatgttgtaaccttgtaataatgaattggccaattctcaaggaaatttattc

SEQ ID NO: 2357 - DNA, 1647 bp, Oryza sativa
  ref <308>: DATABASE ACCESSION NUMBER: AK060197
  ref <309>: DATABASE ENTRY DATE: 2001-12-06
agcagctgcatttgttttggtgctgcactcactcactcgtcttttggtttcttgggggtcaactgtgctgtgctcttccatctttcctttctcctcctcctctgcttctttgattgctttgcactgtttcagctgggtgtgtgcttctcctccgttccttggctcctgcaacttttcactgttcttggcaggttcctgtgttgctttgtgttgttgctcttgttctttctgactgttctcttgttcttccataggatcggatcggtacaatacagccattccatccataaaggtggccaaacctcatctttcagattcagcttggttgttttgctgcgtgtgagcaagttttctgagcttttcttttgtgcaagaagcaaagaacaagacaagaatctggcttgcttgttctttatcgttagaaggaatctccgcttgctgctgcttcgtttctgcatctgtttctgttcttctaatggtgaatgaataatccctagagcgagagagagaaagctgtagatagagttaaagatgagagctctgagcagagtcggcgtcgggttggcggtggtgtccgcgctgctactgctcgcgctcgccgccgagctctactacctcttcgtctacaagcgccgccgctccgccgccatctccgacgccgcctcctcgccctcctcttcttctcgcgagctgctccagcttttctgcttcaagaagccgcccgcgctcgcctcgacctacgcgcaggagccgcacgccggcgaggcggtggtggccgtggccgtcgacgacgacgacgacacggtggaggcgcagctgatgcggctgggcagcctcgtcggccccacgcggctgctcttcaccatcaaggaggagaccaaggaggacctcgagtccgaggacggccggagccggtgcgggaggagccggagcctcgccgagctgctgcattcgtcggagacgccgttcatgacgccggcgtcatcgccgctgccgatggacaagtccttcaaccctctgttcgagcccacggtggcggcggccgtgacggtgtcgccgccgcccaagtttcagttcttgaaggacgccgaggagaagatgtatcggcgggcgcccgccgaggaggccatgagggcgcggaggtcgccgcagacgaggtcaccggcggcggccggagaggaggacggcgggtacatcaccatcatggtggggaagaacaacaaggtcatccccttgccgtcgcctcccagcaatggtgatggtgatctgcagtagtgagttctttgcaaaattttaattaagaaggccttaattaactttgttcatccagtgttctagtgtagctctttgcctgtaattttctctctctctctctctctcttttctttttggtttatggtcttctgatcatgccaaattggatggttggatgtacataacatgaatattatcagcagccaagaacttcagatcaatatatttttcttcttctaatgtgtacttaatgacagtaattttgttgacgtttaacttggtgtaattaatgttttgatagagttctgtcattgttttttcagggtgtttgattgtaacaatttttatgatgtatgtactacgcggttagttatactacatgttacaaacatt

SEQ ID NO: 2358 - DNA, 802 bp, Oryza sativa
  ref <308>: DATABASE ACCESSION NUMBER: AK060198
  ref <309>: DATABASE ENTRY DATE: 2001-12-06
aagttctactacagccggcctaaggttaccttcccatttgctctcctcaacaacttcaagatgggtttcacatatggcctgtttattgatgccttcaagcttgctagctgacctgcaattcttcctattggtgctttgacatgttatgttcttgaatcttgaaaaacagcaaagatggtgaaaaaatagcatgcccccacgatgttattactgagacgagggatctatagttctgtggctttcctcagctttgttctcctatgtgaaggcaggcttgttgctggtatagtttttgagttggtggatagattttcaaagattggtccacatgtgggtatactgtagtgtgatgataacaactatttattttgagattcagattacatatgattgaagcccggtgtgtacatatgcaaatttcaagctatctgatcttgatcatctcaaaaaggctgtctaatttttaatggaacttggttcagatttaagtccattttgctggaaagactgtagccttgtgtgattttttatgctaatttcctcgacccagtaactcgaccgagttacacctaaatgcactaagcttcatctgtactctttgatttcatgtatcgaagatgcaaataatacagtagcacttgatctgtcctgttaagacctgctgtgccaagagttcatttcattgttagcaactacaggtgcaacagctttttattattattatttttgaaatggtgcaacatgtaatttgtatagtattagtaccaaccttgggcaaagtgtaagcaaacatttttattct

SEQ ID NO: 2359 - DNA, 1843 bp, Oryza sativa
  ref <308>: DATABASE ACCESSION NUMBER: AK060199
  ref <309>: DATABASE ENTRY DATE: 2001-12-06
gatgatagtgatgcatccagcagtgaagatgaagctcaaaaccctcaaattattcttagtaaagaggatgtttacaaggcaaatcacaagggcactgctgctactaagaaaaagaagaaagctaaattgcagcgtgtgattcgtagtatgaaaaggcaacaacgtaaatccactgaggacactggctccaattattattcaccactggcgtatttaaaggatcctcagggttttgctgagaagctcttctctcggctccagaaatgcaatgagcggtttgaggtaaggatgatgatgttaaaggttatagcgaggactattgggctgcatcacttggttttgttgaacttctatccatatcttcaaagatacgttcagcctcatcaacgagatgtaacaactttacttgctgcagcagtacaggcttgccatgatatggtgcctcctgatgcagttgaaccactgtttaagcagatagtaaatcaatttgtgcatgatcgttctcgcccagaggctattgctgttggcttgaatgttgtgcgagagatctgcatgagaatacctttgttgatgaatgaagatctactccaggaccttgttttatactaaaagtcccatgaaaaagctgtttccattgccgctcgttctctaattactttattccgggagatctgtccttctctgctagtcaagaaagatcgtgggcgtcctgctgatccgaaggctcgaccaaaagcattcggcgaagcaactatcgcttctgatgtgcctggagctgagttgctagatgaagatttttcatcagaaggggaaggctcagacgatgagtctgatgcttttgattctaatgatgagaaagagttgcaatctgctcgtggtactaaacaaaatttggatggttcgtctgaagcaaacaagcttgacacagatgaaggtatgaaagaggaagatcaactatctggggatgaagatgatacagaggaactagatgaggatcaagacatctctgacaatgatagtgaagaaaatgatgatgagctagaattggactctgatatggatgaggagaatgatgtatctgaatctgatgatgatgaggaactcagtgagaaattggatgattctgatgaaggctctgatcaggatgatgacagtgaccaggatgataagtcaaaaaacagcagtcgcaaggcaaataagagaaagttgagtgattatatagggcaacttaatgctgcagatgcaagccttcgagctctgaagaagttggcaggagccaagaaggctgaagcttcgtgcgatgaagctggtaaaatcttatctgatgaagattttaagcgtattaaggagctaaaggcaaaaaaagaagcaaaactggctctggcacaacatggactcggcaagggccatgacacaaaatcagtaacctttaaaatgccttcttctgatcagcttagtctgaaacgggttgacccatccaagcttgaggctcacataaagagatagcttacgaaagaggagagattagaaatggtgaaggctggaagagaggatagaggaaaataccaagcaagaacagctgtgaaacagaaaaagaccggtggcttgagcaataggcagaaacaacacaagaagaaaatgcccctcgctgcaagcagagcgaaggcagcgcgttctcgacaggagaagaaaaaactgcaaaagcgctcgggaaagcaattcagaggacggaaggcgtggaaatgagggattttttgtacttgcgtttgccaattcttgtggtctactggccaaaattttgactccttcagttaatgattttcgtatacaaatatggtttcac

SEQ ID NO: 2360 - DNA, 1700 bp, Oryza sativa
  ref <308>: DATABASE ACCESSION NUMBER: AK060200
  ref <309>: DATABASE ENTRY DATE: 2001-12-06
aatggaggagcgagccggagcgcgcaggaggcctcccatggccgtgcctccgcttctcctcttcctcctgctgctctcctcgttctcctcctgtgccgccgccgcttccggggctcccgtgggcgaggactacgtccggccgcccgcggcggcgcggcgctgcggcctccaccaccggaaggccctcctcagcctcttcccgtggagcaagaagaaggactcctcttccgcctccgatccgcagcaggtgcacatttcactagctggagaaaagcacatgagagttacatttgtcactgatgataactccgtcccttcagttgtagactatggaactgaagcaggcacatacacatcaacgtctcaaggagaaagcacatcatacagctacttaatgtatagttcaggaaagatccatcatgttgttattgggccccttaatgacaacacagtttactactaccgttgtggaggacatggtccggaattccagtttaagacaccaccctcccaatttcccttgtcattggctgttgtaggtgatctggggcagaccagttggacaacttcgacacttaatcacattaagcagtgtgcacatgatatgcttttactccctggtgatctctcttatgcggattatatgcaacatttgtgggattcttttggtacattggtggagccacttgctagcaccaggccctggatggtgacagaaggaaatcatgagaaggaaaggataccgttttttaagtctggatttcgatcatacaatgcacgatgggaggtgccttatgaagagagcgaatccacatcaaatctctactactccttcaaagttgcaggggtgcatgctataatgttaggttcttatacagattatgatgaaagttcagatcagtacgcttggcttaaggctgatctagctaaggttgacaggaaaaggacgccatggctcatcgtattgttgcatgcaccatggtataatagcaattgggctcatcaaggcgaaggtgacagtatgatggctgcaatggagcctttgctctatgctgctcatgtggatatggtaatcgcaggtcatgtgcatgcttatgaacgtgcggagcgagtctacaaggggggacttgatccttgtggggctgttcacataacaattggggatggtggaaacagggaaggcttggcccacaggtaccgcaatccgaaaccagcttggtcagtcttccgggaagcaagctttgggcatggtgaactaaaaatagtaaatgccacgcatgctcactggacttggcacagaaatgatgacgaagaaccagtgagaacggatgatgtgtggataacgtcgctggctggttccgggtgcatccaggacggtagtcatgagtacaggaaaattctgatgtccccttaagaacatctgaacagacatacagactacagttagtagcatagtctaagtgcctgccatgtatattgtatatatgtttacgacttgctaaaatacaatctcagaagctctttttttctgtattttgaatcttggctaatctggagataccactgtagcttgtcgacatatctcttgatgtatgcaacaatgtttgtagccagccaagtgaatggcattctgaggaatgcttaccttgtgtaactggacgacagtcatgatatgaaacatatgttatgttacaactgtt

SEQ ID NO: 2361 - DNA, 1637 bp, Oryza sativa
  ref <308>: DATABASE ACCESSION NUMBER: AK060201
  ref <309>: DATABASE ENTRY DATE: 2001-12-06
ataattcgccacttctcaattctcattaagctcagctcagctactaatcgatgagctcgggaccatcacttcgctggtagctcagctgattcgatcgatcagccatggcgggggagaggaggtggagcacggcggcggcggcggctggatggctgcgagtggccgccgttgtggtggccgccgcctctgccgcctcgtcggcggccggcgagggggtcggccggcagacggtcccggcgatgtacgtgttcggcgactcgctggtggacgtcggcaacaacgacttcctgccgccgccggcgccgaggccgccggagccaccctgcggcatcgacctcccgcccgaggccgccgccgccgacggcggcggcggtggccgcttcaccaacggcttcaacctcgccgacgtcatcgcgcagcatgtggggttcaagaagagcccgccggcgtacctctccctgacgacgccgggaagagacggcgaactccggcgaggcctcgtcggcgccaactacgcctccagcggatccggcatcctcgacttcattgggaacggcacaatcagccttggagagcaggtcaagctcttcaccaaaacaaaggaggcaatgatcaccgccggcgaggtcgacggtgagaacatcgacaacttgctctcccagtccttgttcattacctgcaccggcggcaacgactacaatgccttcactgatggcatcgtccccgtcagcgacgcgccggccttcatcgcccacatggttgccacttacatcaagcatatcaagacactgtacaatctaggggctcggaggctggggatacttgacgtgctacctctagggtgtctaccgatctccagggtccccattgaaaatggttcatgcagtggcactgacaactggcaggcacggctcttcaaccgtctcctccgacgagagatgaccgccgccgccacagcctccatgccggacttggtgtactccatcggcagcatttactacaccttctacgacatgataaagaatccatcttcggctggggtgagggaggtggcgagggcgtgctgcggagacggcaagctgaacgcggaggccgactgctcggcgaccaccctcctgtgcccggaccgggacaactacatcttctgggacaaggtgcacggcacccaggccgcctaccacaactgcgtccacgccttcttccacggctcgccgcgctacgccgagcccatcagcttcacccagctggtcgcctcgccggccgtcgatctggggcggccgtccccgggcacaaaccggacggccaggatttgatcacccaatggactcatattggtataagcattgttcattggtaaacaatgaaaatcgctgggtttcctttggttttgggagtcaggagatggagatgttgaattggggttgatgatggtatatatgtgcataattgaagtgtggtgatacctcacggtacatcctaaggaccacagattctcagataagacattgtacaagtttttgtgtttttttcctgaataattcctcctatgctatagagcacttgttgtcatgcctggaaattaagcagtgtctagttgatcactgcaggaagaaagaaatgcttgactagagaagaag

SEQ ID NO: 2362 - DNA, 1633 bp, Oryza sativa
  ref <308>: DATABASE ACCESSION NUMBER: AK060202
  ref <309>: DATABASE ENTRY DATE: 2001-12-06
ttttttttgtgtgtgtgctgtgttcttgggtttcttggcaatggtgattggggccgagatcaaggacgagatggaggaggcgccgccgctgctgctcgacgaggccgcgcgccctcgccgcgtcgcgctcttcgtcgagccgtctccgttcgcttacatctctgggtacaagaaccggtttcagaacttcatcaagcacttgcgcgaaatgggggatgaggtgattgttgtgaccaaccatgagggggttccccaagaattccatggtgccaaggttattggttcatggagctttccctgtccaatgtatggaaaagttcctctctcgctggcactcagtcctaggattatttcggaggttgcaaagttcaagcctgacatcattcatgcatcctcacctggaattatggtttttggggcacttgctattgctaaactgctcggtgtccctctagtgatgtcctatcacacccatgtcccagtatacattccaagatatacatttagctggcttgtagagccaatgtggcaagtcataaggttccttcatagagctgctgatctaacattagtgccatctgttgctatcagcaaagattttgaaactgcccatgttatatcagctaatagaatacgcctttggaacaaaggtgttgattcagccagtttccatcccaagttccgcagtcacgaaatgcgagttagactaagtgacggtgagcctgaaaaaccattgataatccatgtaggacgctttgggcgtgaaaagaacttggattttctgaaaacggtaatggataggctgcctggagtaagaattgcatttattggagatggaccatacaggagtgagctggagaagatgtttgaggggatgcctgccgtgttcactggaatgatgcaaggcgaagagctatcacaggcatatgccagcggtgatgttttcgtgatgccctcggagtccgaaacacttggtcaagtagtcctggagtccatgtcatctggagtcccggtcgttgcagctcgtgctggtggtgttcctgatataattccagaagatcaggaagggaagaccagcttcctgttcaccccaggagacctcgaagactgtcttggcaagattcagctattgctgacggacaaggaattcagagacaacatggggatgacggctagagccgagatggagaagtgcgactggagagcagcttccaagaagatccgcaacgagttctacaatgctgcgatctggtactggaggaagaagcgcgcagaattgatcaaaccgttgcagtggctggcgcagatgttcctaccagcacctgaggtcaacagaatcacacaacactgaagcctcaaggggatgcttctgcagccatgatccggtccttgtaaatttctgatctatagtgcagtgtcaataggtgagatagttcctcttttttttgtatggaattggaattgtgaatggtatggcaaagccatttgttgcctgtattgttgtagtggacaatgtgttgccttgttgggacatgatgtgatgaactgtatttgattataatccacggcatcaacacatcaagatgctattgtgcacgcaatgaaaagtttggtatcaactcttgagatgctg

SEQ ID NO: 2363 - DNA, 905 bp, Oryza sativa
  ref <308>: DATABASE ACCESSION NUMBER: AK104274
  ref <309>: DATABASE ENTRY DATE: 2002-08-28
ctttccccaatctcgcgcgacgcggcggaaccctagcccccaccgcgattcgctcgccggagagggagagggagggaagggaggctaggggaccccctcgccggcggcggagatggaggtgaagctgtggaacgacaagcgggagcgggagctcctggagagcctcgccgacctgtacgccatcatcaaggcgacggagaagctggagcgcgcctacgtccgcgacctcgtctccgccgccgactacgaggccgagtgcctcaagctcatctcccagttcaactccctctcctcctcgctcgccggcgtcgtcaccatcccccggttcgtcgaggcctaccgcctcgactgccccgccgccctcaaccgcctcgttcagtccggcgtccccgccaccgtcgagctccgcgccgcggcgtcctcgtccgcgccggcctcctccgcggcgtccgcggccgccatcgcccagtgcgtccagagctttattaccgccatggatgccgtcaagctcaacatgctcgccaacgaccaggtccgccccttgctccacgacctctcgacctccatggggaagctgggccccgtcctgccgccggacttcgaagggaaggtcaaggtgagcgagtggctcgccaagctaaataagatgggggccggggatgagctcaccgagcaacaggcaaggcagctcaacttcgatctggattcggcgtacagtgcgttcatggcatcactgcccagcaccggcctatgagcaagcctcatcctggttctgagttggtttcttctttttatttttctcatgtgtttttctatggatcaccgctgcagtgttatagccttataggtatgtgtaacttgaattgtgctatattatttgtcaataatagtgccaattttgtggt

SEQ ID NO: 2364 - DNA, 1988 bp, Oryza sativa
  ref <308>: DATABASE ACCESSION NUMBER: AK060203
  ref <309>: DATABASE ENTRY DATE: 2001-12-06
gcgcggagatggcggatgatatcaacaaactgttcgctttcttcagtgaatgcaagatgcagaactctaaattttactgggacatgcagctcgatgaggatggtgtggtgaagaacattttttggagccatgctagcagtcaggccgagtatgcggactttggtgatgcagtcactctggacacgacatacaagacgaacatatatgggatgtccttggcgatgttcgttggagcaagccaccatatacaagacactctgtttggttgtgcactactgcgagacaagaagatagaatcattcgaatggctattcaaaacgttcaaaaactgtatggaggattgcccctcgcctagatgcgtgctaacagaccaggacaatgtgatcgcggtggccataacaaatgtctttccgaagacaatacataggctgtgcaggtggctcatactgaagaatcactctgaggcactcaacattctatatgcaagggacgatcgcattgaatcggaattgttgttgtgcgtgaaccagacatacaccccacaggagtttgaaaatgcgtggtcgtggttcattgatgagtttgatttgcaggatagtgtgaccctgcaaaacttgtacgaaataaggcacagatggatcccagcgctcttcaagaaggactactgtggcaggatgacatctactcagcagagtgagagtgtgaacaaactagctaagagaaatttcgtcgatcaccaaaccaatctgcacagttttgcgcgtaggatgcttgatatcataatttcacgggaagcgaaggaggctgctgagaccagggcttgtttgggcatgccgataacaaagacaaggtggtcattcgtggtgcagatgtcaagggtgtacacaagagctgtgttcaagttgttcgaggaggcattggatgattgcacagctttcaggatcgacatggacattggcaacacaaacaggtggattgtgttggacatggagcattctgagaagcatgattggtgccaactacaatttaaagtgttagcggacgttcagaaaggtcgttatgaatgtgagtgcaagcagtgggaacatactggtttattatgcacgcaccttcttcggacattcatccatgctcaggtcgagaagataccacctcagtatgtgctctgacgctacacgatgaaagccagaagtgacatgtcatttgacaggcgtgaccgtgttacagctggacctgacagtgtggaagaaagttaccgacaaaagacactgctagctgaggcaatggctattgtacggttaggtagtaagtcaagggttgcatttgaaatagccatggccgcccttaaagtgctgcgaaaggaaaagagatgcttccagacagcgtggcatgtagggatgatatcgttgcacgcaacaatggtgcgggcacatcagctgaagtcataagccaagaaccaccacccaaaccaaagactaaagagcggacagtaggtccagaagagaatgtatcacttggtgcaagggggaagaagctctgtactagggtgtgcagctggtgtggactgagggatggccattacacaactacctgcccaaaaaatcccgcaaacttcgaaaaggtaaggaaggcaatgagcaggggtagagggaggagagggagaccacgcggaagtggaaggggtggcggtcgcggcatggcctgtgtaggtaggagccttatggatgaattggagagggagggcattactgaacaggacagcaacgacgacatggtagaatctgatgcggaatgagctgcaatgcagtgatatgtcgtagtggaataggtttcaaggctgaatacagccgatgtctatagccaaaactgtttggatcaatttcagtaacgtgtgtttgaaaatttggatgttagtgatatggtgtactgttggccatttgattgttgctggagattcaaaatatatgcgcgaggccaattgctgaccg

SEQ ID NO: 2365 - DNA, 1872 bp, Oryza sativa
  ref <308>: DATABASE ACCESSION NUMBER: AK060204
  ref <309>: DATABASE ENTRY DATE: 2001-12-06
aactgcctgctgaatccatgagcaggcaagagacaacctggcgaactgaaacatcttagtagccagaggaaaagaaagcaaaagcgattcccgtagtagcggcgagcgaaatgggagcagcctaaaccgtgaaaacggggttgtgggagagcaatacaagcgttgtgctgctaggcgaagcggttgagtgccgcaccctagatggctaaagtccagtagccgaaagcatcactagcttacgctctgacccgagtagcatggggcacgtggaatcccgtgtgaatcagcaaggaccaccttgcaaggctaaatactcctgggtgaccgatagcgaagtagtaccgtgagggaaaggtgaaaagaacccccagtgggtagtgaaatagaacgtgaaaccgtgctgagctcccaagcagtgggaggggaaagtgatctctgaccgcgtgcctgttgaagaatgagccggcgactcataggcagtggcttggttggaggaccttgcatcgacgattgtgggaaccccaaactacatgtgcccagaaatactagcagacataccttatggttacaaatctgatatatggtcacttggatgctgtatgtttgagatcttagcacaccgccctgcattcaaagctgcagacatggcatcattaattaacaaaataaacagatcttcaatatctccaatgccaccgatatattcatcatcactgaagcagatagtgaggagcatgctaaggaaaaacccagaacatagacccactgctggagaactattgaggcacccatatttgcagccttatctagctgaatcatgcagctgctccccaatctaccttccagtgaagcccaccaaaagtaacctgggagacaagcagcagtcaagaaaaccaggcagtggcagaaagcgaatcatcaaaaccaatggatccagtgaagcattagaaaccgctgcagagcaagctgtggatacaagagacaactccacatatatttcagatgtttcaacagttggtacccaggacgcctgcatttcacaagtatctgtggatcctcaagctagaaacaaagcatatcaagacatcgatgatttgacgctttttcaacagatagaggaaaatttgatgtcaataaccgatcgacagattgatgaggccatctttcttaaagctgtaagaaccagcagcacagtagatgtcgtgccagtctctggtgcaattcagaagcctaatgaggcaccaataccaaaggaggaactgaccattggagtagtgcaagagcagagaaaggaagtgaaagcacacactcaccaaggatcaaaaccaggcacaggagacgttcccatcgttacagaagaatcatcaccgaagagcgcggtgaaattggcacattcagatagcactcctgccgagtgggaccatctgaacatagtgcagcagagagctgacgcactggagtcgctactcgagctttgcgccaagctgctgaagcaggagaggcttgaggagcttgctggcgttctcagaccgtttgggggaggtgctgtgtcgtccagagagacggcgatatggctgacaaaaagcctcatgaccccaccaaaattggaagggtcaccaaaacttacgtaggggagcgaatttcatggctttgtttgcaagtgtgctgttctggttctgagagtgtatatagctttgctacagttcatgattctgtatcactgaggctcgagtttctatttatcttgatgtatatggtttgagtgagcgagggcattgtgtgagctaactatttatcagatatttactgtacaatggcatgtgctgtttggctgattcaagtaataatggaaatcataccatgttcattcct

SEQ ID NO: 2366 - DNA, 1183 bp, Oryza sativa
  ref <308>: DATABASE ACCESSION NUMBER: AK060205
  ref <309>: DATABASE ENTRY DATE: 2001-12-06
aagagggaggatcttaaccacactggcgcccacaagatcaacaatgctgtcgctcaagtcttgcttgccaagcggcttgggaaggaacgtatcatcgccgagactggcgccggccagcacggtgttgccactgccacggtgtgcgcgaggtttgggctgcagtgcatcatctacatgggtgctcaggatatggagaggcaggcacttaatgttttcaggatgaagcttcttggagcagaggtgagggcagtacattctgggacagcaactttgaaggatgccacctcggaggccatccgtgactgggtcaccaatgttgagaacactcactacattttgggatcagttgctggtccgcatccatacccgatgatggtgagagagttccataaggtgattggcaaggagacccgtagacaggccatggagaagtggggtggcaagcctgatgtcttggttgcttgtgttggtggtggatcaaacgccatgggtctcttccatgagttcgttgatgatcaagatataagaatgattggagtggaggctgctggctatggtgtagacactgacaaacatgctgccactttgacaaagggagaagtgggagttctccatggatcattgagctatgtgttgcaggatgatgatggacaagttattgaaccccactccattagtgctgggctggactaccctggtgttgggcctgagcatagctttttgaaggatattggacgtgctgaatatgacagtgtgacagatcaggaggcactggatgctttcaagcgcgtctctcggctggagggcatcatccctgctctggagacgtcccatgcgctcgcctacctggagaagctctgcccaacgctgcccgacggcgtgagggtggtggtgaactgcagtggaagaggagacaaggatgtccacacagccagcaagtaccttgatgtctgaaaaaactctagaggggctaaaaaatgatagcttttccatgagcagttttgaaagggtgcaatacaacagcagcaattgattagagctttgttatttggataaaaaagtaccaataatgcttggaagttcatattagctacaagagtatctttgtttgtttgtctttgtatctgaatgatgttattggcggagttggtaaatataactaaataaacaccaatctttctcc

SEQ ID NO: 2367 - DNA, 1628 bp, Oryza sativa
  ref <308>: DATABASE ACCESSION NUMBER: AK060206
  ref <309>: DATABASE ENTRY DATE: 2001-12-06
aaaaaggcccctcggcctcgccatcgccagccgccgccgacgagctccatccggcgagcagcggtggctgccgccggtccgcccgcccgtgccaagtgttgggtgttggtttgttcaagtctggaggaaattcgagcgaaatggcttcttccctgagcaaatccgacaagaagaaggtgctggattttgcggcatggagtttcaacatcaccacgtctgttggaatcatcatggtcaacaaggctctgatggctacgcatggattcagtttcgccacaaccttaactggccttcattttgtgacaaccaccttgatgactatcgtgtttcggtggttaggcctcagccagccctcccacttaccactgccagatctgattaaatttgtgatcttttcgaacttgtcgattgttggaatgaatgtgagcttgatgtggaactctgtggggttttatcagatagcaaagctctgcatgatacctgcatcatgtctcctggaggttgtcttcgatcatgtacattattctcgggacacaaagctgagcataatggttgtgcttataggtgttgcggtctgcacagttactgatgtcagtgtaaatgcaaaaggtctggctgctgctgttatagctgtttggagcacagctttgcaacaatattatgttcattttctccaacgaaagtactctctgaactcattcaacctcctgggtcacactgctccagcccaagcaggatcccttctgctagtggggccctttgtagatttcttgttgacaggcaaaagggtggatcactttggtttcaatcgattgctttgtttttcctgactctctcatgtgtcattgccattggtgttaatctgagccaattcatctgcattggtcggttttctgccgtatccttccaagtcctgggccacatgaagacagtgctcgtgttgtcccttgggtttctcttctttggcaaggaaggtctgaattttcaggtagtccttgggatgatcctcgctgttgttgggatgatatggtatgggaacgcatcagcgaaaccaggtggcaaagagcggcggagcgttcttccagtaaggtctgagaagcctagtggagcattagacgagaaggatggcagtgagaaatagtatgtgatctgcgatttatatgacaatttcttctgtgaagtttttctggtgatgcaagtatgatatacaaaggaaaccttgccaggcgttttcgtttaccgctgaagccatagattcgccatctagaaactcatcattgtcatagctataggatacagttaatatacatttgtcatcgcatttttttcgttctcctgtacattccttatgggggagatggcatagatgttctacagggttgcaagacagttgtccgaaaagacaatgtagtaattgtttgtgataacacggagttctacatttccatctggatctgtacagagcactatgctactatctgaagcagttcagttgcattgcagatttgcagtattttagactgaaacacacatgctgttctgtactagtggtgttgagctttgttgttgtagtgcctgcaagtgtcaagtgttcagattaactgattaatttgttggttctctgtggc

SEQ ID NO: 2368 - DNA, 1534 bp, Oryza sativa; identical to SEQ ID NO: 724
  ref <308>: DATABASE ACCESSION NUMBER: AK060207
  ref <309>: DATABASE ENTRY DATE: 2001-12-06

SEQ ID NO: 2369 - DNA, 1538 bp, Oryza sativa
  ref <308>: DATABASE ACCESSION NUMBER: AK060208
  ref <309>: DATABASE ENTRY DATE: 2001-12-06
attgagaaagcaccaaccacaccacactggtctctaccttcctttcttgctttctctcctgctgctggttgcgtctgccggtgccggcattgccattcgtcggcgtcattgatgtcggagggcgcagcagggacgacgaggttgccggagtggctggagacgctgctgtcgacgcgcttcttcctggcgtgcggggcgcacccggcgtcgccgcggaacgagtgcaacatgttctgcctcgactgcccttccccctccccgcccttctgctactactgccgctcccaccgacaccaatcctaccgagtcatccagatacggcgttcttcctaccacgacgtggttcgggtgacggaggtggaggacgtcctcgacatctccggcgtccagacctacgtcatcaacagcgccaaggtcctcttcctcaacgagcgcccccagccacgcggcgccggagccgccgccggcaaggccgccgcctccccctacaactgccagatctgcgcacgcgccctcctcgaccccttccgcttctgctccctcggttgcaagctggtggacaccaagacgggtggtcgcggggccaccgtgcagcccggcgatgcgaccaatgacgatgccgccgccgccggcggcagcagcaagaacggcggcgcacggccgcaggggaggcggcgcaaggggattccccagcgcgccccgttcggttcgtgagtcatcgtcatcaacatcaccaggtaacgcaacgcaaagcaaagaaccaacaattaagaaagcaaaagcattcttggcgaggcaatgccgacaagggagcacgcgaaaagtaagcaacgcaaggcttcttctatctgctactcgcattgctcatcccaacagattccacttcttctctccatccatccatccttcgatcgatcaccaccattaacagatggaggaggaggaagaagaagaagatgatgcgtccaaacaaaagaaaagaaaagatgcgcattgtccatctccaaaaaagaaaacccaaaagcaacccaaccaccgggccaacaccagcaaatcatcctctcctactgtccatctcaacaccattgtaagccaagccaccagaaaacacacatactacacacacacacaccacaccagttaagtttattgccctatacacaagatacatacaccgatactttttacccattcattcattcagtaggtaggtaggagctcatgtccatgtcattagcttagatcaatccctgctaccttgtcgtcttaggcactagcaggagtacatttttagaggatggacttctaatattagtcactattgattcttttcaagattttgttattgattgactgatgatgataccgcctggtaattacattgttacaaaattagctgattcattcccacattgctgttacaccctccatgcatgatcatatatatacaagattccttgttatttaaaaatcattaaatgttgttgtattgtacgtccacattgttactcactacctcaccctgcttaagaataaag

SEQ ID NO: 2370 - DNA, 1109 bp, Oryza sativa
  ref <308>: DATABASE ACCESSION NUMBER: AK060209
  ref <309>: DATABASE ENTRY DATE: 2001-12-06
gaggcatgcagatgtctgtacagttaataatgctggtgtcacctcagagtatcaaacaaaggcaaccgataacagttcatcaattgaaataaggccctacaaagatcccaaagctattcctgcagttcattcggtgtccgtgagagatgtgggcacagaaatgactcccataccgagtcaggatccttcaaggacaggaactccacttggatcaatgacaccaactcgtagcccaaattgctctataccatcaactcctgtaggaggacggtcaacagcatcaccaggagatgacaacacagatgatggaccatatttcaacagaaaaggtggcacaaatgaaatatcagacgatgaaatgagattgaagacaaggaaagaaattgccgccctgggtatacaactaggaaagatgaacattgctacatgggctagcaaagaggagctagaactagtctctgcatccccaagcattgctgatttggagcggatgaagaaagaatatgcagctcgtgcagcagcatatgaagaagcagaaaattttaagcatacagcaagattcaagaaggaagagttgaagattgaagcatgggagagccttcaaaaagcaaaaatagaatctgaaatgaagagaatagaggaacatgcagagaaattgcgaagcgaagccatggcgaagatggctgaaaagctagaaatgacacggcgtttagctgaagagaaacgagcctcagccaatgcaaggatgaaccaacaagcagcaaaggcggttcacaaggctgagctgattcgccagacaggacgagttccagggtcatgtatcctatgctgcagtggttgcttctgtcaacactagtgtatgcttgacaattagggagttaaatatggtcgtgaaaaatctaaaccccatgttctataatcagcattccttggttttagtatggaaaggaatgtctgatactttgattaggtattcagatgtacaaattcttgcttgtcataaaagtcaatccaatgcttacatttgcttggtcggctactcggttaaagaacacttggttgttgctcaacgaattgaatcattggaaaatgacgagcatttcttgact

SEQ ID NO: 2371 - DNA, 1678 bp, Oryza sativa
  ref <308>: DATABASE ACCESSION NUMBER: AK060210
  ref <309>: DATABASE ENTRY DATE: 2001-12-06
tgcaactcttgtgatcccaaacttccactatcacagcatttggagggatcctagcaaatttagtgatatttatgatgaggaacacttcgtccaacgattgaaaaatgatgtccgagtagttgacaaggtgcctgagtttattatggagaggtttggtcacaatttgagtaatgtgtttaatttcaagataaaggcttggtcttctatccgatactacaaagaagctgttcttcctaagttgatcgaagaaaggcttataaggatatcaccttttgcaaaccgactgtcctttgatgctccatcagctgttcaacggttgagatgtctggctaattttgaagccttaaagttttctaagccgatcacaactttatctgacattttagtatctcgaatgagagaaaaaagtgccgaaaacaatgggaaatatgtagcggtgcatctccgttttgaagaggatatggttgcattctcttgttgtgtcttcgacgggggtgaaaaggagaagaaggaactggatgcagccagggagaggggttggagaggaaagtttactaggccaggacgtgtaataaggcctggagcaataaggatgaatgggaaatgtccacttacacctttggaggttgggttaatgcttcgcgggatgggtttcagcaataacaccgcgatctatttggcttctgggaggatatataaatcagagaagaacatggcacctctccttgaaatgtttcctctcttgcagacaaaagaaacattggcatcagatgaagaacttgctccattcaagaatttctcttcaaggatggcagctatcgattacacagtatgtgttcatagtgaagttttcgtgactacccaaggtggaaattttcctcatttccttcttggtcataggagatacatttatggtggtcattcgaagacaattaagcctgataaaagaagattagccatactcttcgatagtccacgtatcggatggaagtcactgaaacgtcagttggtgaatatgagaacacacagcgatgccaagggtattgaaatgaaaagagcaaatgaatctatatacacctttccatgccccgactgcatgtgccgctcaaacaaatcagaacactctaaatccatccaggctagatagcatctactagtcttgacttgattgactgaccttgattctttttggtaccatagcatgtgctcattctttgcttgccgtctggtggtgtgatgtctgtccggtctccaagcaccctactgcagcattgctcatctattacactccccaggtggattttgcggatatattagattcatattagctaagctaatcctggggctaacaatacaccgatctgagtctcaatagatgtgtctaaccgtttctaggtctaataccctgacaatgtagtgccagtccgcttgatgtaatagtagttcccttgtacatttctcagctaggaagaaatttgtcatacaaattttgagaagaggaacaatgcttattctgatataatttattgatcctttcatctgaaagctagctctttgtctaactattcttttgattattgtatcaagggagggaggttttccttcttctttcatttgtacaatttgccaatttcagtttgagtcagaaacaggcaaacagctaaaagttggaaattct

SEQ ID NO: 2372 - DNA, 1502 bp, Oryza sativa
  ref <308>: DATABASE ACCESSION NUMBER: AK060211
  ref <309>: DATABASE ENTRY DATE: 2001-12-06
ttgtacattgacaccaatcttgaacataatagcgcattacagtaaaaccaatctgaacatatagtaggaatcaatcatattattcatgttcattaaaatttaaggttgaaaaccccggaaatgctttcaaatcatcattttggagtaacatcactttggaaaccatgcaggtggaagtattggagttgtcacccttgtgactattgtgacgtgtgcatatctcatccaagaaagaaataagctacacagcataaaacagaagtactttcgacagcatggaggtcgactgctatttgaggagatgaagggtactgcatttaaaatctttacggaagaagaattgcagaaagccactaataatttcgatgaaaagaaaatcctaggtcatggaggacatggcaccgtttacaagggatttctaaacggcaacactgaagtagcaatcaaaagatgcaagacaatcgatgagcaacaaaagaaagaatttggtaaagaaatggtaatcttatcccaagtcaaccacaaaaatattgtcaaactattaggttgttgccttgaagtggaagtcccaatattggtgtatgagtttatcgcaaatggcacactgttccatctcattcatgatggccacggcaggcacatctctatatccacgcgtttacagattgctcaccagtctgctgaagcattggcctaccttcactcatgggcatcgcctccaatcctccacggggacgtcaagtcatccaacattctccttgatggtgacttcacagcgaaggtctctgactttggagcctccatcttatcgccaaccgatgatgcacagttcgtcacgtttgtgcagggaactcgtgggtaccttgacccagagtacatgcaaacatggaaattaacggataagagtgatgtatacagttttggggttgttgtcctagagctactcacgagaaagaaaccattaaattttgacgggctagaggatgagaaaagcctatctgtgaggttcctttctgctgtcaaggagaacaagcttgaggaaatcttggatgatcaaattaagagcgaggagaatatggagattcttgaagagattgctgagttggccagacgatgcttggaaatgtgtggtgagaataggccatcaatgaaggaagttgcagaaaagcttgatagcttgagaaaggttttgcaccatccttgggcactgcacaatcttgaagaggcggagagcttgctaggagagtcatcaattgttagctcggaggttgtcagtacgggaaatttcagcattgagaagaaatctttaataggcctagaatcaggaagataatcgctaataaccttgttgtatatcatatcccaggaaattatataggtatactccaaaagtattacatgtataggtaatcgtcatcatatatggaatgattcatacatgttttatatgtgtagctcaaggttgcatcattgttaagatccaaaggtgaggttgttgtttc

SEQ ID NO: 2373 - DNA, 1584 bp, Oryza sativa
  ref <308>: DATABASE ACCESSION NUMBER: AK060212
  ref <309>: DATABASE ENTRY DATE: 2001-12-06
gatcgattgtattgggtaatggagatcaaaatattgcccctgtaaataccgcagttcaattggaagctcgagtcccattgcagatatgtgtttcacagaaaagtagcaacctactaaatgaagaagtgaactttccactcccaattgagcaaccggatatattttggagggaaaaggacgaagattcagaatggagcaaagcaaatgataatactgatttagaagaaggatatgatagttcaaaggatgaagtttcatctgtttcctcctacaacaaagcaaatccagaaagctccctcaggagctcagtgtcgatgcactccctgtcatcacgtctttccactagtgaaccattgtattctagagaacgccccagtttcccatcttatagtccaattcctcgactatcagtatcagagatttcagatgatcatggtggaggtgtggtgtcacctcaaaggaagctaaatcatttgctgtcagatcatcatccatcaaatggacagatgttctctctagatcctgaccgctcaaatgatgatgctggaccacctctcacaccaaaatatgttgaaccagctggatcagaaggctttatgagaggaagatcgtacaacataagaatagatgaccaagtgttgcttcgcttctcaccaaagaattctgactcaacttattactttggtgatatgattggtggagcactcaccttctttcatggatctggaacacgaagatgcctagaggtatctgttaccttggaaacatcagaaacggttaatcctcgtgtaatacatccttcgagaaggagctcaccctcaataaccaaggtacacagtgagcactatgaagttgttgcggatcttcaccagacaagctttctcttttcagttccaattgatggaccaatgtcattttccacttcaaaagtttctgtgcaatggtctcttcgatttgagttcttcacaactcccgaaggaattgattcatctaggtatgaacatccacttctcgtcgagaaaagagagaagggtgactgggtgcttccaataactgtttatgcacctccattgcgtaggcaagcaattcatggaagaaatggtagatctgtcttagttgggaaccttttcaactcttgaagatgtgcatacaaggttctgctgttcttttcaaaacccctaccagttttgcttccgatgagcttcgacgagtattctctgtagttcactttgcacagctggccagttccatacctctaaaatacatgggagatccggaacacataaagcgagaacaaacttgtgttagatcaagtgtgcaaatcacagagttcgtcacctgagaacaggcagctgtgccttgatgtaacatcggcactgcttgattaccttgatgtactataggcattcctttgatagagggacaaaacttttggggtgcttgattagctgttataccccttttcattcggtatgtgtatacgtgagacatctgccttgtaattcaattcttttgtggaaaccaaacatatagcagtacgctggttgtccagaatccagattacacacgtcctgtttctgagac

SEQ ID NO: 2374 - DNA, 1055 bp, Oryza sativa
  ref <308>: DATABASE ACCESSION NUMBER: AK104275
  ref <309>: DATABASE ENTRY DATE: 2002-08-28
agcacgaggcggcctgagctgaacaccgcatcagcagcagcaagcagctaatcgcgcacgtacgcacaccgcgacccggggcgagatggcgcagtcgatgctggtgtcgggagccaatggcacggtggccgccgcgagcaccagcaggctgcagcccgtgcggccgacgccgttctcgcggctcgtgctgtcgcagccgtcgtcgtcgctggggcgcgcggtgtccgtcaagacggtggcgctgttcggcaggtccaagaccaaggccgcgcccgcaagaaaggctgagccgaagccaaagttcaagaccgaggacggcatcttcggcacgtccggtgggatcggtttcaccaaggagaacgagctgttcgtcgggcgtgtcgccatgctcgggtttgccgcgtcgatcctgggtgaggccatcaccgggaagggaatcctggcgcagctgaacctggagacggggatcccgatctacgaggcggagcccctcctcctcttcttcatcctcttcaccctcctcggcgccatcggcgcgctcggcgaccgcggcagcttcgtcgacgaccagccggtgacgggcctcgacaaggccgtcatcgccccgggcaagggcttccgctccgcgctgggcctcagcgagggcggcccgctgttcggcttcaccaaggccaacgagctgttcgtcggccggctcgcgcagctcggcatcgccttctccatcatcggcgagatcatcaccggcaagggcgccctcgcgcagctcaacatcgagaccggcgtccccatcaacgagatcgagccgctcgtcctcttcaacgtcgtcttcttcttcatcgccgccatcaaccccggcaccggcaagttcgtcagcgacgacgacgaagagtagaattacgaggatcgatcgatctaccgaggtttcgccgccactgttgtgcttgcgcatcattgagactttctttcaagtgtatatgtactgtgtacgtgtaggtgtaaagacgtaccttgtttaattagttgttaattaatgcccatggagaaaattaacgtgt

SEQ ID NO: 2375 - DNA, 1758 bp, Oryza sativa
  ref <308>: DATABASE ACCESSION NUMBER: AK060213
  ref <309>: DATABASE ENTRY DATE: 2001-12-06
atacgacgagatcgaaaccatggagattgtcgatggcgcttcaccgccgttgcatccatggagcttgctgctctacgcgctcggcgcattggcggcgctgtggtgggcgtggcgggctctcgaccggttctggctccgcccgcggcggctgggccgggcgctgcggtcccagggcctccgcggcaccgactaccgcttcccgtccggctacctgaaggagttcgcgcggctgctcgccgccgccctcgccgcgcccatgccgccgctgtcgcacgacgtcgcctcgcgagcgcttccgttcgaactcgccgccatcaagcagcacggcaatgtttgcgtgacttggttcggcccggaggtgcgagtgatcgtgagtgatcctaaacttttccgagagattttagcgaacaagaacgggcggttcgggaagcagaagtccattctttgggtccagaatttgttggcagatgggctgacgagccaccaaggcgagaaatgggtcgctcaccggaggataatgaaccacgccttccatctcgagaagctgaagaggatgttgccggcgtttgcagcatgttccagcgagctgataagcagatggcaggattctgtgggagctgatggtgcgcaggagatcgatgtctggccggagttccagaatctcacgggggatgtcatctcccggtcggcgttcggcagcagcttcagtgaagggaggaggatcttccagttgcagtcagagcaggcacgaaacgttatgaagatggcaaaagctttgtatttcccaggttacaggtttctccctacagagctcaacagaaggacgaaagcaaacgcacgcgaggtcagagagcttctgaaaggcataatcaccaagagggagagcgcgatgaaggatggccatgcggttaacgatgatctgcttggattgctattggagaccaacatcaaggagagccaagaagctggaagctccaagccaaccatgaccacgaaggacatcatcgaggagctgaagctgctctactttgcaggatcggatacaaccgcggtgttgctcacatggacaatggtcctcctaagcatgcaccccgagtggcaggaccgtgccagggaggaggtgctgcgcgttttcggaaagaacagtccagatttcgagggcataaaccatctcaaagtcgtgaccatgatattacacgaggttcttaggctgtatccaccgatcctgctgcttggccgagaggcatacgaagagaccgagctcggaggggtcacgtatccaccgggggtgacattcgcgttgccgatcgcgggcatccaccacgatccagacgtgtggggagaagacgtcggcgagttcaagccggagaggttcgcggagggcgtctccagggcgtccaaggactcaccggcgttggttcccttcagttgggggccacggatctgtgtcggccagaacttcgcgttgctggaggccaagatggcgctgagcatgatcctgcaacggttctcgttcgggctgtctccgtcctacacgcacgcaccgttcccaatccccacgctccagccacagcatggggcacagattaagcttactaaactctgatcattttaagtagcactagattatcaagcatgtcggcggttgagcggagcctggctcgatctgctgcagcctctgcttttctgttttactgtttaggatgttctcataaagtctgaagaaagaaaaggcgacgatgttgtgatcaaaaaaac

SEQ ID NO: 2376 - DNA, 1756 bp, Oryza sativa
  ref <308>: DATABASE ACCESSION NUMBER: AK060214
  ref <309>: DATABASE ENTRY DATE: 2001-12-06
acaaactcctaaacccacaatatacaacccaagatacccggacacatttacagaaatgccccccaaactcctcacttatctcatcctagcccttctctccatgggcgcacgccgcgcgcaacgcctcgggtgggtacgacgtcgggaagctcaccgtcgtcgtcgcctccgccgatgagaagctggagcttggagtggacgagagctacacgatctatgtcgcggcggcgggcggcgtcaattcgatcgtgggtggagcaaccatagaggctaacaccatatatggagctattcgtggattagagacattcagtcaattgtgtgttttcaactacgataccaaaaatgtcgaagtgcgtcatgccccatggtacattgaagacgaaccacgctttgcttttcgtgggttgctccttgacacatcaaggcatttcctcccagtagatgtgattaaacaagtgattgactccatgtcattttctaagctgaatgttcttcattggcatatcatcgacgagcaatcttttccattagaagtaccatcatatccaaaactatggaagggttcatattcaaaattggagcgctacactgtggaagatgcacgtgatattgtcaggtatcaagtttatcatttgcctttcgcattctctgtatcttctttatattctattgccaagttctttcagttcacttataaaaggtgttctctgatttcacgtctgaaacttcccgactctaaagctatgctaggaaaagaggtatccatgtcatggctgaaattgacgtgcctggccatgcagaatcatggggaaagggatatccaaagctctggccttctcctaagtgcagagaaccgttagatgttactggcaatttcacatttgaagttatttctggaagtatatacaggttgctggaatgcaacaccccatgtgaaacagtggcttcatgaacgcaacatgactacaaaagatgcttacaaatacttcgtcctgaaggctcaagagatagcaattaaccttaattggattccagtaaattgggaagaaaccttcaactcattcaaagaaaatctcaatcctctaaccgtggtgcataactggctgggtcctggagtctgccctaaagttgttgaaaagggtttcagatgtataatgagtaaccaaggtgtatggtaccttgatcatcttgatgttccctggcaagatttctacactagtgagccactcgctggaattaataacacagcacagcaaaagcttgtacttggtggagaggtttgcgtgtggggtgagacagcagacacctctgatgttcagcaaacgatatggccacgagcagctgcagcagcagagcgtatgtggagtcagttagaggccatatctgcccaagacctggaaacaaccgtcttggctcggttacactatttcagatgcctgctgaatcaccgtggaatcgctgcagctccagtcacaaactcttatgctcggcgtcccccaattggtcctggttcatgcttcattcagtaaacagggagctgcagagcaaagataggcataagaggggtatttgcctccatacaccttccacacttcagacaaaaatggtatcttgtcaattttagtgtactgtttctgtatgtttgtttgcattacattacctatcacacggatgtttgacaataaaattttatagtccctcgtcatgtattttcgccctaagtttcaaataaaactgcagagccgttccttag

SEQ ID NO: 2377 - DNA, 726 bp, Oryza sativa
  ref <308>: DATABASE ACCESSION NUMBER: AK060215
  ref <309>: DATABASE ENTRY DATE: 2001-12-06
gatgctagtcagaaggatcctgatgacacagaaatcaggaagaatactgtcagagtagtgataaaccaattattatctgatgaaaagacagaatcttttcctatattagtaacatctggaagcaacaatgtaaaagctgtggttgcagatgggaattctggaagttctggtcatcagattcatggaagattatctgatgatgccgataagtcctatgaaatgtctccttatgaagattctgatgaagaggatggtggtgacttggagcacaaagagaaagtaaggcgcagacagaaacatattccaccatggactcggaaagaaatcttggatgaaatacttctatccaatcggaccttagatcctagagaaatttttgaacgaaagtgctctttcagtttatctgacgttcttgcaccccccattccacaacggcgattaaattagttggatatttcacaaccttgtgaaagtgatattctacaacatcgctgagctccttgtttagtaacaaaatgtacaggcaaatctcaacattcctactggtagtgatacatgttactcaagcggcttttgccttttgtggcctgtgtgtatcttagttatgcagatggtagaagtcattttaagatggctgtatcacctttctttttgctgaagatctacggaatgatcatatctgtacataattttgcttctttcacaataaatgatcgaccttctttg

SEQ ID NO: 2378 - DNA, 504 bp, Oryza sativa
  ref <308>: DATABASE ACCESSION NUMBER: AK060216
  ref <309>: DATABASE ENTRY DATE: 2001-12-06
tgcaagtatgtatgccgcaagaacaaaccagagctgttgaaggatggcgacctcaaggagtcagcaatggtggatgtgtggcttgaagtggagtccaaccagtacactcctgcactgaaccccattctttttcagtgcctaatccgtccgatgatgtttggggcaccccccgacgagaaagttgttgaggagaaccttgagaggctgaagaaggtgttggaggtgtacgaggcgcgcctgacgaagtgcaagcctcctgcttaaggtagttgttctaggcacaggtttgtcgtccatggtccacagaataagctgaggtgtgcccagttggttgctcgtttaaggatttgtgttattatgtgtgtcctggatgttgaatgttcaagcaatcaggattgtgttgttatgctgcatatgatccaacctaagtcttgtactgctatgagcattcttgtgctctggccttcgctcttgagaaccttataataaattctgcttttagtc

SEQ ID NO: 2379 - DNA, 1870 bp, Oryza sativa
  ref <308>: DATABASE ACCESSION NUMBER: AK060217
  ref <309>: DATABASE ENTRY DATE: 2001-12-06
atcaaaggcttcaatgtaatatgcaaactatacatccatctagcacttcgtatggtggggcgtacactgcagcacttgctcagcaagtcttttcagtggtagctcaggcactcagtgactctgtagaagtttttggtgatgagtcatgttatgcatctgaactggttacatgggctacgaagcaggttatgtcctttgcactcttggtaaagaggcatgtgttgtcctcttgtgcagctgctggaggtttgagagcagctgccgaatgtgttcagatatcacttggtcattgctccttgttggaagctcgtggtctgtctgttgcagctgttcttctgaggcaattcaggcccagtctagagcaagcattatattcaaacatcagaagaattgaagagagtaccgctgcactagctgcagctgatgactggattctcacatatcccccaactggcattcgtcctttagctagatcatctgctgctaatttggctcttcagccaaagctctccaacagtgctcatcgttttaactcgatggttcaggagtcctttgaagatgttgcgccgctgcttagcttgcaattaggtggttctacaatggatgacataactaaaattttcaattcatatgtcaatttgctcataagtgctttacctgggtcaatggaagatgaagctaacatagatggtttaggaaataagattgttagaatggcagagtctgaagaacagcaactggctttattagccaatgcgtctttgctagctgaggagttgctacctagagcagctatgaagctatcatcaatgaaccattctagtatggatgatctgcgtaaaagaggctcagataaacagaaccgtatgcctgagcaacgtgaatggaaacggaaattacaacgcatggtggacagattaagggatagtttctgcaggcagcatgctcttgaacttatatttacagatgaaggtgagacccatctcagtgcagacatgtatattagcatggacaatactgttgaagagccagaatgggccccatctcttattttccaggagctgtatgcaaagctaaataggatggccagtattgcggcagatatgtttgtcggcagagaaagatttgctactctgctaatgatgcgactcactgagacagtcatactatggctctcagaggatcaagccttctgggaagagattgaacagggaccgaagcctttgggtccccttggccttcagcaattctacctggatatgcaatttgtaattatctttggacaaggtcgattcttgtctaggcacgtccatcaagtcatattggatattattgatagagcaatggctgcattttcagctactggaatgaaccctgacagtgtcctcccgggtgacgattggttcatggatgtttctcaggaggttgtcagcatgattagtggaaagggtagagctgccaatggagacagggagataaacagccctactgcctcagtctcagcgcattccatgtcatctttcagatcccatggcagctcctagcttgtaagctatactttttgtaggcagatcatcattgtataataagcaatagtgcattctttctttctttttctcccacatttctcagttttctctgtctatttcttttgttctattcatttccttctgttgtgctagtacaggtggataactgtttgacgtaggaaaaaaaatcttgaattattttcttccctgagctaaggcctgtaagtgttgcttacttgcatggccagtatatgtcgcgagctttgtatcattctttcagatgttttttttatgtcacctggcacatcgcattcatgaattcaggattcgttactttcgat

SEQ ID NO: 2380 - DNA, 1878 bp, Oryza sativa
  ref <308>: DATABASE ACCESSION NUMBER: AK060218
  ref <309>: DATABASE ENTRY DATE: 2001-12-06
atcgaataaccactggtaataatgtggttggagttcctggccctcttgaaagtccagaaattaagccaagattattcggtgttacagctgagccccagcagaggagcactgaagcaccatctctgcatgaaaatcatcgggcgcctggaagtgttgcaaagaccaaaagggcacccagtgaacaaacaaggaaagggagctcgtcctccagttctcgccctcttcaaaagcaaccacagaggcctgaaatttcaaaaggagcttccaatgtgcttgatatgccttctttgaacaaaatgactggccagcccagacccttcttccaaccagcagaagcagctataactcagcaaatgagaaaaagcgagacacctaaaagttctcatccacttgaaatggcacaccagaggcttgagtgtgcaaaaggtgcttctggtgttcatgatatgccttccttaaacaatacaagtgggcagcctaaacccttcttccagtcgcaagaagcagctgttccacaacccagaaatgaaaatacatgggtataccatggacgacctggtgatgggaagtatgggacaaccgacgaaagcagaccaatgagcagcatgggttttatcactaaaaatcaacaagtaaatgcggccagctttgcaatgaatttgaacgggcaaaagaatgtcaatgacaatgtaaaatcagtgggatcaactgtaatgcctgtgcaggtaaatacaacaaacagagggcctgattcttcccggaatattttctcagcatttccaccagctgtcagggagaatcagagcattccatctgctccagtggctcaatcttggatctcatttggtgcttcgtcagagagcaaaccaaccattgtcagtccaactttccatgatagtaattctggctggaagatgccatttgcaaatgcccgtcctgatgaagcaaagatgactgctgttccacagttctttaggcaacccgttcagatggttagagaaagtccagggcaaaacaagggtttggtaatattcccccagttggtccagacagacttctcaagatcacagggccaaccacaatggcaaggcctggttcccccgatgcaacagaaaccaaacaaggatatgcttcgcccagacttgaacatcgggttcccttcccctggttcaccaccagctcgacagtcttcgggcatcaatttggaagcacaacagccagaccttgctttgcagttgtaagcttggaacggataatgaatacatgtgaccacagattgaacggcaggcttgaacttgaacaattaaagacaaatggaagttaggcgcaaagcgcaaacagcagattgggacatccattagatggatcgacagcaatggagcgatgacgattcatggtagaccatcgtacattgtttgtgactcatcctccatgtgcaaagatatgagaaaatggatggatgaacacctgcttaggatgacatcattatatatgcttgggcattttgttcattaccggagttcagaatccagcattttgagtaaatgctgtggtggcatgcttcttggtagagcatgctcatgatccaaaatacttagcgcacccgcctggccacactatagctttccacggtggaaatttttgcaccagaacttaggatatatcgttctttcggtagactagaagactacgtggtcgcccctatgtaatgccccttgtcacattgtatgtttgttgtaaatggttcagcattgaatagattgttagactagatcttcttttctgaatgaaattgcttcccactttcatattctgtgccaggaactgtgttacttgatccattcagttcaaatgacatgctgaatgcgaactgctaat

SEQ ID NO: 2381 - DNA, 366 bp, Oryza sativa
  ref <308>: DATABASE ACCESSION NUMBER: AK060219
  ref <309>: DATABASE ENTRY DATE: 2001-12-06
tcatgacgacggacaaccacgagttctggttcatggggttcgtctcctacgacaaggcgctcaagaatctctacgaagccctgcagcgccgtgcgtgatcgtcgcccacggccaccgcagctaagcttcactctgatcctaatatacatatctgccgatttatattccattggtgaacttgtaagcttcagatcttgctctggaataagtgtgacacatcactaaaacaaaatctgatgccgtgtgcccgcgtgtatgatctgtaattcgctcatcagtgtagaatgtgctgaattcacttgttattgtagattgtgctgaactcactatcctttttataatgtactgaattacctgaacatagat

SEQ ID NO: 2382 - DNA, 1006 bp, Oryza sativa
  ref <308>: DATABASE ACCESSION NUMBER: AK060220
  ref <309>: DATABASE ENTRY DATE: 2001-12-06
tagtgagacctgaacgcattagtgcagatatgtaccgtgattttgcacaggaagtctacattatgagaaaggtccgccatagaaatgttgtacagtttatcggtgcctgtacaagacagcccaacttatatattgtaacagatttcatgtcaggaggtagtctgcatgattaccttcataaaaagaacaattctttcaagctatccgaaatactgagagtggcgacagatatctctaaaggaatgaactatctgcatcagaacaacataattcaccgtgatctcaagacagcgaatcttcttatggatgaaaacaaggtcgtaaaggttgcagattttggtgttgcacgtgtcaaagatcaatccggagtgatgactgcagagactggaacttatcgttggatggcacctgaggtcattgaacataagccctatgatcataaagcagatgtttttagctttggtattgttctatgggagctgctaactggcaagataccctatgagtacctaacaccactacaagcagccataggtgttgttcagaagggccttagaccaacaattccgaaagatacgcaccccaagctgtctgagctgcttcagaaatgctggcatagagatcctgctgaaaggcctgacttctcccagatactggagattcttcagagactccccaaagaggtgagagctgataccgagggccgccagaaatcaaaggcaggatttctttcagcattgaagagaaaccactgaaagtagcttatacaatgttggtgcatcattcaattgtagcatcccacaacaagagggaagcgcattgtggtgtacagtgattaaaaaaagtatttcttacgttgttgcagctttgttttttttgcttatttagtttttttttcagctttttggtttcttttgctgttgtttttcttgttctagttttgttgcattaatgagaacaagtatagaaaaaggaatgtgctgaaaagagttgtacaaattgatcc

SEQ ID NO: 2383 - DNA, 1427 bp, Oryza sativa
  ref <308>: DATABASE ACCESSION NUMBER: AK060221
  ref <309>: DATABASE ENTRY DATE: 2001-12-06
cgctccaagacactcgcacgcagacatcacatccattccaggctcgatcgcttcgatccctttgcctgagaccgaagaaatggagctaatcacaaacgtctccgagtatgagcagcttgcaaagcagaagctgccgaagatgatctacgactactacgcctctggtgcagaagatcaatggactctcaaggagaacagggaggccttctcaagaattctgtttcgaccgcgaatactgattgatgtatcccgtatcaacatggctacaaatgtcttgggcttcaacatttccatgcccataatgattgctccctcagccatgcagaaaatggcccaccccgaaggagagcttgctactgcaagagcagcttctgctgcaggaacaataatgacattgtcttcatggtccacttctagtgttgaagaggttaattcagcagcgccggggatacgtttcttccaactctatgtttacaaggataggaatatagtacggcaacttgtcagaagggctgaattggctggttttaaggcgattgcactcactgtcgacactccaaggcttggtcgcagggaagctgacatcaagaacagattcaacttacctccacatctggtattgaagaattttgaagcgctggatctcggcaagatggacaagacaaatgattctggccttgcttcctatgttgctagccaagttgaccgctctctgtcttggacggacgtgaagtggctacagacaatcacctcgttgccgatcttagtgaaaggagtcatgactgcagaagatactaggcttgctgtcgaaagtggcgcggccggtatcatcgtgtccaaccatggagctcgccagctagattatgttcctgcaactatcagctgcctggaagaggtcgtcagggaggcaaaggggcggctgccggtgttcctcgacggcggcgtccgccgtggcacggacgtgttcaaggccctggcgctgggagcttcaggaattggcaggccggtgctgttctcgctggccgtggacggcgaggccggcgtgaggaaggtgctgcagatgctccgcgacgagctggagctcaccatggcgctcagcggatgcacgtcgctggccgagatcacccgcaaccacgtcatcaccgacagcgacaggatccgccgctccaggctgtagaggctaagctctgcagcggttgcagtgatcgaattgtccatgtatggtatgctagtccatttgagatgctactgctagtagttattgtgatccctcccacatttgatgatgccgggtaataaggagagggaggaggctgggatgtgtgcctccaggtgtatgtgttcggtgttcctccgtgatggaggagtatgtagcagggaatttgtcactgttgctgtcgttggcagggaatttggtgattcagagt

SEQ ID NO: 2384 - DNA, 1078 bp, Oryza sativa
  ref <308>: DATABASE ACCESSION NUMBER: AK060222
  ref <309>: DATABASE ENTRY DATE: 2001-12-06
aaaaaaaaaaaaaaaaacccttgtgactacacccgcttcgcttcctcccctctctaagccggggaagctaagccatggcgtccgtcaccgcccgcaccccggtcgcagccctccgctcgtcggcgtcgctcaagtctaccttcctagggcaatcctccacccgcctcgcccgcgcaccgactacgaggcgtaatgttcgggcggaggccaagggggagtggctccccggcctcccttctcccacctacctcaacggcagcttgccaggcgataacgggttcgacccgttgggtctggcggaggacccggagaacctgcggtggttcgtgcaggcggagctggtgaacgggcggtgggcgatgctgggggtggccgggatgctgctgcctgaggtgctgacgaagatcgggttgatcgacgcgccgcagtggtacgacgccggcaaggccacctacttcgcgtcgtcgtcgacgctgttcgtcatcgagttcatcctgttccactacgtggagatccggcggtggcaggacatcaagaaccctggctgcgtcaaccaggaccccatcttcaagagctacagcctcccgccgcacgagtgcggctaccccggcagcgtcttcaaccccctcaacttcgagcccaccctcgaggccaaggagaaggagctcgccaacgggaggctggcgatgctggcgttcttggggttcctggtgcagcacaacgtgacgcagaaggggcccttcgacaacctgctgcagcacctgtctgacccgtggcacaacaccatcatccagacgctgtcaggctgagcgtgtgatcgatttcatcagggccagggcatctcaaggagcttgatgagttcaggctggtgaaaccgatgattgggcgatggaagatgttctcttcttgtttcttcttttttttttgtggagtatgcatgtataagatgttaatgaattggggggaggagagagagagagatggatgcatgggtgagggggtgagttgagtggtgaatttctgatgtacagtactacagggggataaactatctcatggtagcagcagtgttctagct

SEQ ID NO: 2385 - DNA, 901 bp, Oryza sativa
  ref <308>: DATABASE ACCESSION NUMBER: AK060223
  ref <309>: DATABASE ENTRY DATE: 2001-12-06
gtgcatcagcagcgagttccagccatggcagcagacaagggagtgaaggtgttcggcatgtgggcgagccccatggcgatccgtgtggagtgggcgctccggctcaagggcgtcgactacgagtacgtcgacgaggacctcgccaacaagagcgaggcgctgctccggcacaacccggtgaccaagaaggtgcccgtgctggtccacgacggcaagcctctcgccgagtccaccgtcatcgtcgagtacatcgacgaggcctggaagcacggctaccccatcatgccctccgaccccttcgaccgtgctcaggcgaggttctgggccaggttcgctgaagagaagtgcaacgctgctctgtacccgatcttcatgacgaccggagaggagcagagaaagctggtgcacgaggcccagcagtgcctgaagacgctggagacggccctggaggggaagaagttcttcggcggcgacgccttcggctaccttgacatcgtcaccgggtggttcgcctactggctgccggtcatcgaggaggcctgcggcgtcgaagtcgtcaccgacgaggcgctgcccctgatgaaggcctggttcgaccgggtcctcgccgtcgacgccgtgaaggcggtcctgccgccgagggacaagctcgtcgcgctcaacaaggctcgccgtgagcagatcctctcggcgtagagagcacggtcacttcagctccccagctagtacgtttcatctccatggtccatggttaaacaataagttcgtcacaagcacattgtgcagaagtagtagatgcccgaagcatgatccgtcttagagagacaaacttaatgctctatgatatgttatccagtgtacaatattgcctacttaattatttcctcaagaggaaaaatac

SEQ ID NO: 2386 - DNA, 1652 bp, Oryza sativa
  ref <308>: DATABASE ACCESSION NUMBER: AK060224
  ref <309>: DATABASE ENTRY DATE: 2001-12-06
ttttgagataagcagtatggtacagaaggaggtgctcaaggaagagatcacccgtaggaactcatatgtagatgagctgaaggacaagctgaatgctgttgagattgagaacagaaggctgaaagttgatttgaatggagattttacagtgttggggtcattgcagaatgaagtcagtgccctagagaaacaaaccttatcccttgccaatgattgtttgcaatcaaataagctcaggatggaggaaaatgcattatcaactcaggttttgaagaccaatatgagatcgagtggtgatcagaatacagtacggacagtaaaagacatggagctgcagaaattgcatgggaccatcaaagcactccagaaggtggttacggatacagccgtccttcttgatcaagagaggcttgatttcaatgccaatctgcaagaagcgaggaagcagattgaggtgctgaagctgaaggagattttggatgatgacttgattgaaatgaattatgagcaaatgctgaaagacattcagcttgacctcatccaaatttcttctggtaataaaaccggttcccttggtcaggccaataaaactgtagcacaggcaaatgagaagatgcttgactctcatggcatcgttggagctagcagtagccatgtacgcaatgatttgagaccgccgcaaagtgagtcgtttgagagggacaattacaaaaggcctccctctgaactgatggtcgtgaaagaactcagcattgacaagcaagagttaccaaggtcaatcaccacggagccgcaccaagagtggaagaacaaggtaatcgaaagattggcttctgatgcacaaaggctcaatgccctccaatccagtattcaggagctcaaaacaaacacagaggcatcagaagggctcgagctcgagagcgttaggtaccaaataagagaagctgagggcttcatcactcagctgatcgatagcaacggtaaactgtccaagaaggctgaggagttcacatctgaagatggtcttgatggggacaacattgacttgaggagcagacaccagcgcaagatcacggagcgtgcgaggaagatggcggagaagattgggaggcttgaggtggaaatgcagaaggtgcaggaagctctgctgaaatacgaggagcagactagcacaagaacatcaaaaaccatgcaccggcgatcgaaagtgcagctggtagattttctctatggtagaaggcgggacagtcggaagcaacagcgatgttccccatgtggttgcatgaaagcaaatgccattgatgactaactcgccttcatgccgcttcttttttaaggcaaaatggaaggctaagcttttcagtttcagaactgtagcaagtcatctgctgttcatggtttcttaggtaaataagtggacatgtaaggattgtaaatggtagtcattgacagtttctttttttctgaaaccatatggacaataaccatctgttataaattttatttcttagcttgtaaaattaaggtcaactttatttcttatcatgttccatgatatgtgtaaagagaacatgacaatgtttttcttttttctgtaagaaagacgggttataattaattatttgaagaaccttttacgtggatttttgcac

SEQ ID NO: 2387 - DNA, 1065 bp, Oryza sativa
  ref <308>: DATABASE ACCESSION NUMBER: AK060225
  ref <309>: DATABASE ENTRY DATE: 2001-12-06
agactagtcagtctctcccaagaacacccactcctctagtctctctcgagagagagagaaaattgatgattcttgggatgattttgaggcgtctgatttgctgaagaggaggaggaggatgccggactcggacaacgactccggcgggccgagcaactacgcgggaggggagctgtcgtcgccgcgggagcaggacaggttcctgccgatcgcgaacgtgagcaggatcatgaagaaggcgctgccggcgaacgccaagatcagcaaggacgccaaggagacggtgcaggagtgcgtctccgagttcatctccttcatcaccggcgaggcctccgacaagtgccagcgcgagaagcgcaagaccatcaacggcgacgacctgctctgggccatgaccaccctcggcttcgaggactacgtcgaccccctcaagcactacctccacaagttccgcgagatcgagggcgagcgcgccgccgcctccaccaccggcgccggcaccagcgccgcctccaccacgccgccgcagcagcagcacaccgccaatgccgccggcggctacgccgggtacgccgccccgggagccggccccggcggcatgatgatgatgatggggcagcccatgtacggctcgccgccaccgccgccacagcagcagcagcagcaacaccaccacatggcaatgggaggaagaggcggcttcggtcatcatcccggcggcggcggcggcgggtcgtcgtcgtcgtcggggcacggtcggcaaaacaggggcgcttgacatcgctccgagacgagtagcatgcaccatggtacatatatacagtaatcagcagctgttcatttttctatgattactagttgacttaagcttgcaaatttgctaatctgagctcctgagtttttttttttggtcagcaatttcaagatggtcagaagctaaatttgtctatttgttactgataaattatttgttctctccgtttaatcgtcatgaaatgttttgggaaacatgaacttttcatgccccttttttaatatagattaagaatccagcctttacaccac

SEQ ID NO: 2388 - DNA, 1722 bp, Oryza sativa
  ref <308>: DATABASE ACCESSION NUMBER: AK060226
  ref <309>: DATABASE ENTRY DATE: 2001-12-06
cattcttttactgttgttgatgaagcctcagcatctccttctgtaaggagcatcggtggctacatgccatccctactctttgctccacgctccggttcttctgctgtcaatgagacccacgaagcagaaacccaggattcactagacctgacgcacagcgacaatgataacactcagcacgttcaacatcaccttcagctgagccctgagccttctgccatgacagatacttcatttggtgtgagctccgacgttgtcacggcaacaaccacatcagaacaaaggaatcatccccggcatcccaagaagtgcaggttcaagggatgctcgaaaggtgcgagaggcgcatcagggctgtgtattgcccatggaggtgggcagagatgccataagcctgggtgccataaaggtgcagagagcagcactgcctattgcaaggcccatggcggtggtcggcggtgcgaggagcttggttgcaccaagagtgctgaagggaagacagattattgtatcgctcacggtggaggtcgtcgttgtgaacatgatggctgtcctaaagctgcacggggtaagtctgggcggtgcatcaagcacggtggtggtaagagatgcacggtgcaaggttgcatccggagcgctgagggtaaggccgggctctgcatttctcatggtggtggccgccggtgccagttcccggactgcagtaagggggctcaaggcagcacattgtactgcaaagggcatggcggtggcaagcggtgtatctttgacggctgcagcaaaggtgctgaggggagcacgcctctgtgcaaagcacacggtggcgggaagcgatgcatgttcgaaggtggcggcgtctgcccaaagagcgtccatggtggcactgagtactgcgtggcgcacggaggagggaagcgctgttcggtggctggctgcaccaagagtgcccgtggccgcacggactgttgcgtgaagcacggtggtggcaagaggtgcaaggtcgacaactgcagcaagagcgcccaggggagcacggacttctgcaaagcccacggcggcggcaagcggtgcacttggggaacgggctgcgagaagttcgcccgcggcaggagcggcctgtgcgccgcgcatgggaccttggcggccaagcagcaagagcgcgacgcggcgaacaacggcgcgggcatgatcccgccaggccttttcagcggcatagtgaccgtcgccgccacgagcagcatgacgaacgagtactcgtcgtcgggcatcagcaccgcgtcggactgcgacggcacggtgaggagccaggcgatgatgatacctccccaggtgctggtgcctcgctctatgatgccctcatcgtcgtccgaacctaccgtgcatgggggcagagagggaggctgtgccgttccggagggaagggtgcacggtggcggcctcttgtcactcctcggtggcagcttcaggaacgccgacatggataagctctgaatttgcttctccggctgccgaattctgttagtttggttgtgtacataaacaaggcaatttattttgccgatttgaacttctttggctttttttcctttgtctagataaatggtccgtggttgctttagtccagtcatttgtacattcatgtccgtggcaattgtcctgaacaccttctcatgtcagtttagtcagtcggaggaactggcaataaaatttgtgtattggttt

SEQ ID NO: 2389 - DNA, 1287 bp, Oryza sativa
  ref <308>: DATABASE ACCESSION NUMBER: AK060227
  ref <309>: DATABASE ENTRY DATE: 2001-12-06
aattaccactattgtattgaccaatgagtcgacggggccatgtggtttggttttgtttagcatcccgtctctctcctcctctgtttccatcatcatcatcatccagaggccaccaaccctcctcgattattcagagcagccaattagtcttggcgtcttgacgtgttcggagaatttcctctcatttatatgcagtagttagacatgctctggagaagcaaagcgaggtaggaagagggatttggtcgaattttacgtacttagccgtgggcgaggcgtttacagggttgcttcggctcggggtgggttgggttgggttgggttcgatggagaagtggagcagggggctctcctgccgggccgccatctgcggcatcgtcgtcctgctctgcgccaccgcgttctcctgctccctcgccgccgaattccgcaaagtcaaggagaaggacatgaagctggacggtagcctctgctccctgcccaagagctccgccttcgaattgggcgtcgcggccatcgcgttcctctccgtggcgcagctggtgggcaccacggcggcggcgaccaccatgtgcgccgcgtccaagcgcagcaagtcgtccaccaccaggcgccgcgcggcgtccgtcgccatcctcgtcctctcatgggtgagcttcgcgctggccgtcgtcctgctggcgaccgcggcgagcatgaaccacgggcagcggtacggccggggctggatggacggcgactgctacgtcgccaggaacggcgtgttcggcggggccgccgcgctggtcgtcgtcacggcgctcctcatcctcggcctcacctccaccaccaaatcatcctcatgcgccacctcggcagcatccgccacaacgacaatccgtctcgacgcggcggccacggacgccgagcaggcgagcgggcgatcgaagcagtgacccgccggcctggccggggcggaacacgcggggcgggacgggccaaccggaggagaggcgggtggacggtgctccgcgctgttcgtcccgcaaaggccaagcggcgtgggggcaatctccgcttgctggcaaaggccaacggctggtgatgggtgggggcgggtataccggtgggttagaagatattttagctggacaaaggtagtacatagcattactgacaaaattactgaccaagaggtccaagaccgtgcaaaatgtaaatgaaaccagatcaaacagatccacgcaaagaaagtaaaggttgtacatgaattaattacagcatcttaagacatagccgagttcgaac

SEQ ID NO: 2390 - DNA, 1553 bp, Oryza sativa
  ref <308>: DATABASE ACCESSION NUMBER: AK060228
  ref <309>: DATABASE ENTRY DATE: 2001-12-06
aacgttgtcgagggcagcgcgctgcaggccgcgagcttagcaacccggcttgcgagagaacgaacatggcggcggcggcggcggcggcgcacgtgctcgtcttcccgttcccagcgcaggggcacatcaactgcatgatgcacttcgccggcgacctcctggagcacatggagtcgatccggaccaagggcagcgtcgcgtaccgccgcgtcttgctcgcctcgcttgtgcgtgcaggtgacgatggcagcaccggcgtccagttccctccggtgacctgcgtcgtcgccgacggcatcatgccgctcgccatcgacatcgctgaggagatcggcgtcccggcgctaggcttccgcacggtcagcgcgtgcagcttcttggcctacctgtcgattccaaggctgttcgagctcggcgagctgccgttcccggccggcggcgacctcgacgagccggtacgcggcgtcccgggcatggagaccttccttcgccgacgggatcttccgagcttctgccgaggcggcggcggcggcgacagccagaacgatcccatgctgcaaacggtgaacgaggtcaccgcgcacagccgcaaggcgcgggcgctcgtgctcaacacgtccgcgtccatggaggggccagcgctcgcgcacatcgcgccgcacatgcgcgacgtcttcgccatcggccccctccacaccatgttcccggcgccggcggccgcgggcagcctgtggcgcgcggacgacggctgcatggcgtggctcgacgggcagccggaccggtcggtcgtctacgtgagcctaggcagcttcaccgtcatctcgctggagcagttcacggagttcctccacgggctcgtcgccgccgggcacgccttcctgtgggtgctccggccggacatggtcggggcgagccagagcgccgccctccgcgaggccgccgcggcggcgggggacagcagggcgcgcgtcgtggagtgggcgccgcagctggacgtgctgcgccaccgcgccgtggggtgcttcctgacgcacgccggctggaactcgacgctggaggccgccggcgagggcgtgccgacggtgtgctggccgttcttcgccgaccagcagatcaacagcaggttcgtgggcggcgtgtggaggacggggctggacatgaaggacgtgtgcgacgccgccgtcgtggagaggatggtgagggaggcgatggagtccgcggagatcagggcgtcggctcaggcgctggcgcggcagctgaggcgggacatcgccgatgacggtgggtcatcggcggcagagttccagcggctcgtcggtttcatcaaggagctaagccagagcatggcggacagtaagtctgacgacctcttaacggcgggtatcaggaatgcacttaattaacattgtgttaagatgtacttaataatacttgtcgttacatacaagtacacggtctcaaaaaaacaatcttgattattattttctatatatatatgcacgtgtgtatgactgtatgtacatatatatcaacaaatatataattttatattg

SEQ ID NO: 2391 - DNA, 524 bp, Oryza sativa
  ref <308>: DATABASE ACCESSION NUMBER: AK060229
  ref <309>: DATABASE ENTRY DATE: 2001-12-06
aaaaaaatccacatccaccggagagagtgtgtttattggttcttggaggagagatgtccaagatggcggaggagaaggtgctggcggcgccggccaccgtcgacggcgggatgcagtcctccggggacctgcaggcttcgtcggcggcggcggcgcgtgtgcggcccgtcgagacgctcctccgcgccgcgccgctggggctctgcgtcgccgccatggccatcatgctccgcaactcggtcaccaacgagtacgaagaagaagacgaccacccagacgaccaccaccaccacgacatccccagctactaagcttgagctgctgcgtgcttgggtactactactagctaggcgagagcatgattaagtaataataataagtacttttatctctccagctaaatatatagtgatgagtgctttttaatttcttcttgtgctctgttatatatatatgtgattatctctgacctgatcatgatcatcgtcgtcatatactcatatatctctactcgaactcgtggt

SEQ ID NO: 2392 - DNA, 1967 bp, Oryza sativa
  ref <308>: DATABASE ACCESSION NUMBER: AK060230
  ref <309>: DATABASE ENTRY DATE: 2001-12-06
aaccctccccctcgtctcctccgctgcgaagccgcagatctcgagctgccattcgattgatgaggtaaggggggtgccggcgcgagaagcgaggttggctggccggcggagggcgggctgtcggtcgcgggtgcgccaggatggggctgatctcggggatggtgatggggatggtggtcggcgtcgcgcttatggccgggtggagccgtgtgatgcagcggcgcagcaggaagcgcatcgctaaggctgcggatatcaaggtccttgggtctctcggtagggacgatctcaagaagctgtgcggcgacaatttccccgagtggatatccttcccgcagtatgagcaggtgaaatggctgaacaagcatctcagcaaactctggcctttcgttggtcaagctgccactgcagtagtcaaggaatctgttgagccactgctagatgattatcgacctccaggaataaaatctctgaagttcagcaaattctctcttggaactgtttcaccaaagatagaaggtattcgcattcaaaatattcagccaggccaaatcataatggatagatcttcgttggggtggtgatccaagcataatccttgctgttgatgctgttgttgcatcacttcctattcagctcaaagatcttcaagtctacaccattgtccgtgttgtatttcaactatcagaggagatcccttgcatctctgctgttgttgttgctcttcttgcagagccagagccgaaaatacaatacactttgaaggctattggaggaagtctgaccgctgttccaggactctccgacatgattgatgacactgtcaattcaattgtttctgacatgctcaagtggccacacaggcttgttgttccacttggtgtcaatgttgatacaagtgagctggagcttaaacctcagggaagacttactgttactgtagtaaaagcaacttcattgaagaataaggagttgattggtaaatcagatccatatgtgatactatatgtgcgtccaatgttcaaggtcaaaacaaaagtcatagatgataacctaaatcctgaatggaatgaaacattccctctgattgttgaagacaaagaaacccagtctgtcatttttgaggtatatgatgaagacagacttcagcaagacaaaaagcttggtgtagctaaactagcagtgaacagtcttcaacctgaggctaccagtgaaatcactttgaaacttcagcaatcactagattctcttaaaattaaggacaccaaggatagaggaacattacatcttcaggtcacatatcacccattttcaaaggaagaacagatggaagccctagagtctgaaaagagagctatcgaggagagaaagcgactcaaggaggctggggttattggtagtacaatggatgctcttggtggtgctgcttcactagttggttctggtgttggacttgtgggcactggcattgtcggcggggttggacttgttggatcaggaattggtgctggtgttgggcttgttggttcgggtgttgggcttgttggttcgggtattggcgctgtcggcagcggcctcggtaaagctgggaaattcatgggcaagactgtggccgggcctttcagtatgtcccggaagaacggtagcagctcaacggctccccaggctgaacaaccttctgcgtgacttgatgtacagtgattgcaatggacatcgcatgttcagttgcgtgttaattctgtttgatataaacttgtgatacctagaattatagggttgcataccatgcatttcagtgttctggcaccgtcggtgtcaattatatgaccatctgttgcttttttttcttcgttctgtttttacctgaagataaatagcaagattaaactgtaaattggcaagctagacatatccagatcctttctggacaatgcaatggtattgaaatttgtcgttattaaaaaaag

SEQ ID NO: 2393 - DNA, 1454 bp, Oryza sativa
  ref <308>: DATABASE ACCESSION NUMBER: AK104276
  ref <309>: DATABASE ENTRY DATE: 2002-08-28
atgctcgccattttccccaagctcccgaagcgatttccatttcaactgctcttcctcccttcgcagcacgcacgtcgccgtagccacatggccgacccttccagatcctcccccaccgcggccgccgccggcgacgccctcctggcggcggcggcggcgcccggtgacgcgccggacgcgaccgccctcgccgtggcggccgatgcggacgcggagttcgggttccagcgcgcggagctcgggacggagaagctggccggcacggtgcagttccacgagcgccacgtcttcctctgctacaaggggcccgaggtgtggccgtcccacgtcgaggccgcggagtctgaccgcctcccccgcctcctcgccgccgccatcaagacccacaagtcggacttgaagaagaaaaccaaattgaccatttgtgaaggagaagatggcactgagtcatccaatggagacgtgttgatctttccagatatgatcagatacagagggctgacccactttgatgttgacaactttgttcaagaagtgcttgtgaaagatactgaatggcttcctggatctcctgaggctataaaaggttcctatgtttttgtttgctgccatgcaagcagggataagaggtgtggtgtctgtggacctgctttgattaagaggttcaaggaagagataggtgtacaaggccttgctgatcaggtgtcagtcagtgcatgctcacatgtgggaggccataagtatgcaggaaatgtcattgttttcagtgcagatgccaagggagaagtgactggtcattggtatggttatgtttctcctgatgatgtgcctgtcttgctacataaacatattggacaaggagagatcgtggaccatctatggaggggtcagatgggtttgtctgaagaagagcagaggaaagccctggagtctaaacacgtgacaaatggtgtgaccgaggatggtgcccatgaatcccctgaagaaactaccaacggttctgcttgcaaccctgtcgctgcaggtggttgctgccagggcaatggaggctttacctgctgccagagtgatctgccaaaggaggataagagcatcacagctgagcagaaccagaagagctccgagaagggggctgacaaagagtgtgctgctggcagcaagaagaggcacatgaagatgtgttccatgccaacctggtttgagacatgggaaacggctgacacctatgctgctcttggtattgttgcagctgctgcatcggtgttcgtcgctttcaggatctacaagaacctcaattgagaatcctcagaacagggctaggttttgtgcactaaggacagtctactgctgtaaaacagtctgctgtgagaataatatactacgtgtgcatagtaatgcaagattagaactttaaagtagctaatctgaagaaagtgaccaaagttgttttgggt

SEQ ID NO: 2394 - DNA, 474 bp, Oryza sativa
  ref <308>: DATABASE ACCESSION NUMBER: AK060231
  ref <309>: DATABASE ENTRY DATE: 2001-12-06
gtgcacggccagttttaggaaaaggagtttcaggggtcatcagattgagcagaaataagggccaaagagacggccgaggagcaagaattggtgatgatggacctctgaagcaaagagctggagaaacttcatctaacttcatgttgcatagaaaaatcccagcttctttcttggacaaggctgaagagttcttctgtagtgaaaatgatacagcagcgaatataacaaactgaccagaccacagaacaagctacttaatttggaccttttttatttccttttgagatgatggttcttgagaatatacaactagacaggctaaacttcagctggacggatggtgatgattagggattgactgtataggttttggaaaagacatttgccatttttacaaggcttgctcgaggtaactcggccaaattggtcaaaccctgggagctaatataatatacgtgtcaaaatttatcatgc

SEQ ID NO: 2395 - DNA, 1383 bp, Oryza sativa
  ref <308>: DATABASE ACCESSION NUMBER: AK060232
  ref <309>: DATABASE ENTRY DATE: 2001-12-06
gttgttcttgtagctgatggggcagagaaacctattggatggggtctctataactctgtgtccatgttttgtgttcggctgatgcaactagaagaagaggcaaaaagggatccaacatgtgcactaaatatggaaagactgcttgaggcaaggattttatctgctgtggatttacggcgcagtttaggtctcccttcagttcacacaaatgcttatcgtctcatcaacagtgaaggggacagattgtctggtctaatagtggatatctttgctgatgtcgctgtagttgcttcatctgctgcttgggttgagaaatataggcatgaaatccagttccttgttaacaaagtcagtgatgtgaaccatataaagtggagatcatcaacagatattctaaaagaagaaggattagatgtatcagaacaaaaggatcctgaatcgtcttcacactgtggaacagtggaggtcatggagaatgatgttctctatctagtctcattggaggggcagaaaacagggttttatgcagatcaacgtgagaaccgtcatttcatatcaacactctcaaaggaccaaagggttcttgatctgtgctgctatagtggtggttttgctctaaatgcagcaaagggtggtgctaataatgtcattggcattgattcatcagcatcagcactagaccttgccaataagaatattatcctgaataagcttgacacccaaaggatttcgtttgtaaaagaagatgcgactgcattcatgaaaggtgctatctcaagaaatgaggtctgggacttggtaatccttgatcctccaaagttggcacctcgaaaaaaggtgctacaaagtgcctcgggtatgtacagaagcttgaacgctcttgcgatgcaagtggtaaagccaggggggttactcatgacatgctcatgctctggagctatgacccaaagcggcctcttcctcagaaccattcagggtgctgcatcaatgaccggccgaaaggttacagttctacgccaagcaggggcagcctgtgatcatcccgtagatcctgcataccctggaggccgatatctcagcaattacttgctccgagtgacctgaaggaaaaaaaaaaggcttagaagccttctactgaccaattaccgcacagcattttcctaagagctgatgctttgaagttatagttcagtttcatttcattttttaagtcatacttgttagatcaagaaactttccgaaggaaagatgtatgatgatatagattttgaagattatttgttaatttctagcgcagatcattatttacccttgttgagattaacgtttttaacacttttttatatatggaatatggaagatgtgtaaatcattcacatggtg

SEQ ID NO: 2396 - DNA, 1229 bp, Oryza sativa
  ref <308>: DATABASE ACCESSION NUMBER: AK104277
  ref <309>: DATABASE ENTRY DATE: 2002-08-28
aaacttagctatatcgatcgaccatggcgtccaggactagtgctactgccggcatgctgctgctcgccgccgcggctgcgctggtgtgcagctcggcggcggcgaggatgccgccgttggcgaaggggttgtcgttgggctactacgacgcgagttgcccgcaggcggaggccgtcgtgttcgagttcctgcaggacgccatcgccaaggacgtcggcctcgccgcggcgctgatccggctccacttccacgactgcttcgtccagggctacgacgcctccatcctgctcgacagcacacccaccgagaagagcgagaagttggcgccgccgaacaagaccctccgcaagtcggcgttcgacgccatcgacgatctccgcgacctgctcgacagggaatgcggcgacaccgtcgtgtcctgctccgacatcgtcaccctcgccgcccgcgactccgtcctcctcgccggtggcccgtggtacgatgttcccctcggccgccacgacggctccagtttcgcgtctgaggacgccgtcctgagcgcgctcccgtcgccggactccaacgtcaccacgctcctcgaagcgctgggcaagctcaagctcgacgcccacgacctcgtcgccctctccggcgcgcacaccgtcggcatcgcgcactgcacttccttcgacaagcgcctcttccctcaagtcgaccccaccatggacaagtggttcgccggccacctcaaggtcacctgcctggtgctgaacaccaacgacaccaccgtcaacgacatccggacgcccaacaccttcgacaacaagtactacgtcgacctgcaaaaccgccagggcctcttcacctccgaccagggcctcttcttcaacgcaaccaccaagccgatcgtcaccaagttcgccgtcgaccagtcggccttcttcgaccagtacgtctactccgtcgtcaagatgggcatgatcgaggtgctcaccggctcgcaggggcagatccgcaagcgctgttcggtgtccaacgccgccgccgccggcgaccgtgcttggtccgtcgtggagaccgtcgctgaggccgccgagagcttggtgctgtagggtgctaacaaggatggccagtttaattaagcttatttcttgataaatattttgttgcttccaaatgtcatgagtatgtacacttgcgtgtattttgtagcttattttttatttgcaaataaagttgaatatatg

SEQ ID NO: 2397 - DNA, 894 bp, Oryza sativa
  ref <308>: DATABASE ACCESSION NUMBER: AK060233
  ref <309>: DATABASE ENTRY DATE: 2001-12-06
agcgcgagcgcgtccgccgcgagctccagaaggtggcaaaggagcaagcagagaggcgggcgacggcgaagcaaatgtttgatttggggcaaagggcctacggaagaggaatgtatggccgctctattgaattcttggaggctgcactcacaattattcgcccttcatcgctccttggtggggagatccaaatttggcttgcaatggcgtatgaggccaataggaggcacaaggattgcattgcactgtacaaagagttggagagtacacatccaatgatcagcattaggcggcaggcagcggaactccggtacatttctgaggcacccaagctgaagatctccaatgacgaggtggtcacaataccacaaattggatctagttgggattggtacgctggaacatggagtgacaaaatcaaggagcaggaggacaagaaaaggaaaatggtggctgccagcagccaagttgaaccttcgccaaatatctttggtgacttatctttcttgcgacctccaacggaatggacaaggagcgcatgggtgattgttactttatggattgttttgattggaacagcaatctatttgcaaaggtgaggaataactgcaactatgaaagaagctactccattcttgtatatgaagatgtcttgctggtaaggaggcaacaattgaaggaagctagctgggcggatttggagttatacttatgacttactactagattgaagggagatctggatcgtctgcaacggtgcagcctgcagagattcactgtgtggacggtaatttgaatcgcacgctatagctgtagcaatgcgttgtggaaacagtttacagttttaagattttgcggcagcaatgaataaaggtttccaaatcacctttcttc

SEQ ID NO: 2398 - DNA, 1307 bp, Oryza sativa
  ref <308>: DATABASE ACCESSION NUMBER: AK060234
  ref <309>: DATABASE ENTRY DATE: 2001-12-06
gctgccctcctctccgtcttcctcctccctcctctgtcgcctgttcttcttcttctcacgatttttttcccctgtaaatttcccggcggcttctcgcatctcgttcatcgtcgtcgtctgctcgcgacttgacggacgaggaggaggaagaagggagcgattggtttggacggtaagaaagggagggacgcgcgggcggccggagccggtggccgacggccattttttcatgcgtggctccctggaggtccacgcgattggcagacacgccgcgtcgccgtgcgccctgagactgaaagccctcccggcattggacatgatgaggtaccaaaggcttagcccggactgcctcccgctagccaacggcggcggcggaggaagcggtagcgtgacacggaagccggcgtcgagatcctgcaaggacgacgatggcggcatggccgtcgccgcggacagctcccgcctctcgtcgtacctcccgtcgtcacagctcgattccaagccgctgcgcgctcgggcgccgcagccgtcgtcctcgtcggccgccgcctggagcccggcgcgcgaccacgcgcacgcccaccacaaccaccaccaccaccaccacccgtccgactcctccgacacggcctcgccgagctccaacggcgcgggtgctccaagtgcctgggattaatttatagttgctccctattagggtccgtcaggtctaggttgcgttttactctagtttcctcaatagtatacatttttggtaggagctgatatacagcgacaatacaaggtgaactgtgtcatcccctttttttcttctggttgctacaaggtagtcttatctcgcagatgtccattatggagagtcttgaggactttcaagcacacacaagattcctagttaggaatagtttttccggggactgaaattcctagttagggatagtagttggtattggtagactgacatttggtgcttgatgccaagtttctgcctttttgccgtttccttggtccatgtctcattttggtggtcggttggttgtagagcttgtggtgagggaggcttttgcggcttgatttttgaccgaagtttgattttgatacccaggttgaacaaagaggtaggaggatatgtagtcctttagatcttgttgtaatgtatatactgtgaagtgaggctgggaaagaataagttttgtctaggtttataaaggaagaagggggaaattctgtgatgtttgttccttgagaggatacatgttgtgaatttgttttgaatggatgagtgtcaattattattatattactcg

SEQ ID NO: 2399 - DNA, 304 bp, Oryza sativa
  ref <308>: DATABASE ACCESSION NUMBER: AK060235
  ref <309>: DATABASE ENTRY DATE: 2001-12-06
gaattgttgtatgtaatctagaatgtaaaatcgtaagagtccttcccttgaataatcattgtttatcaccattggtgaagattcagaaaaccccagttcgttgtgtctgagcaggggatgccaaatcattcttttttgcctacacgattagccatgctaggttattctgtatattatgatctgttattactttgagcggtgacaggagcggctgggacgaagttgcaaataagtctagtgcatagcataactgcctttttacatggtgctatgttaataaaagttctgtactcatggctgtgac

SEQ ID NO: 2400 - DNA, 321 bp, Oryza sativa
  ref <308>: DATABASE ACCESSION NUMBER: AK060236
  ref <309>: DATABASE ENTRY DATE: 2001-12-06
ctggcttgcttttagtttgtgtagcatgtttactatttttgtcaatttcttgatttgggtgacctgtctattaatagaacggaacagcagaaacatcaacaatgtgtgcttgcaggcatggtgtcaacgtgtcatggtgaagataaatgtgtaatgtttctctgtagagcatgttttacacttttagtgcctcatatacagcacacaattatacagtagagcaatgcttcatgattgagaaaaaaatcgcatgatgtggcgctgtaaattccaagcattcccacggtgtttaagtaaagtaatataactcaaaagcttttc

SEQ ID NO: 2401 - DNA, 1512 bp, Oryza sativa
  ref <308>: DATABASE ACCESSION NUMBER: AK060237
  ref <309>: DATABASE ENTRY DATE: 2001-12-06
ggattatcaacagaacaaaggaaaaggctaacaatagcagtggagctagccgctaacccatctatcatattcatggatgaaccaacatctggacttgatgcacgagcagcagccattgtcatgagggcaataagaaatactgtggacacaggaagaacagttgtttgcacaattcaccaaccaagcattgacatatttgaatcttttgatgagctattcctgatgaaacgaggaggtgaggagatttatgtaggtccagtaggtcagcactcgtgtgaattgatcagatattttgagtctattgaaggtgtcagcaaaataaaacatggctacaatccatcaacatggatgctggaagtgactagtactgtacaggaacagataactggggttaacttcagtgaaatatacaagaattctgaactgtacaggaggaataaaagtatgataaaggagctaagctcacctcctgatggttcaagtgacctatcctttccaacagaatactctcaaactttcatcacacaatgtttggcttgcctatggaagcaaagtctgtcctactggagaaaccctccatatactgctgtcaaatacttctacaccattgtaattgcactgttgtttggaacaatgttctggggtgttggcagaaaaaggagcaatcaacaggacttgttcaatgccatgggctccatgtatgcgtcagttttatttatgggagtgcagaattcttcttccgttcagccagttgtgtctgttgaacgcactgtgttctacagggaacgagcagctcacatgtattcacctttgccatacgccttgggacaggttgcaattgaacttccatacatccttgttcagtccttaatatatggtgttctagtgtatgcaatgattggatttgagtggacagctgccaagttcttttggtacctgtttttcatgtatttcactttatcatactacacattttatggcatgatgtcggtgggtctgactccaagctataacgtggcctctgttgtttccactgcattctatgccatatggaaccttttctcaggatttataataccaagaactcgaattccaatatggtggagatggtactattgggtctgccctgttgcgtggacactctacgggttggtaacttcacagttcggggatgtaactgacacgtttgataatggtgtccgtatatctgactttgtcgagagctactttggttaccatcgtgacttcttgtgggtggttgccgtgatggtggtctcatttgccgtcctcttcgccttccttttcgggctctcaatcaagatattcaacttccagaagagataaattgaggaaggcatacccgagttgtgtatagcatgtgaatactagcacatcgtaattgtacagcttgaaagcacatttgtatcaccataattgtacatcttaaagcacattgtgtatcctggaattcatggtactcagattaacaagttgtttcattgagttttttgc

(The sequence listing continues in the following parts.)

What is claimed is:

1. An isolated plant-derived nucleic acid, wherein said nucleic acid is selected from the group consisting of:
(a) a nucleic acid encoding a protein comprising an amino acid sequence set forth in any one of SEQ ID NOs: 28470 through 56791;
(b) a nucleic acid containing the coding region of a nucleotide sequence set forth in any one of SEQ ID NOs: 1 through 28469;
(c) a nucleic acid encoding a protein comprising an amino acid sequence set forth in any one of SEQ ID NOs: 28470 through 56791 wherein one or more amino acids are substituted, deleted, inserted and/or added; and
(d) a nucleic acid hybridizing to a nucleic acid comprising a nucleotide sequence set forth in any one of SEQ ID NOs: 1 through 28469 under stringent conditions.

2. The nucleic acid according to claim 1, wherein said nucleic acid is derived from rice.

3. An isolated DNA molecule selected from the group consisting of:
(a) a DNA molecule encoding an antisense RNA complementary to a transcript of the DNA molecule of claim 1;
(b) a DNA molecule encoding RNA having ribozyme activity to specifically cleave a transcript of the DNA of claim 1;
(c) a DNA molecule encoding RNA inhibiting the expression of the DNA of claim 1 via an RNAi effect at the time of expression of said DNA in plant cells; and
(d) a DNA molecule encoding RNA inhibiting the expression of the DNA of claim 1 by the co-suppression effect at the time of expression of said DNA in plant cells.

4. An isolated DNA molecule selected from the group consisting of:
(a) a DNA molecule encoding an antisense RNA complementary to a transcript of the DNA molecule of claim 2;
(b) a DNA molecule encoding RNA having ribozyme activity to specifically cleave a transcript of the DNA of claim 2;
(c) a DNA molecule encoding RNA inhibiting the expression of the DNA of claim 2 via an RNAi effect at the time of expression of said DNA in plant cells; and
(d) a DNA molecule encoding RNA inhibiting the expression of the DNA of claim 2 by the co-suppression effect at the time of expression of said DNA in plant cells.

5. A vector containing the nucleic acid of claim 1.

6. A vector containing the nucleic acid of claim 2.

7. A vector containing the nucleic acid of claim 3.

8. A vector containing the nucleic acid of claim 4.

9. A transformed plant cell maintaining the nucleic acid of claim 1.

10. A transformed plant cell maintaining the nucleic acid of claim 3.

11. A transformed plant cell maintaining the nucleic acid of claim 4.

12. A transformed plant cell maintaining the vector of claim 5.

13. A transformed plant body containing the transformed plant cell of claim 9.

14. A progeny or clone of the transformed plant body of claim 13.

15. A propagation material of the transformed plant body of claim 13.

16. A propagation material of the transformed plant body of claim 14.

17. A method of producing a transformed plant body, wherein said method comprises the step of transducing the nucleic acid of claim 1 into plant cells to regenerate a plant body from said plant cells.

18. A method of producing a transformed plant body, wherein said method comprises the step of transducing the nucleic acid of claim 3 into plant cells to regenerate a plant body from said plant cells.

19. A method of producing a transformed plant body, wherein said method comprises the step of transducing the nucleic acid of claim 4 into plant cells to regenerate a plant body from said plant cells.

20. A method of producing a transformed plant body, wherein said method comprises the step of transducing the vector of claim 5 into plant cells to regenerate a plant body from said plant cells.

21. A protein encoded by the nucleic acid of claim 1.

22. A method of producing a protein encoded by the nucleic acid of claim 1 comprising the following steps:
(1) transducing the nucleic acid of claim 1 or a vector containing said nucleic acid into cells capable of expressing said nucleic acid so as to obtain a transformant;
(2) culturing said transformant; and
(3) recovering the protein from the culture of the step (2).

23. An antibody binding to the protein of claim 21.

25. A rice gene database comprising sequence information selected from the group consisting of:
(a) one or more amino acid sequences selected from SEQ ID NOs: 28470 through 56791;
(b) one or more nucleotide sequences selected from SEQ ID NOs: 1 through 28469; and
(c) both (a) and (b).

26. A method of determining the transcriptional regulatory region comprising the steps of:
(1) mapping the nucleotide sequence of any one of SEQ ID NOs: 1 through 28,469 to the rice genome nucleotide sequence, and
(2) determining the transcriptional regulatory region of the gene mapped in the step (1) which contains the transcriptional regulatory region found on the 5′-side of the 5′ most end of the mapped region.
